United States Patent Application Publication US 2006/0134663 A1 - sequence listing, part 12

SEQ ID NO: 23957 - DNA, 142281 bp, Homo Sapiens
tgtttaatgagaagacagaatttaaaaggtcgctccatcttacttattaggttggacaatgtgaagtcgccagtaattgaccatttttgaccaataaaaatgtttatttcatgtggttcaacctaaattaatattttagttgactggcttttttgggtgagattttaaactctaatttggtaaaattgtatgtaggcttagatggaagtttaggtgcaggctaagcattcaagaaacttggcttttaactacaaagagacttgcttttaaaagcagttgctacattctccatttgtttatgaaacatctctacaacgtcagccatgtaccaggaactatactagtccctggggacccagaatgaagctgtggaccctgtcttgtgggagcctacagtctgctggggaagtggtagtcaaagaatggttgctataatggtgatatgtaccaaagtgaggtgggatcctgaaggaatgagggtcttcgcctgaggttgtcagggacaactttataaagtaaggtatctacagaggacagtaactttacacagaaaggtaacttttgagctgagacttgatgaagatttgttggtcaggtgacagtgggccggggggttccaggcagaggtggtggcagaggctaagctgcagaaaaagccatctcatctgttgggatgagatgggaatgttttgtcagctaaacagaaagttagccaagtgtagtggttcatgcctgtaatcccaacactttaggtggccgaggcagaaggattgcttgagtccatgagttcaggaccagcctgggcaacatagggagaccacagctctacaaaaaaatttaaaaattaatcaggtgtggcggcacgcacctgcaatcccagctactcggaagctgaggtgggaggttcacttgagataaaagccacagtgtgctgtcatcacgccactgcactccagccaaggcaacagcaagacggtctaaaaaaaaaaagttaatgttaacatagggaatcataaaagtgataaatggaacatatataccctaaatattttaacttaaaacctaaaagttttacattggtcaatgtttttatgtacggccataggattttctttgtttttggttccttgattctgaattgtcttccctgtgtaaattacatccataaggctttcccatttgggccactttaaagactttgacacttacagagaaatctgtgtgcagaatcctgtacatttttactatgttcttttatatttttttagttgccactcccactccaaattcaacagcagttttgttttagcaacttgcctcttatcaagttacattccaaatcatttaactttatagaaatagcagtgtgtttttcatcttatttcattggtttataaaatagttaaactatgtaatgatgaaataataataagtatgactggtacaaattcgggaacacacacttgaatctcaggaagtgcgattcagctggttgtggtcaagtgcaaaagccattccctgtgacttttagagtcgggggtgctggtggttcagttggtatgcttcataaatagaattgattaatctactgagtagagtcagttattttgtttgttttttcttttttgagacagagtcttgctctgtcacctatcctggagtgcagtggcacgatcttggctcattgcagcctccacctcccaggttccagtgattcttgtgccttagcctccccaagtaactgggactacagacacgtgctaccacgtctgactaatttttgcatctttagtagagacatgtcggccaggctggtctcgaactcctaagtctcaagtgatccgcctgccttggcctctcaaagtgctgggattataggcatgagccaccacgtctggccctaagtagagttgattaaatatagattgttgagggagcctcttctgtatttatgaaagttggagtggccagagatgagatcagagagttaattaggggctgccagatcctaggactgattaggccatgcagagatttggttctttagatgacagagtcattgaagaattttgagcagataggagacaggacatgttagagaactcctgctggtagcattgtggaaaaatgagtggcgagggctaatgcctaaactggaggcaagggaaggtgtgttagtagttaggctggagtcagatgttggtaaagatagtgggagtagaaatgtaaaaaatatggattttgaaggagatttagtacttgacaattaaatgtaagggaaagaaataccgtaaaactcctcccaggtttctgtctggcctgagacaatgagacagaaatgcccacaggaggtacagatttgagggggagatgtattttgtttgaggcctgtcaaagaaactggcttctagccatcagaaagagacattgattggtgtagttttctttctgtagaaagtaagcttggcaggagatattttattaaattttaaaacttctctcaggcagatcagcggtttgtatggaatggtcatcttctaagagaactttctgcacagccagaggtaatgtacacgaaataaaatctgcttaattgttacagtccaagctttaattcaatgcatactataaagtgacttcctaatcaccaagaatttcgagaaacaattctaatttaactgtttataacttacaaacttggatcaggtctaccctgtcacatcattctaggttgaagaagcctaactattttactctgatcttctatagaagccttaaataaaaatacattgctttgtctaactaagagagatacaggggatcttggtacatggataatggagaaatgaggggccagggccaagtttcctggccaaggggagagctcttttttgtcttcctttggggatgagactcccttcagtcacccaggagagacatgcacaggcaccgccctcttctgtcctttgtctacacatatgaggtataaacagggaggcccagctagggaaacgtgatatattattgaatctaggtaaatagatgtgtctaattgctttatttcttgtcatttgctatgctttttttggaaaagtagtttgagctgcaaacaattagcatgggatatcttttccctggaggagtgaagttgttgtaggcaaagactgaaaaggaggtaaacattctgtaacttcatgtagctttattagtgttccaaaatctgtgaatattcaagctcaaatgattgtaatgcatacttaatgttacattagagaaatcttttaaaaattatattacccataagtttactaccttgttatgtttgtatattacctccctatgtgtaaatatttttatataatgcttatttatttttaaagtatatttattctaaatatatatcttcatttcaggttcatcggtttgcccttccagtgttacatggctgtatccttacatgatattactctttagtttctagatgcctttatttaaattttattataaggcagatttagagatagtctcaaatactccataaggagagtatttcagaattaatataaattgctgttgataagaaaatcaaactcattgctattttggtttttttttttttttagaatgaacttttcagactatacgattctctctctgttcaagagttctggggttggttgtttaaagaaaaggaatatgtgtactgtattttgcctttatttgatgttaccttttatcagtaaattacacataagtagtttggacctggctgttgaaaactttcctaagtacataatttaaaaagttagacttaggccgggcatggtggcttgcacctctagtcccagttactcaggaggctgaggtgggaggatgacttgagcccaggagtttgaggctgcagtgagctgtgatggcaccactgcactccagcctgggtgacagggtcaaaaaaagtgagactcagacactagtgtgggtaacaagttggagaggagaattaccattaaaaattttgtcatttgaaatagtgacagataaatgaaaataagtagagtacaaagaatattgcctaagggagaaatcagagtacagatacaaaatgagtaatgattatctaattgtaggttcatgttaaaaacaaatctatgtcatagacatcataataaaaataaagcagccacgtgagctggctcttaaaggatatataagcacaatatgctgatgagtgcctatccagttatgtgccacatactgacatttcagtcggtgacagaccacatatatgaaggtggtcctataagattataataccatatttctactgtatcttttctatgtttagatatgttgagatacacaaataccattgtgttacagttgcctacagtatttagtacagtaacatgctatacaggtttgtagctaaggagcgatgggctataccgtgtagcctaggtgtgtagtaggctgtgccatctaggtttgtgtaagtacactctataatgtatagaattgcctaacgatgcatttctcagaatgtacccctattaagtcatgcatgactgtaatcaggattgtgccctgaagaaaacagtgatgacatctatcaagcacatgtaagaagcttatcaatacaagtctattatttatttattcagtatgttaatataatttcactaaacttaatgcttgttatacttaaagaaaacccaaaaagtaatggaggaaacatgttccacagttatggggaaataaaaattagaaaatttcatgataaaagctcatttatttttgttttcccaccccgagctttccaagttctcctaaggataaaataagaataaatgtgtttattcggccgggtgcagtggctcatgcctgtaatcccagcactttgggaggccaaggccggcagatcatgaggtcaggagttcgagaccagtctggacaacatggtgaaaccctgtctctactgaaaatacaaaaattagctgggcgtggtggctcacacctgtaatgccagctactcgggagactgaggaaggaatattgcttgaacccaggagacggaggttgcagtgagccgagatcgtgccactgcactccagcctggatgacacagcaagactccatctcaaaaaaaaaaaaaagcgtttatccttattaagtgccttaaatgatttgggccaactatggtgttttttggtttttgtttttttttcaaaatgagattgtgaatggacaaacaatattaagtgagattatagaacctttttttctaggcaaatttagaaacagcttactcatttacctttaaattgaaagctttaaatgagcttttctttagtgtagtttgttgactagaagtaaaatcatatgtttcacacacatacagagacattaataagtaaaatgaccccaagacaggaacatgactggaatagagagtggacagagaggtgggagctgtgttcagagaattagctcagcccagatgactcagggccttataagccatgggaagaactgtggcttttactttaaatgtgatggggccaggcatagtggcgcatgtctgtaatctcagtgccttgggaggctgaagcaggaggatcctttgaggccaggagttcaagaccagcctggagaacatagtgagaccctgtctctacaaaaattttttaaaaattaggcatggtagcatgtgcctgtagtcccacctgctcaggaggctgagtcaggaggatcacttgaccccattttgaagctgcagtgagctatgatcacaccactgtgttctagcctgggtgacagcgcaagacctctactcaaaagattttggagaaggggaaaattggtgaaggtgcatgctagagtgatatccaagaatgtgtgaggtgggtgggggtcagcgcacaggtagagggcctggtgtgggctgctcacctaccactgtagaagggaagcagatagatggatgtggttgctgatgggtgtgtaaatgtgatcggggcctgtggagggcttttatttttacagcaccatataaagtgtcataatgggccatgagggggatgagggagaaatgttgcatgttgaggggagtatgtgaaatgccatcctggagagaaggcatggatggccctgggagtaactgattgatgaaagactagaagtaaatacactcacattttaaaagttatgctgatgggattcagtttttattttactcttgttccttccatgctttatggattctctaaagtgtgtagatgtttttgtcttgtaatcagaggaacatgattcataaagcagtcagtcatattctctgctagatttagctctctaagagcaggcttatctgccctgctcatttttgtgccctggctcgaaatagataatttgggtaagggagcaaatattacattggagtcttctctagtgctatgggcttcaaaggaaagcgaattgggagctcaagaggagcccttatcaagtctgatgataccaggtaatagagatgagtcattagcagctcaactcattgctgatgtcattaggtaccattttgaaaagcatttggtgttctcttgtgaatttgccagcacttctccaatgcatacccaatacattcataccaggaggtctttccagaatgttcacagtaccacgttagagcaataccatgaacgtcacaagggcttgaagtttataaatagcgtagtttcatttttacgaaaaagcaagctgcgtgtttctaagtatggttgcatgtgatgaaactaaaaagataggagaatggtctccatgaacctcagaatagttacttctaggtgagaacacaattggataaaatagggaaggagcagataaatagattcagggttttggtactgttttgaagtcggatggtaggttcacaaatatttattttattatgctgttatactttataatggatgcatcaaattatattaagaaaaagtgttacatatagaaaataccataaccaaacctaaacaaatgtggaaggagaaaaagtaaggccattgaaacaataaaacctttctgtcatacccccctgctccccagccacagtgtggcatacattaaaaagcagacaataaattagccagacatggtggcatgtgcctgtagtcccagctacctgggaggccaaggtgagaggatggcttgggcccaagagtttgaggctgcggtgagccatgatggtgccactgcactccagcctggttagcaaagcaagagcctctctctcaaataaatacataaataattttttttaaaaaagcagacaacatcaaatgttggtaaaggtgagaagccaaagtaattcttgaagcaatatggaatttcctaataagatcagatgaggagtatactctgtaacccagcagtactgctccttagagccatttctgcttatttgtacagagatgtttattgcaacactgttcataatagtaaaactggaaacagctggcatgtccatggacagtagagtggataagtaactgtaatctagtcatatagtggaatattatacagccatagcagcagcaaatgaacctcatgactataatgagcaaataaagaaaactgaaagaatacatacagattaattcctgttatgttaaaaaaaaaaaagtcaaaagctgttcagactaaacaagaatttgtttagtggcaaaactagaaagacaagggaataatgaactgagtggatagtagttacttcttagagggcagtaagggagccacagggaaaggagcttcagagatgctagtgggtacaaaggggtgtgtgtatgtgtaatttttaaaattatgatcaaatatacttcataaacaatttgcctttttggtcatttttagatgtgtaattcagtgagtggcattaatttcattcacagtgttgtgcaaccagcatcctgtttccatcactccagtaagaaattcttacccatttaatatcaactccccatactaaatgggtatttaactattgtaaatagttacacacattatactttactggttattatatttcataataaaaacatttaatgtaagaggtatgccaattccaaaggcttgtgcaaacctttactctgggaatgaagtggagagatcagcctttagaatttctaggtgtatgactgtttatattactgaatggtgtagaaagtgtcctataccatatactattatcagtagtaagggaaataactttatataaagaaaggcttttgggcagatacagtctttcatactgaggttcaccttttctatttcaaggataaggtagagtcaaaatttccatttctaggtaacatttgcttatattcactttgatctgtgaatcttcatatgcttaccagctgttacatggataatttataattatgtgtcatgcatttcattttttttccccttagctgcagtagtctagccttccctccccattttgtgtttcttatttgaaagttaatctattttaaatttatgttttccattcagagtagatttttcagtgatgtggttaatacttaattctttagaaagtgattgagaatatcaggaaaagggaagcatatcatttaaataaaaacaccatagtgaacttcttaaacatactaccttcgtgtcatagggttattaacttgacaaaacttcacagttgattatagtactaagggcttgtgaatattcatgaagatttgtatactcttgtcattttttctcttaaagaccatcattaggatagatagatgcaaacaatctagaaacaatgcttatgatttctattatatgttatatttttcttaatgtggttaagttattaccatgcattcatgttctattaatggaaaatactttgattggattctcatctcgaggaggagctgtttcagagctggtgtgcgctattatgtaagaggtgagaattttgtcagcatggctcatatctgtaattaatattttgtcttacggtgacacgaatgtaaccttttgtattttatttgttttcattatcatttgatagccttgctaagtatttatctcctgcttcattgtaataattaggtaggtcttccgtgcttcagttactgtaattacattgcaaatgttaatgtgatacttgtaggctgctgcttactgcttgaagaggaactgatcatgttgtttgctggatgtccgaaagcacagctgaactcagtgtagttttcagtaacctaacttagaaagtattttcttgtattgcttttaggttttttgcatgcatgaagctagtcatttggctttgtgccttcaactttgtaaacatttacattttgagcatttattttctaggctttgtactagcaacatgcttattttgctaaactaaactttaaaaatctgtattaaagcttactgtcattatgaaaagaagtttctccaacctttgtattttttttaaccagaatatatcagcatattttatggctgtgagccattaaataaattgtagcttggggccagaaagttgtagaaattatttgcttaatctctctcatagcagaggaagaataacattgagtgagtgacctggcaaagatcacaaaccaaaattaaagttagcaactctgttgtaactagattttcttggatggaaacatagtttttgattaaatttttgaacaggtagtgcatttacatatttcaaatatcaaaaagtatttttttaatgcaataaaaaatatttcccatttctgacctcatctgcttggttcttacccccttcccagctaatcagatgttagtttcttgtttatccttccagataatttttatgctaatacagatatgtgcccttctcttcctccttttttagacagtgataatattctgtgcacatttttctgcaccttgtttcctttttttccttcatatcttttgcaaatcttttcataaagatctttctttcatacacacaaacacacatactgtctctcagtctgactctgacttttaaaaataattggatgttgttccttagtgggaattacgaagggaagcaaggatagcctgtgcctctgacaagtaatctcataaagtattgaggagtcatgtcattgctgatttggctcaataattttggccccttctggtgatatggtaactaaaacagtgatacttcacatatacctgcaaatgttatatgtaagaaatatgtcagaaaggatgttaggaaatacttggcacagttaaaaaatacattgatttctttctgataatttggtaatttgggtcagggactagcttgaaagttgcctttgcttagcaagcgtttctttgtaaaaatagattacgtaaacaaatttttaaaggaatgcttcaaatatttgaaagaactaaacagcatcaagaatccaaacactttgcttttcaaactaggttttgtgagcatattcatggagttacagaggatcacatacagattttgtgttttcattttgataattaaaatcagtataagcatctgctggagaccatttgcattattataacaaaatattataaactagcttatattcaccgggtgcggtggctcacgcctataatcccagcactttgggaggccgaggcaggcagatcacctgaggtcgggagtttgagaccagcctgaccaacatggagaaaccccatctctactaaaaatacaaaacttagctgggcgtggtggctcatgcctgtaatcccagctacttgagaggctaaggcaggagaatcgcttgaacccgggaagcggaggttgcgttgagctgagattatgccattgcactccagcctgggcaacaagagcgaaactccgtctcaaaaaataagtaaataaaaataaaatggcctatctttacgttgagtattgtgttgttactaagtataattacctaaattgatagttttacctttcaaactagtatttttcaaattaggatttatggacattttctcaggggtctttgagattttttttttctttaaaagatgtctcaagtttgagaaacactactttagaggaattttgtatgtagaaacaatgtatttaagagcaaccaacttcatctgtttattaataggtttttaatactcctctttaagcctgtttaaagtgagcaagcttgtgttagttttctgatcatgtataatgaatttgtttgaattgtattttcataatgacttttccactaacttgaactgacttaattctctccaagttaacctgaattagtgggtttctgatgtgtttctttgtgtaatcagtatagttaattcttaattttttttctatttaggaattgattcggaaggccatgcagctaactttgtagaaacagaacaaattgtgcactacaatgggagcaaagcttcgtttgtacaggcaagttgttatgtctgttaggcagtcagcgagttggccttttctgcttggattatagttttctgtcatgttgaaatttccctcttttcccttctctgttcttatgtaatatttttatctatggtgcagaaaaagttcaccccaaaaaaggaaaatccattaatctggcactaacctgctgccatttcctgcccttaaattaaatccctagaggagagggtaggctaggaggtgcgaagagagttatggaaatggagccatctgtctattgaaccatttacatgtattaagggcagtgatgataggacaagctgatggcttataattgactttacctgctactgtgagatgtctcttctgttgccttatggagttgtacaccacttgctgctccagagcattagtggccaaatacattcatatgttcataaacatattcatttgaaaatgaataaagcaattttctaattttttcataatgccaaattatataacagatgtaacctgttaatttttactcatagataaatttagaatttcaaggaaataactgtctactacacaaatgccatgtatataaaactagaaggagaaaaagttctaaatgtttttccataaaatatgaactttaggagcagatacacgtggacttttaaagttgtcggtaggttgtattagttttttcccttgcatattcattaatatatacacccctgacaataagtaaggtgagaaaaacaagtatgtttgtgtttcttttcacatttctctcttttcttttagactcgaggatcaatacctgttttctggtcccaaagaccaaacctcaagtacaaaccactgccacagatcagcaaagtagcaaatcacgtgtgtatcttgcatgccttttttgttggttaaaaatagaagcttaatagcattataatttgcatgtaaagaatgtatttattccgcataaatcaacgttcaacatagtttgaggctattcttcttgagtccggcacatagtaaacccctaaaccaaaaggtgtgtgggtggcatgttagaaatatagaaaaacaaactatgattgaatggcatggcaagtaaggatttgagagatctcagtaagatttgtaactttatgctttttagggtacttaatatattccactgaggttgtactcagaattaaagtggtagtgttgcagctcagagtaaaatagcttatgattactagatgacatttagaatagctagaaggcatagttcacatcctgacatctttcttttgaatatagaaataagacatttaaggaggtcctttaaaaatattataaatatttaaattatatttataaattacataatgtactccagtaaaatatgtaactttttcctctctagatggacggtttccaaaggcattttgattcccaagtaattatttatggaaaacaagttataatcaatctggtatgtttcttatgtttcttggggggaaaaaaaagccttaactttttcttgacagaaaatttactattttaaccattttttaagtgtacagttcagtggcattaagtagttcataatgtgcagccatcatcactgttcatttccacaacatttcatcataccagacagaaactctacccattaaacaattaacttcctattatatccctccccacagcccctggtaattctattttactttctgtctctctgaatttgtctattctaagtaccctcatgtaagtggaataatacaatgtttttcttttttaatgtttttaaggttcatccatcttgtagcatgtatagaatttcattctttttttaagactgaggaatattccattgtgtatgtgtatgcatatatgcacacacacacacagacacacacacacacacacacatatacatgcataccacattttgtttatccattaatctattgatggacatttgggttgttttcattttttggctattatgaataatgttgctatgaacattggtggtgtgcaagtatctgattgagtccctgttttcagttcttttaggcttatacttagaagtagaattgctagatcatatggtgattctatgtttaactctttgaggaaccaccatactgtttgccatagtggctgcaccattttgtattcccaccaacaatacaccagagttccagtttcttcatatccttgctgacaattgttgttttctggtgtgtgtgtgtgtgtgtgtgtgtgtgtgtgtgtgtgtgtgtttaatgatagccatcccaatgggtgtggagtagtgttgagttgatttacatttctctaatgatttgtgtgattttgagcatctttgcatgtgctcattggccatttgtgtatcttctttggagaaatgtctatgtaaatcctttcgctatttttaatcaggttgttttttgtttgagttgtagtcattctttatgaagtctggatatttatctcttagcagacaggtgctttacaaatattttctcccactctttaggttgattttttactcttgacaatgtccttggtatacaaattgtttaagtccagcttatctagtttttcttttgttgcctctgctcttggtgtcaaattcaagaaattgtcaccaaatccaataacataaacttaccccaatattttctttttaggagtctttatagttttagatcttacagttaggtctttggtctgttttgagttgatttttgtttcgtgtatgtgtgtctgtgtattacttcttaaaactgcacatgagttaatttttgtatatggtgtaggtgtaagggtccaacttcattcttttgcatatggctatccagttttcccagcaccatttataaaaagactgttcttttcctttgaatggtctgtcaccataataaaaactcagttgaacatatatataaggtcttattttgaggctctgttctattccattggtctccgtgtctgtccttatgacaggatcacactattttggttactacagctttgtgtaataagttttaaaatcgggaagtgtgataattccaacttccttctccttttgcaagattattttggctacttgagatcccttgagattgcttatgaattttaggcttggtttttctatttctgcaaacaatgtcattgggattttagtagcaattgcattgaattgacagattgatcactttgactagtactgtcgtcttaataatattgtttgtcagtccatcaactcagatgtctttttatttatttatgttttaaaaaatttcagcaatattttgcagttttcagtgtacatgcatttcacctccttgtttaaatttatttttgagtatttatgcctgaatggtgtttttttgtttgtttgtttttcgttagtgtaaatgaaattgtttttgtactttcctttttggatatttcattgttagtatatagaaatgcaactgattattgtgtcttgatttttgtatgctccaactttgttgaatttcttatctccaattgatattttgcagaatttttagggttttctatatgtaagatcgtgtcacctgtgaacagagataattttatgcttcctttccaatttggatgccttttttttttttcttgcctaattggtgttgctagaactactaatactatgttgaacagaaattgtgaaagcaagcatccttgtcttattccttttcttaggagaaaagcttttggtctttcatcattaaatatgatactagctgtgggtttttcacataatggcctttatgctgaggaacttttcttctttttctaagttatccagttgagtgtttttatcaagaagaggtgttgaattttgtcaaatacttttctgtatcaatcgagatgctcgtttgttttttttcccttcattctactaatgtggtatattatactgatggatttttgtgtattgaaccagccttacattgtgggaataaatccttttggtcatggtatatactttttaaatatgctgcagaatttggtgtgctagtgtttggttggggatttttacattaatattcataaaggatattggcctgtagttttcttgtaatatctttgtttggttttgatatcaggataatcttatctttacagaataagttagaaagtgttctctcttcttcagctttttggtagagtttgaggaagactggtgttaattctctaaattttggtacaattcactggtgagttcactagtaaagccatctagtccaggcttttctttgttaggagactttttttttttctgttcgttttcattactgattcaatctccttactatgtattggtctatttagattttctattttttcatgattcagttttggcaggttatatgtctaggaatttgccaatctgggttatcctacttgttggcatacagttgttcatagtattctcttagatcctttttatttctcagaaattgctagtaatgtccactgtcactcttgattttagtaatttgagtcttttgttttgttttggtcagtctagctaagagtttgtgaattttgttgatcttttcaaagttcaacttttagttttattgactttattgtttttatattttctattttatttatctctactctgatttttattatttcctccggtagctttgggtttagtttgctcttctttttcttgttccttaaagtgtaaaattaggttattgctttgaggttttcttttttaatgtgtgcatttacagcgacaaattttcctcagcactgcttttgctttatttcatacatttggtatattgtatttttgttctcatttgtctcacgtattttctaagttctcttgctgggattttttctttgaaccagtggttcagtatgttgtttgtttttcacatgtttgtgaaatttctagttttccttctattcttgatttttagctttctgttgtgatcagaatatatacttaatgtgatttgaatttttaaaaatgtgttaaaacttgttttttggcctagatatagtttgtcttagagaatatttcatgtgtacttgtaaaaaaatgtgtattctgctgctattgggtacagtaatatggtctgattggtttatgatggtgtttaaattctctattttcttattcatctctgtctgattgttctgttgttgaaagtagggtattgaagtttcctacaatttttttaaattttttatttatttatttttggagatggtgtctcactctgtcacccaggctggagtgcagtggcatgcctccctggtttgcaccattctcctgcctcagcctcccgagtagctgggactacaggcgcccaccaccacacctggctgattttttgtatttttagtagagatggggctttaccgtgttagccagggtggtctcaatctcctgacctcgtgatctgcccgcctcggccttccaaagtgctgggattacaggcgtgagccactgcgcccagcctctactattattatataattttctgtttctcccttcagttctgtcagtgtgcttcattatattttcaggcggtcatggtttgttgcatatatgtttataattgtatcttcttggaaaattgaccatttaatcaataaacaatgttctttttttgtcttttgtaacaatgtttcacttagagtgtattttgtctgatactagtgtagttattccagctcttttttgattactatttgcacaaaatatcttttttcatcctttctctttcaacctatatgtgtctttaggtctaacatgaatctcttagagacagcatgtagttagatcatatttttttccattttgccagtctacttatttttactggagagttaatccatttgcatttaaagtaattactgataaggatttacttctgctattttgttacttgttttctgtgtgtcctatagctttttgttcctcatttcctccattactgtctcttattgtgcttagttgattttttttggtagtgatatattttgattaccttctcattttcgtttgtgtatattctatagctgttttctttgtggttaccatgaggattacatataacatcctaatgttataagtatctaatttggattgataccagaagcatataaaagctctactcctgtaaagccttcatgcttcctttttatgttgacatttccaattccatctttatatattgtgtttcagtaacatcaatatataattatttttatgcagttggctcttatttatgtatatatgtatttattttttagagaaaaggtcttactctgttgcccaggcttgtgtgcagtggcatgatcatagctctgtgtaatcttgaactcctgggctgaaggaatcctcccacttcagcttcctgagcagctaggactataggcacataccaccatgcttggctaatttttttgttttttatagagatgggggtctcactatattgcccaggctggtcttgaactcctggcctcaagccatcctcttgcctcagcctaccaaagtgctaggattacagatgtgagccaccattcctgactgcatttgacttttaaatcctgtagaaataaaaattggagttacagaccaggatttcaataatactggcttttatatttgcccttgtctttacctttttggatttatttatttatttatttatttattttttgagacagagtcttattctgtcacccaggctggagtacagtggcacaatctcggctcactgcaacctctgcctcctgggttcaagcgattctcctgcctcagcctcctgagtagctgggattacaggtgtgggccaccacacccagctaatttttttatttttggcagagacagggttttgccatgttggccaggctagtctcgaactcctgacctcaagtgatctgcccacctcggcctcccaaagtgctgggattacaggtgtgagctactatgcccagcctgttggaaatttttatatctctgtatagctgcaagttactgtgtagcatcctttcatttcaacctgaaggactccctttagcatttcttacagattgggtttaatgataatgaactacctcaggttttgtttatctaggaatgtcttaatttttccttcatttttaaaggacgttttgccagatacagaatccttggttgacagttttttcttcttccagcatttaaaatatatgatcccactgtcttcagcctccaagatttctaatgagaaattggcggataatcccattgagaatctcttgtgtgtgatgagtctcctctttcttgctgcttttcaggattctgtttttgtctttcagctatgtgattataatgtttttggtgtgggtctccttagagttcagagcttgggtttgtagattcatatgtttcatcacatttgggaaggttttggctattttttttttcttcaaataatctgtctctgcctttctctctctcttcctggaattcccatagtgctaaatattttatttcactttttgtactcttttgctccagaattattttttggcttcttataataatttttctatctttgttgatatcctcattttgtttatgtattgttttcctgatttcttttagttgtttgtctgtgtttccccttagctctttgagtgtttttaagacagttgctttaaagtctttgtctaataagtgtagtctttgtctaataagccaagtcctgtcttggcttccacaggaacagtttctgtcaatttcttatgttccattgaatgagtcatgtttttctgtttatttttgtacctgtgattttttttttaattatatgtttgattattataatatcataactctggaagtcagagtctccttttcccctacggtttgctggggttttttttgttttatttgattgttaaagactctgctaatccattttttttttttgagacttttccaaactatttttgccaaaactttcttattgtgtatgttcactgaggtctgttccttttgcttctattcagctgttttgacaggtttcattgaattccaagaactgaaatagacaaactaacaaaaaaagaaagcaaaaatgagagaacaaccctgtcccccattctttgcagacttgctgtatgctggggcagtcctttgctgagtagccaggcttgctgtgagcctagggatcagtctgtggtaaaggtttaaggtcttctcaggactcttttcagcatgcatcttgcctggttatgtgggtggccttcaaaactccttcatatacatggctgcttttgaaagtcctaatttcctaagaatatcaccaagcttcttctccagcctttagatggtctattgtatgtctccatccagaattttttgcctcaggcatccattggtttatgttcctcttgtagcttttacaaacagtggtcaccatttttactgcccgtgttcagagatacgtgggacagagatgagttagtccttcatgttacaacagatgtacacaattatatgcaaataaggtctggtctgcctcctctagtttgatgaggggaactgagaacccggttattcccttgtaagactaaggttgtcaccactctgaggaggggctgggtcaaggacaagttaaatgccacaaaactttcccaccattttgaaagtgacttttactttattgggtgcttgggtgggttactataaaacctttaatcgtttttcagagctcctacaaagttggctcagacagcttctgggtttttttgatgtttctgtgggagaatgatgagagcttagagcttcctagtttgtcctttttctgataccactctctcctttgaaataaactggaaactatagtgtttgaaattttttacagattaaccagaagggctcggagaagccacttgagcagacatttgcaacaatggtgtcttccttgggaagtggaatgatgaggtacctcactagaaatctgttgcaggtcttttcagatcagatgtgcacttacatatatgcatgattacatagagctcactagacatatgtttcagcttgcatttttttcaatagtagatcaaagcatgatattttgttggcttgaaatttctctagcataatttatgttgcagaataacttcttttcagtcaagttttgagtttagtctctgattaaaattccctcattgaggctttgtgctccagagagtttccatagataatactttgccactagaattgccttaaggaatttggactaggcctctttgcagtgcatacctgattgctgtacttgagcttacttcactaccatttgttgtgtttctcctctactcctcctgagggccccagaagaacctgtgaggatagatatatatgcatatattttcatgtttatatctgcacgtatcatatatatattttttcctctgctaggtatgagcatgagaaggggtgtgtgtgtgcatgtagtatatgtatagtgataaacccagagtgaaggaggttctagtgttcccaagaaatatgtatgcactgatataaagaggaaaatcagcttatgaaggtattattaatagaaggaaaatgaatgatctctggtcggtttctgaatatcttttcttttggtagatacattgcctttgacttccataaggaatgtaaaaatatgagatgggatcgactaagtattttattggatcaggtagcagaaatgcaagatgaattaaggtaagctatattatttccttaaggaggtagagggaagaggtatatatatcagtcatattttattatgcgtcatccagcagacttacaagtacagttcactggattgtcattgcttgtctgtactattttattatttttaatttctttactggaaagatgagacttggtgacttcaaaatatttttgaattcttaaaaatgacccaaggccagatatcttcatatttttataaattatctaccatacatttacaaatttttgtataattgaacttggtttactactattttgtattgtcgtttccactagacattctatcacaagtattttgttgttaacctgtacagcgtctgtaatgatagtgtttaatggcttttctatattctgttttatcataacatagttctaagaaagtgcttttcttcaccctgagcacctggcttattgcctttcctctttctatcatgaaagattgtggtgccatgaatcattatatatattttacatctgttaaatttatttctttaaaaaaattcttcagagtaggattaatggatcaaagggtctgaatgtctttgcagtactatattatcatattggttcaggtttaccatactctatgcgtgccagtctttaccgattttaaagccagaagaaggaatctgtaaatcgtactaccattttcttctgcctgtgtgtgatggttctaaacctggcaatccaaatgcactttttaatttgttacacaataatatagtaaaacctcttggatagacatttgctcagttttcaaaaatatctttttatatacattaggtaatcaactacagttatttaaatctgctttttttctgtgaggttttgccatgaacacagaagggaaattgacctcctgttgttgggcaattagagaaaacattggctggccctggcatgttgttggaggaggtagttccttgggttcacccattaactgctgccgtacaagagtgtaagaaagaaggagagttgactccagagtttgtgttcgttgctgttcactgtggtccacaaggagagcagagctttcactggtgactttcagatgatctctcgagacttttttctaagggttttgggggtagtgggaagaatctgggctttgggatccaacacaccttggtttgaatttaagtttttctcttagtagtaatatgacccagggccacttagttatcttcagacttcggtttcttcatttgtaaagtgaagatgataacttactgtatagtttaagcgataatgtttataacatatctaggattttataagtattcatggggtacggacacacacacccttgcacacacatatatatgtacaccaactctaaacgaaccttaccaattctgcatgatccatatgtagatttttcatcctaacacattcttccacgcttttgttcctgaggtcatgatttgtatttagcccttgatgaatctgttgcattttcttcctccttttggattttggagaatagtttcaatagttaacattatccagtattcgttgtttgctgtgttccatacactgtgctaagtactttatgtgcattatgtgttatctcattcaaaccttagagaagcctaatggtggtgctgctgttacctccattttgtggatgaaaaagcttactatttaaagttctagagttagtaagttgcgtatgatgctaaggctagcaaacagatagtttgcttcctgcatccatattcttaaccaccacactgtgtgttgtcagatttttgaattcatagaattatcaaggagcttgttaaagaaaacatgggaactggtaactgtggttggttgcagtgcagacaactggatgtttaaggggaggaagggaaactgatttttcaaataatacccaattgttctttataaatcttgtactatttgcatgtattacccatttaagaatttttttttttttttttttttggctgtgggctgtggctcacgcctgtaatcccagcactttgggaagccaaggcagatggatcacctgaggtcaggagttcaagaccagcttggccaacatgtcaaaaccctatctgtactaaaaatacaaaaattagccaggcatggtggtgggtgcctgtaatcacagctactcaggaggccgaggcaggagaatcacttgaacctgggaggcagaggttggagtgagctgagatcatgccactgtgcttcagtctgggtgacggagggagattccatctcaaaaaaaaaagaaaaagaaaaaaaatatttttaagtatttaaaaaaaattttttttaatttagatacaggatatcgctctgtcacccaggctggagtgcagtggtgtgatcatagttcactgcaacctttaacccttgagctcaagtgatcctcccactttagccttctgactacaggtaggcaccaccatgcctggctacgtttttgttcttttagaggcagggactcgttatgttgtccaggctggtctcgaacttctgagctcaagtaatccttccacctcagcctcccaagtagctgggattacaggcacgcaccaccacgcccagctaaaagtatttttaatgcaaaatattcaatccttgcctcagagattctgattcagttgatctcaaggccaggaatcttttttcacaagcaacccagaggattctaaagatagtatatgaatcataaagccctgacatctagggatatagttggaataattatgttagaggaaaccctcatctggctttgggaaacatgattgatttgcacagcaacctttttaatactcttaactttactttttcacatctttggggtgagatgatctctaatcttcagccattttttggatggagggctgtcttgcctcagccatttagacttctttttggtctaggataatcacatatgcctgaccacacattcctgtctgaccttttaatttacagtttttaataatgtcactgaaatgagacccatgttataagagttaagtccttagtaaatctgacctactttggtatgagagtgtttatacaaatatgttttagttattttctagtggactctgctggccaggtggtggcaaaccaggaaggcgtgttccgaagcaattgcatggattgtctagatagaaccaatgtgatccagagtttgttagctcgtcgttcacttcaggcccaacttcaggtgcgaatgctttttttttttttaattgaaaaacgacacagcaaaaaattaaacatctttaaaacccagtaacaaaaaatattcacattgcccacaccctaacccagctctttttatttttgtgtcttgcccatggatgtcacattttccataactagggtcagtctgtgtatgcacagttttcacttttgccattttcccttagcatttatgtaatcacagtttctggtggttgtattgttgtgccgtaatttactaagccattcagattgctacatttttggtttataaataacaccgtagagaatatatctgtatatgttattattaacttgaattatttccttcatgttaattcctagaagtggaattactgggttaaagagaataaatatattattttccaagagcgtcataccagtttacactgacaccaataatgaatcagtaaatccatttcattgaactcttcccagcatttgatattttaattttttttttgtttttccttgagaaagtgtctggctctgttgcccaggctggagtgcagtggtgcagtctcggcttgctgcaacctctgcctcctgggctcaagccatcctactaactcagcctcccacaaagctggggctacaggcatgtgccaccacacctggctaatttttgtatttttttttgtagagacaggatttcaccatgttgcccaggttggtctcaaacccctgggctcaagcagtctacctgcctcagctcccaaagtgctgggattacaggcttgagccactgtgtctagcctcttttttttctatttcgttaatacaaaagtagcacctcaagattgtttctatttatctctctcttattactagcaaggaatattgactccaaagtaaaaagtttctgacacagctttgctttaccactagactatgctgttgagaaaaatggtttttttcttctgtgtatatttggaatgaaaaagatgtagagccccaatttttaaatcacattggcatttgttgtgaggggcagacaaaatgcataccacatggtttcctgttcaggtaattagtaagcattcagctttatttctgacaattgtatgataccgagaaagaaattatggaggtaaaatacccccttcagaatgaattgttcttgaatcttaaagtcacacctgccagaggagtgctgtccctgttggagtagtctgtagtttgtattgtgctatgtccttgtctgttggaaggtcttctaagtgtagtttttaatagaaacaatattaggaatggtttggttccatggctgattaaccaaaacttacttgactaggctctgcaatccatattttacaattttacatgctatatatagtattatgaaacctaaccaacctgcagagagtgggggcaggagcctctcaagcagctttgcctactagtgtaggggctgtctacttgtgcctctccaagtctgccagtgaaggcagagttcttacccagctaaaggtcaccaaggtggctcctgtgctgtgtctgagggtgggaatgactccttctgaggtggagatgaggtgtcatctgaggtaagcaatgaagatggtggttctcagaagtgatggtctgagacaaggcagggacttgtcatctgtggttggtggtctccaaaggggagtctatagaggggattcagggggcccagcaaccctgggatattctatgtctgtgtgtgtgcacttttggggaggtagattaggtggcactcatcagattcttaaaggtccctgggacagagggtaaggctggggtgactcaggggtgaagaagttgagggatgatgcatgtgagggggtctcaaggggtagaggcagtagaagactgggggtaagagggagggaggaagtagcggctggaatcctatagcagctttcactctctcttctgaccctctccctgagtatagtcctgctgctatccctcaagggagtgcgggggctgcaaggcaaaggtgccctcaggagaggctttgcagtctgccctgggcaggagagggctgctgtgagctggggccccctatagacaacagacatttctggcctgcatccagcaaccaggcaccatgagataaaatttggggactgctttttcttcctaaaccatgtctgctaaaatctattacacataaatctgggtgtggttttttattccagagactaggagttttgcatgtgggacaaaagcttgaagaacaagatgaatttgagaagatttacaaaaatggtaggtcatttctttaatatagacaaagttggtcagattttgaaataaattaatattctggatttagaactttgtttgtcatcttaataattatcagctgtttttacttttttctacagcctgggctgacaacgcaaatgcttgtgccaagcaatatgcgggaactggtgccttgaagactgactttaccaggcaagccatgcttttaaaatagcattccacatcagtagttcacagtcctggtgcttttaaaaatcacctgggcagctttcagacagcagcagcaacaacagcaagactccagcatctgggcctcacttgagacctgtggagtcaggatttctgggaagtgaggcccgggtactggtgtgttcttagccaccctgggagattctgatgcttggggagggttgagagccaccgctccacagtgctcctcagaccttaccgtgtacctgaagcaccagtcttgagatgtgctctaaaaagcacccaggtgatgctgatgctgctttcaaagactgcactgagtaatgaggacattaatgagaacattttgaatgtattatgcatgcagtggctctttttctgctatgtgggttccctgggagcagaataagatttctagtctgtttgctttgctgtgtcctaccacttaacctgggctatgtatttctcttcatatttcttgtctttgcaactggaattagtgtgtttctttgtgcctcctttggtaatattttagaaagaaaataggtatttcttggacctacaagtgatttcttttgtgaagtatctatattttcagggatagtttttaaaatctgtcactcacttatttctataccttatgcttattggccataaaacagtgtgagaattcagtgtacaaacctgtaacttaaaatttaacctctttaaccagaactggaaagagaactcatttgggacttataatggatggctggaactcaatgatacgatattataagaacaacttttccgatggatttagacaagtaagtttgtatttgatgctttcctggcattacgtggttgtatctttgcattgttcatcactaatgttatctcacactgagtttacgaatttcttcctttctgttctaggattccatagacttatttcttggaaactattcagtggatgaattagaatctcatagtcctttaagtgttccaagggactggaaattcctggctgtaagaaaccattttgtatttttcaagtttttaaaagcattgtgtctgaaggtatagatggtttcagtctcaatttaaaacgttatatgtggttttatatttcattacatgaaatataaatacttaagttttccaaagaggtcaggctgaggagtacagtaactgtggagcatttgttttcttttcctcagactctcacacatccttttcatgtgaagtaacataagcaaagggaatgtggaagctttctcatttcaggaaaacttcaattctcttacattgagggaattgccagagacaaacgtgttacatggaaggcaaagtttatttttgatgcttctctcctttttgactcctctgttcaccagaccctgcaagagccgctctggattttctttccagtgtgtcaagtgccctggaatggaagggaggcctagtgttctaggtcctcatctgggcatcctccttccatttagcaccctttggcttggagcaaaagcatgcttcttccgatcttaccacatcccccatctaaagtctagggcagttgtgattgaacccataaataataatgttttgttgacaaaagatattagctgtgtattagctgacagatgagttttattcttttcccaagcaatgcatgcacaactgattttgctgccattgattagcattcttaaatgatgatctctttctattgtcttttccagttgcctattatcatggttgttgccttttcaatgtgcattatctgtttgcttatggctggtaagtctgctccacacatttgtttcttagttagaatgttgacctttcttttacaacatcttaagtttttgagttcaccgaacacttgatgtttccctattaaatttaatgggtaaagtggatgtgacattagattgtcattagatgtgacaggaagaaaaataacatacctagtagttcgatggatgtcgttatttttaacctcagattgtaaaaacatgtttttcttattactctaaaccaatgagtgtctgagacaggtctcagtcagtttagaggcttaatttgccaaggttgaggacctgcccaggaaaaagagacacaagatacagtaggatcagtatcttgtgctttttccaaagagggttttaaggacttcagtattaaatggggaaagagtgtacaggagaggaaggaggaatggaaacaaaaggggagggtaggtagtaagataagtggtcacattcttgtgaggctttgattagcactcactgaatccatgttacatgtgaaaggacggggtagaggaacagtcaattatgcattcatctcctgctcagtaaatctgcattttatgtaagacaaagtaaacatagagtagataaagaagtcagatctgcatttgttttggggtgggcggagggatgattttctagtcttgtctttgtcccatacctgtgaaaataaactgttaatttacattgtcagggtgagggagattcaacaggactgtcttttagggtaaagattttggggcccacaaggaatttgcttgtgacagtttgtgagggtggccatctgtgaggatatgtggcccactatctttgcagctgtctacttaggaacaaaaggagggtagttttgtgagactcagttcccaagtttaactttttcctttggcatagtaaatttggagtcctgagattttattttcctttcacattaccaaagtaatacatagcaattatagaaagcacacgtaggcagaaaaggagaaaatattatttatcatcatacctttgagagagaagctaaccactcttaacattttgatgttttaatctttataagtgtctgtgattttttttcaaaagtgagatacgtattttcattatctgctttttttcactgagcagtatgttttcccatgttcttaattgctaatggctgcaaagtattccatttatggatgtatagtttaaccaactcaaataaatgttaatggattaagatattacttatcattacattttaaaggttgagagtaaaattgcctgagaacctgaggagacaaggtctttactggttttcttttttctcttaatattttgctatgttactgagttaataaagcatttaagattaaagtgagaagaatgtattctttattctcctttgagtaatgtcctgtaatttggaggtttgagtctgagacttggtgtattggacgttggagatgcaatcctagtcactctgaaagaagaggcaccttccagccttcatcctctatcctgaattcgttgagccaacctctctctgcctgtctgaattccaccatcctcagggcaccattcatatgctcccctctcacagagtgtctctcccacacagaagtcttcaccttctatctggatttccacagcactcctggtcctctctcccagcactttcctcttttaacctcattaatacatagggagttatttttcagaggtggtatacctctttggtgtacctgacatacccagtgtgtatttctttttggatggtaatgatttgcatacttgtttgtttttttcactggatcagcaactttttgaaggtaaagactgtgtcttactcattgttttatctcctttgtccaggatatagtgagccctcagtaaatgtttgctgaattaaggactcactccaccaccaccactaattctgtcacctttttgatagggaggctcagttacctgttcatctctgtattcccctcagtgctcagccctgtagacagtcgtgacatagttttaactaaatgctgaaatgttgagtagggggaaagaaagagccatcttattattattatagttagcaaaatttttctgtaaagagccaggtagtaaatatttttgtctttatggatggctgtacattctttgtttttgtgtttataaccatttaaaaatgtaaaaagcattcttaccttacaatacaaaaacaggttgaagcacaggtattgcctgggacatgactgcaggttttagggcaggaaggaagaggcagcatgtgccggttcctcagcggccagccctgctttcatttcctctctgggtcctctgccttccttcctgaaaacactgcccagcgcatgccatttttggggagccactctactgttaaattagttcattttgttgttgtgactatacccacatttacttaaagaacctctggagaggcaggaaagtcaagaccaagaactctgcttgaatgaaacggatgattcctttagggagtgtccagcagagtggctaacaaggaactgcccttcttcttttgtccaagaagaattttaaacttcagagccatgaaaatgagcaattatgcaaattcgagtatattttgagtaaaaagagattggatgctgtggatggtaacttctcatgtcagtttattcttatgataaactttgtgatgtttggttatggtaatatctgatttctagctcctgctgtggttttcaaagagaatagaaaacaaatgtagcatgatctctgagggcttgttaggaaggagtctggatgctagtttcttccgtggtgtgctcactggctgtcattccctgtatgtatttctccttctgcaaatgaggccagtagtgttgcagagagagaagctattctctaggttcagctattgaaggagtaaaacaaagtagatctttgcccaccggcctgctgctaacctttatgaacttcggactttggaaaatgcatatcagcagagttgggttaaatatgtcattaaaataggttattggctgggtgctgtggtgtgtgcctatagtcccagctactcaggaggctgaagtgggaggatcacttgagcccaggagttctggtctgtagtgtgttatgctgatcggatgtccgcactaagttcagcatcaatatggtgacctctttgagcaggagatcaccaggttgcctaaggaatggtgaactagtacaggttggaaacagcaggacaaaactttcatgctgatcagtagtggaatggtgcttgtgaatagccactgcactctagcctgggcaacacagcaagaccccatctctaaagaaaatgttattgacttttgttttatatatttgtgtatatgcaaaaaatactctacaaaatatacataacttcagaaaagttatgtataacttatgtttggtatttatgaatattctattaaattttttgtgcaggtattttgacaatagctcatatctgttatagaactatgaattaaacttaatagttatttgtattattaaaatatactaaaagtgatcattattatttgtataatataatatgaaatcatttagtccagtggttctcaaagtgtagcctcttgatcggtagcatcagcatcacctgggtactaggaacttgctagaatgcagattcctggggcccaacagttgatgctttatcaagccctgcagaagattctggtactagccagggtttgagaaccactggtttaaaccttaattaagaggttcttatatttttcctgtgaatgtgctagtaaactttaatgttgccaaaatgtgctaaacagctgaaaactgggtctgatatcaacaaacgacttatttagctttttgtttcttaatatcaacaggtgacacttggacagaaacactggcctatgtgctcttctggggagttgcaagcattggaacattttttatcattctttacaatggcaaagattttgtcgatgctcccagactggtccagaaagaaaagatagactgaatttgtatttgtggaaagcggcttggcttggaagattccattgtgcagaactggagtctttactgacccgctttccacatcagcccaaggtctttttaatgcctttatccaaaagcacatcttgtgctccatgcaggatgatgacagaattgatctgatgttactgccttgatggtctctttactattgggacagttagatttataatttgaagctattctgtaattaaaatataacctgaattcagcttgcagaatggaagctgaatctgttcattgtattctattgattgtcaatttaattagctgttgcagaataagtaatatattttaaaaacctagctcctttcattatttaaaacagcaaaattatttttgtagctcagtttcattattgtcattgtagaagcggtcactattagcaggcatacttttccacacatctttggacttttcttaaaagttcagtaataagctaactgtgtttataaaatgtaagtctcttacagacatcaagtagtttgatgagacagtctgtgacttcatgataggaaagaggaggatgaggtctggggttctttaaagtctctggtgggctgcctcatgactttaatcagcttgaactgccagtgcaccagcagtttaggtgtgatgagagaattcagatatactttatctttttaaaaaagtgtaaataaaatcaaagaatgtaaagtctatctcttacgctagaggtccaaagctgcctctgttttaaagattatcccaatgtggaagatgcccatgactggtcagctacttcctcctatacattttggtttctttgagggtcactcattgagacacgcaggcctctgagagggtcttgttctagatttcatattgcacttggagggtaacagctgctttttcacgcatggtactcttgatgtttttcactctgtcaaggattttgttggctatcaatgaatgtgtctaaaacttagtgcttccaggtagttatagtactccaaatcaaggaccaacttaaacgttaatttttgtgcaaaaacaaacctgaaaaatatgcttcggaaactgtgcatagttctaattgtaagtcagattgtatattcaaattgtaattaagagatttaaatattagaacggtatgtaaggtagtataattaccactattttaaataattcagttaaacactgctgcaatatttcagtgttgtgcttgaaaatatgtacagtttttttccaatattaataccttatgttgtccttaaatatttctaaaagcgcctttatttcagcattacctttttttcatcactatcttttataaaacattaatataagtcgttacttttagaaactaaaggaaataatagctggaaaaccctctgtagtttaaaatcagtcattaaactcacaatagggtaagtaaatatagccacctgttaacatgtaaataagcataatttgttccaaagatggaatattgaaacttagttcatgtctgctgtaaaatattatttaaatgctgctgggcatttcacttaaagaacttaatgtcaacagctacaacaaagaccaaatctgaactgctaatgtggctgctttgtagggaatggactaatatcagtgtgttagatcttaaggtatcagtatttcagaatcctgcgacgattttatttctaaattcatgtactgtatgtccataagtgaaaataaaatgtcatattcttttctattattggtatcattcatgtactttgaaagtgatgcttttcttttggatcttagaatgctaaaaatcatgcaaaatgatagacggtttggctctgagtccccacccacccaaatctcatctcaaattgtaatccctacgtgttgagggaggtacctggtgggaggtggttggatcatgggggatggtttcccccatgctgttttcatgagtttgcacgaggtctgatggtttaaaagtgtttggcatttacccccttgctcgctcactttcctgccaccgtgttaagatgtgctttgctttcccttcaccttctgccatgatgaagttttgtgaggcctccccagccatgcggaactgtgagtcaaacctcttttctttatatgttacccagtctcaggtagttctttacagcagtgtgaagacaaattaatacacaaagcaatgcatgatcatcatagaaaaattagagtaagcaagaaaatcagtagcttctgcaattttgctttccagttatgatcacttaagaaattttgtatctccttatagtttttatttttagttatagagaaacccagggaaatatttagtaaagtgtaatgtccataaaaaggtgtcccccaccttcaaattgtaatttgtttttcaaaatgttatgaatcccagctgatgtgggaaaatattgcttattagaaaatgacacctccacaggaaggtgtcagcatgagggaaatagtgatggaaacacattggtacctagtgatggcagcagtgggccgtctggagtggctgctgccattgtgccggccgtagcagggaggtgtgagtggtggctgcaggagcagccgtggtgatggtgagacccctgtgccccacgttccctgtgccccgtgtccctgtggcagccgactgcgccgcccccacccctgtgtggccaagtggggcctgcctccaggcctggagccaccactgctctggaccctggtccgcgttaccaccactgttgcttgctgttgccaggagggcggagagtccctggagcctgctgcagggatacccctggagcctgtctcccggggggccgccgcaatgtggccaggttgagttgcctgccggcgggggagcagcgtgattgtgcatggaggaccaggcagagaagggccacaggcggagctgggcccggggtggtgccatgcttgcacatggagcacgggggccgcgcctggggtgcggagctggggctgtcctttgggggcctggagtgggaagtgggagcggtgctcactttggggacacagccagtggcacggccaccgcacccttcctgctgactggcgccggattcctgcgccttgggaggaggctctgcgcaggatttcccagggccggatccccagggtctgcctcatagcggggtgacctctgagcctgatgctccctaggaccaggcccagggcctgcaatccgctcctggaggcactcctgctgggcagggctgtgagccaggcaagggagagccctaggccacccctgagcactgggaccacaggaagaacttgtggtgacgtcactcttgcctcagatgccagcatgggcccagcaaggaacctgaacccctaccccagactgcgaggaggcatggccagagccgcctgcacgtccatggagcaggtgggagactcgccttcccaggcacaggacctgggtatccgcactgtgcaccctcgggagccagatctcagagtggggttggagccgaagctgggcattgtcacagctcagcagggtgtgtgcacacttggggcagcactgaaaagccagcctcctgccacgtcggccccctctggactttgggcaccaacaagcactggtggaggggaggggaaactgagggggaggctaagggtgtctcggtgctgacctgcaggtgccccttggtcaagcagtctgggcaccatggatggctgcaggaggcagacaggctcctgggcagaaaggggcgggtccctggtgaggccccaccttcaggccacggacggcctggaagctgggggctgggctgccagttctgtggacctgactggaatgggaacttgtgccttttctggtcccacctatggctgcccacggaccaattggcatattcagtttctccctcctgaggcccagaaaggccctgggctcagccaaagcagagcagagacaatgggacaaccagctgcagagaagagctaccctctctgctgatagctgaacacttgggatgacctgcctggagagagcagctaccctctctgctaggagctgaacacttatcggaacaccctggctgcggaaaggaggtactccctgcaggtctcctctgagctgttctatcactcgataaagctcctcttcatcttgctcatcctccacttgtccacatacttcattcttcctggccacaggacaagaactcaggacccgccaaatggtgaggctaaaagagctataacaaacagggctgaaatgccccttgctcaccacattgtgcgcgaaggagagaagacctgcagcccttcagggaacccagacctgggagttccctgagtcagggctgtgactccctctttggggtcctgcagttcctagcatctctaagcttctgggcactaccgtcttccgcactggcagccgtggaagctgcttgcatgcatgcctggtccagctgcagccttgcagagagcccgcacccatgccagcacttggagctgcctaccccactgcagcagctggtgtgtgtaactgcagtggttgggccccatgcttacataccccttgctgctccatacctgacttggccttggcaggcatgggatccaggcccgtaatgtaagccgagctcagcctgccaggctgagtgggcggaacaagcccagcaggcctgaacaaaacacgggcaaaggcaccactggccacagaggtttccagccagaaaaccaacaccccaaagatcctgtaacattaggaggactctcactcatgtgggaagtgagatgaaattccttggaaatggctcgctcttaatcccatgtgctcgatctcgttctctctcaccagctgaactttggagcacttttggagtaatgtgggttctctgtattaacagttgttttctgacagtggatcagaaaacatataaatatatatatatataaaaaaacatatatctctcttgaggataaattatataataattatatttatatatatatatataatctcaggataaattagggtaaatatttaaaatattgtcttcccataattcatttttccagtttcttagtgaaataatttcaaaatttggtcattaatttgagaattaatgaggtgtccttgtgctcccaaccagggactgcaggggatgtatgataccttccagctctgaatgacctcagtgcatctatcactgcataacaaattactccaaaacttactggcttaaagcaacccctatttattcgtatttatcatctcacagttcctgtaggtcaggaatttgggcacaatttagctctgtcccccatttcagggtctcccacaggcgccagtcaaggttcagctggagcaggatccactttaaagatcactctcgttgttggcaggtgtattagtttgttttcacactgctgataaagacatacatgagactgagcaatttacaaaagaaagaggtttaactggacttacagttccaagtggctggggaagcctcacaatcatggtggaaggcaaggaagagcaagtcacgtcttacgtggatggtggcaggcaaaaagtgagagaatgaggaagactcaaaagtggaaacctctgataaaaccatcagatctcatgagacttattcactaccactaaaaccactcccatgattcaattatctcccactgggtcccacccacagcacatgggaattcaagatgagatttgggtggggacacagccaaatcatatcagcaggattcagttccttgtgggctgttggactggtccgcttgctggctgttagctgaaactctccctcaattccttgccacatgggcctgttcaacatggcaacttgtttcatcaagtcagcaagagagagtctgctaacaaggaggaagtcacagtgtcttgtctttttttttttttttttgagacaaagtctcgctcttgtcccccaggctggagtgcgatggcgtgatctctgctcgctgcaacctccgcctcccaggttcaagcgattctcctgcctcagcctcccaagtagctgggattacaggctcctgccaccatgcccagctaatttttctatttttagtagagacggggtttcaccatcttggccaggctggtctcgaactcctgacgtcaggtgatctacccgcctcagcctcccaaagtgctgggattacaggcgtgagccaccgcacccagcccacagtgtcttttataacttaatctggaaattgttatcccatcactttcaccacatttctgtgcactagaagtcactaggtccagctcattcaagaggaggagataacacgagcacatgaataccaggtggcaatctttgaggagaccgtcttagaagtctgctgaccatagtcagaaaggagagaatacaaaggtaaagtgcagagctgttgctggagggagtcaggtggcttcctggagaaggtggggcttatgctaggacctaggtgttctggttatctaatgctgtgtagcaaattagcccgagaaagaaagagggggacggaaggatgaaggagggagaggagggacatagacacagcaggtgtaccatgaacaccctatccaaggcagctagttgagctccccagagccagggcacaactctgctattatccttaactcctggctatgtttccttctttggaaggagtgttgggaaaggcacctagcttgtaagaattcaatattccacctcaatctaaagctttactgtttccctctgtatgcttttgggcatctggatcatgactggggagaacagaacttgcaccttggaagcccatggtctccttcccactgccatccctacctcttcccacagatgaccactagccttgcatttcttcctagtttagtacatagtatgtatccctagatacataatatctatataatgtatatgtaatatctgtattgtttcgttttgcttgtttttgaagtgtctagaaatggcatcattccatatgcatgatacagctggcctttgaattcagcattgctctaagattcatctacactgacggttatagctggagtccaccctgttgttgtctgccttgtttgtttgtttgtttgtttgtttgagacagggtttctctctgtcacccaggctggagtgcagtggtgcaatagctcactgcaacctccgcctcccggattcaagcaattgtgctgcctcagcctcccgagtagctgggattacaggcatgcgacaccacgcccagctaatttttgtatttttagtagagacagggtttcaccatattggccaggctggtctcaaacttctggcctcaagtggtccacccgccttggcctcccaaagtgctggcattacaggcgtgagccactgcgcctggccaactgttgtttactttgaatgaatgtattacaacatatgtattcatttggatctatttatgacggtcacaaatcattttttgtctagtctaatattgatggatattctggttgtttttggttgtttgtttttgcactaagtactgctgtgagtattgtatatgtctccagctcacacaggaaattatttctctatgctccatgctcagtggtagaattataagcctgaaatatataaggtaacatgaaattcttttctaaattgcttgtgccatttatattgctcccagttccacattatcaccaatgcttggcactgtcagacttcctaacttttaatccagtaggtataaaaatcgtatctcattttggcatttctcagatcactaatgagattgagcatcttttcatagttttgacattctttatattttagagaataattatctgttagttaatatactacaaatatcttctctctgtttttagcttgtcttttcattttcttatgatgacttttgatgaaagaagtgtataaatggtgctgaattgaccagtattttcctagcacattttgtgcttatgtaagaccatatgatgtcatctgacagagtccagtgttctttttcctgtagagttagccagttgctgagaatgttgttgaatcttgtccctcctggcctgcagtgccacccctatcgtctctcaggtccgctctacttgtgggtgttggggctttctattctcatctatttgccggtatgttttcactgctgagaacgcatcttgttggatggttctgtccctgccatgagccctgggctcctccatctgttaggcagacagctttgatgccatgcattttcctgacctgcagtgcagttttggagtaatgtgggttctctgtgttaacacttgttttctgacggtggatctctagtgagaactgtatgcaaacactgaattacacagagttatctaacctgcaggactttgctcagaggtttgaaaagtgactctcctagaggaggtatcggctgtgcagcagcacccaaactttgtagcctgtagaatcttttgttcctagagcatctcataggaccagccttccatgggattcattttgtgaaaggccagcatggacgtgactactctggccttgaagctgagaaacatgggctataatctatttgtacctcacctgagtgttgaatctgatggcccctcaattataaattttaaaaatctcatccaggtggtaattccttaagagccatgcacacacacatgcacatctgcacacacctgctgagagatccgggtaagtctacgagtggggagtcttccctggtgtccagcgctcatcctttcctgcctctggcctcgttcctctgggctggacatccatgcagaggctccatgatgtgctctcactgggggaccaattagtaaggggctgtgacacgtttaagtgaattccctggtcccaggtgaaggagttagatgatctgtttgttcctaacacttgccttggtagattattctgagcatgaatttgctttttgtttttgtttagtcaaaggttcaggtgttcatctttctccattcaccattttcagtgatgcatgcctattgccctttattctagttgtacaaacctaaagtaccatccactaaaatactgtgttaacattttatgtcccaaatcaagctcctattatagttgggttcaaatatagactaacattaggaaaagtagaaagtgttaagtggtaagtcatgtttagcagaatttatgatgttctctctgagcttctgggaccacacattctcctgggttttgtttttgttttttgtttttgttttttgttttgagacaggttcttgctctgtcacccaggctggagcgcagtggtgcaacctctgcttcccaggctcaagtgatcctctcacctcagcctcccgaatagctgggactccaggcatgcatcaccaggcttggctaatttttgtatttgttgtagagacgaggttttgccatgttgcccaggctggtccccagttcctggcctcaagcgatccgctggcttgggccccccagtgttgggatgacaggtgtgagccaccacacctggctgctccattccttgttaatctctcctctctacttcacaatgctgtgagtcaggaattcaggcagagtttgcctgggtgattcttctgttccagatggcactgatggaggtgactcagtggcattcatttgacagatgggctggtctgtctggcccaagcttgtctggtgcccaggcatggctggaaggtggactcagctggtcctgtgagctggagtacagcagcctcagggtggtggggcttcattcatggcaacttagggctccccaggtgaatgttccaacaaaccaggttgaagctgcatggccacatgatctagccttgaatgtcaaatggtgtcccttccatcatattcttttggttgaagcaatcacaagcccacctaaatacacagaccctatccctccgtgggagaggtggaaaatcacatgtggccatgtccgaaaacacattggagttcctgtaggccttggtcgcaggccctcttctttgtgtatactcaccctggatgacctcatttagacctgtggctttaaatagcatctctccactgtaactcccaaatgtatatctctagcccagacgtaacccaacctccagattcttgtgttcaacaggttactggatatttccacctaattcacagacatctcaaacttcacatggtcaaaccactcttgatttttactctgcaggccagctctgttccccactttcctcatctccggaaatggcaccagcatccccccagcaggtaaagctctttatccccctttccctcagctgggaatccaacccatcagcaagacttggcaactttccctccaaagtataactcaagcttgcctatttttctccatatccattcccacgtccatgctgccatcatcttccatggctttactacagtagattctggagtgattttccagcctccctttatgccccgctcccatccatcctctatggcaacagtgatctttcaaacataaatcagatcttgccagaccccacagtgaaccctcagtggcactctctttctcttcaacgaaaatgaagctccttgctgtggcctgtgaggccttatgtgatctggcccctgctccctcctccaagctcacttcccatcgctcactttcccattccaaccacaggcctcctctctgctctttccctcctcagggcctttgcagttgctgtcacctctcctggacaggccttctaggaattttaatgactcgttccttcttcttcaaatttcagttcacgaagttcctcaaccgcttaaagtactgtcctgttaacgccaccacatcgggccatttatttccttcttagacatgatcacagtctgtaatcatatgatttatttgttatgcatcattgtctgtctccttttccagaatgtaagtgccataaaggccagcgactgtgtctatcctgttcaccattgcccccggcgcataccaagggactggtttgtaatatactagttgggtaatctcaaaaaaggctgatccacccaccctacaggagggtgaataatagaaaagtgatccacatgtaagagactggtcaggaaattcaggttaagaatttgctatttgtagatgcaatttttgccttgcaaagggatgtgtaaatctgttatttttttcttcccctgactgatgtagggcagaaaatcggcttagttaattctctaccccagcttttctacctataaggtggcataagttaatttttccatgtaaagtaactcatacaaaaatcaaatacaatagtttacacactcccccctctgaggtgaggctctgaggtcacattcaaacctaatgtggttctgcatggccctggccaaaaagagacgctgagatgggcaagactgcccgggacactctcaaaaggagtggcaagattctgcagcaattccaaggggctcacattctgttttaaatccagccaattagaaattttttttctaacttttcttgtggactctatctatctctcatcttcccatgatagacttcatccactgcattggtgcggtctcacgggttatatgaagaggtaaacgcagaaaagggtgacagaaaaaaaggttggatggatttgtcccccccacttattttccattttttcaaaattagcttgtgtttctacatgagagaaaatcttgtgttgagagaagtcttaaactgtatccagtaagtgacaaaagcgaaacccaaaaccaaaaactgtagatacatttgcttagagttttatttactatgacaattgctaaaaaacaaatatttccctactcaatttcttggagctaaatcaaggtttgctatgtttccagtaaaaacagaaagctttccggagtccatgatctggccatcgtgtcatggctaccactaagggtacagggatggaatgtccctttgtcgctccagcttattggagggtgggtggacaaatgtcgacatggccacttttgtgcagtatctaggaaatggcaaagaacattttttgagacaggattgattactggctcaagaggattcttgagaaatgttctgctcttcatgaaattcacagaaacgagacattttcatctggagcacattattctgtaacagtggtgcttcatctgtttgagttccatgagcaaaaactattccgtagaagtaactcttccatataattggaaatgctcaaaaatgccttcaaatttttaagtcattttataaaatgtaaatactcctcaatgtaccacccatgttctttcttttttaaatggggcctctcagatttggctgcacatcggatcacctagggagtttttggggccatggaggcccaggtcttgcttccagaaggtctgatgggtggccccagggtgtggtgtgggcatctggagttttaaatgctcccaggtggttggaatgcgctgcaaggtggggacactgaataaggtaatgatctaggacatttatcttttcactcctgaggctacctggtattcaaggcttacgcaccctgactgatgactgatcccaggtggccctgagttgtaagacggtgactgtgagtgggggttgagaggagggccagatcctccaggattcagagcagactcggtgctgtgtttgccattgagtgtgccggctcttcaagccttgacagcaggttttttgacataaaagaaccttctgataagaagattgaatccacggggtagataagattaaatccatggggtacatgctggttcatacatttgaaagtcaaatgtatgataactggacaatcaggtgaagctggaagatgagatggttgctgaagacagtagaagacctttctaaagcctatttttgctgtaagagaattttacagcacaaaaataaaaagacatctccggccaacgtcccaggtgagtgtttgtgtcttcaaagatatctgtgcaaatatatccacagaaactctccagaattccatgatctcaaggaagcactggacgttagagcaggaagggactcgctcactttaggggtaacgacctactttattgcagttaaaaaaagaaaaatttttttgagaaaagaaataagacacagagacaaagtatagagaaagaacagtgggcccaggaccggcgctcagcatgtggaggacccgcaccggcgctggcctctgagttccctcagtatttattgatcattatttttactgtcttagcgaggggagtgtagcagggcaacaggtgggaagaaggtcagcagggaaacatgtgagcaaaggaatctgtatcacgaataagttcaaggaaaggtactgtgcccagatgtgcacgtaggctagatttatgtttctctttacccaaacatctcagtgtagcaaggagtaacagagcagtattgctgccagcatatctcacctccagccacagggcggttttctcctatctcagaatagaacgaatgggaatggtcagctttttacaccgagacattccattaccagggacaagcaggagacagaagccttcctcttatctcaactgcaaagaggcctccctccttcactattcctcctcagcaccgaccctttacaggtgtcgggctgggggacagtcaggtctttcccttcccatgaggccatatctcaggctgtctcagtgggggggaaaccttggacaatacccaggctttcttgggcagaggtccctgcagctttctgctgtgcattgtgtccctggttaatcgagaatggagaatggcgatgacttctaccaagcatacagcctgcaaacatattgttaacaaggcacatcctgcacagccctaaatccattaaactttgattcattacagcgcatgtttctgtgagcacagagttggggctaaagttataggctaacaacatctcaaagcagaaacaatttttcttagtacagatcaaaatggagtttcttatgtcttccttttctacacagacacagtaacaatctgatctttcttttccccacatggactaatgcgatatcatagatatggtgtgtcttcagttacaagatgctctgtttgaattatatacattttagaaaactatgtacagatgaataatttaaaattaattgtaagtggtatttgtggtcttgatagagttggccacgatgtccaaatgtaatattaagcctatgggaaagtcagagccacttttttttttttttttttttgagtcagagtcttgctctgtcgcccagactggagtggagtggcatgatcttggctcacagcaaccgccacctcctaggttcaaatgattcttgtgcctcagcagccagagtagctggaattacaggcctatgccaccactcccagctaatttttttgtatttttagtagaaatcgggtttcgccatgttggccaggctggcctcaaactcctgacctcaagtgatccacccaccttgacccccaaggtgctaggattacaggcgtgagccaccgtgcccagctgagatccactttcattctcacctcacagtggctcctgactccttttccaatgcaccaagacacacaccacggagggatgtctgcacagacttctaatgtggtttggggttgcaaactgtagttggggcaattttttgtagagaggtctggtcctggacccactgtcagagaccttagagaaaggatccctttgggggtcccagacaaagatcttctttctttataacttgtcatcctaagatttaaagggtggaaggggaacacagaaattgcatattcactacaactcaaaaaagaagagaattaattttgcaccactgacaaataggtcatcttaggcacttcaaaactccttaaatggatctaaaaatatttgtcctctaatattttggtgtctcttcagccaaaaacaaaaattgcttaaatttggtcccataagaattatagtcatatttcagtttgcaatgtgccctaattctagggctttcctggaatgaaggatgcagttatctttgagaccggctttcatagcccacccccttccatgatgaggaggcaggtgacagggaggaacagccaccacgggagggtgtgcgttctcccaagggagttttcttcctgcacaccttcctcatcttctttagacactcaggaagttgatgggctgagcactcctggcttaagcatttgaaaaagcagccgaggagtttccgcctgtaaatagtatctgtaaaaccgtgagcggctgggaagcccacatctcaggccacggggtctgcgtctcccctcttgaggcgacgctgaacaaaagtccccagggccgccagggggatgcacatggtggaggaggccacaagcagcccgatgacagccagtgcataggccgggtaatctttggtcacgagctggccctgaaaggagagactgagtgtcagcagagagcacctgctgagcactgcccctgggcctcagggcccatccgtgatggggaggtgatgtgacgtgggcagagagcatgtggggccggtgtcctcactcctggggccacgggctctgcaattcactagcaaatgtgccaggagcctaactgccctcaccttctttttcttccataaactaggaataatagtaactacttgaaccagtgggtgtagagctattgtttggagctacccataatgaataaccatggtaataatcaagcaccttatgtctaaggcaactttcagggaacctaaactgtaggcgactactcttagcctggaatgggactttcccgtgaaggtagcaacgttctctgtcagtgctgtctgctgcggtaggcgcggaggagagcgctgctcaggaggcaggagctggcgcctttgcagcgggagtttttctcagcttccgggggacaggtggatggggaagctctggaggagtgccttcctctcgccccactgaagcacatacctaaaagctcaaagcccagctcctccgtgctggactatttctaaaatacctcagtgatatttccatgtcgtgacaaataacctacccacaccatggaaatagtcccctggtttcggaaaatgaatggcccatgcttttcagtggccatgggggcccagcgccagccctacggagacagtagatacctgggaggcgtcccaggcttgatacttcagggtccccgtgaggatgtagtcgctcaggtagaagacaaagaggctgacaatcagcagtgggcttacgccagcccacatcaccttccagtaccagctcacagctcggccggtcatggccttaaggtcactttcaaatctatttggaaaacagggagagaaagtctggattaaccaggctgcggaggtcagggcgtccagcttgcctgtccctattcacaaaggaacattctgttctaggtggtaaaggatgtctgagcttggccactgggctcctctgtgacaccttcttgagagacgagtgctgcggtggggaggggagaagggctgaggctgcccagaagggatgacggagcaagcaacccgcagagagtggacatcagaagacgccttcctaatgccagccttcagatgaaggctgctggcatagcccagagggcagcctccaggaatggtgggcacaggcagcaggggatggacatttgtcaggctggtcatcaatgacagggacttcttgggcggctttgcccacccccctacccagcccgcccctgtcaatcagtgactccctttcccagtagaaacaccacggagcagaatcacttggtccattgaaaccagagcaggttttctgggacagaggaagagccaacctcggactgaaggaccgtagccctggcctgctggagctggtctagagtggccagggcagtgagtcccaaaggcgttgcccacagccaccatcaccacctccatcatgcctgtagctctcttttccctcttctttacttttaaacctacggttagcagcagcacaacagcagccagtttctcatcgacttgacaaactaagtacgtgtgtttttgaatacacgtacacagtataaaaagtatctttggcattttgggagatgttggcccaacgaaactccccatttcacacaggaggaaccaaggcccagggctgcgatgccttcttccttagggcttggtaaagaccaggcccagaacctgggttggcctcctgcctccagcccagagcctttaaacctgctccctacagcggaagaggcagccttggcgggaggggctggggtggtgtgggtgtgacgtcaccagctgcagccacagcccctccctccctgggacctgctgcatgtcctgggtgtccatgcgaggctgtgtggcgaccaccacctgccctttgctgctgctgacgtagttggactctaggctgcaggccatgaaggctcatgtatgtgacacgaaaacctggggctttcaaaatcagacaggtgaaaaagtgttgggggtcctcttgtcccttcacacccccataacccccccccctttcctggatggagaaagttgggaagagctggctgcagaaaagccccaggacactgttgctgggtggtcactagatggcggtgtcacctgagcaagccgaagcactcccctcctgccacttacatggtcagtccacctacgacatctccaaggcacgtttgtttctgcctctgtctcccttcaccagcccctttttgatggacttgtgcccctcacccatctagtgacctccagcgggccctaggttctgttcctctctcccaaccttctctttttatcctgaaacactcaccctctcagtgaccaatctctttctccctctagactggcatttcctaggtgaccagggattttcccaattttagtactgaaagttccacgtcccagaaaacccctcaatcctggggaaacagggagagttggtccccttaacactagtgtcctcaaaatgttagtagctaagggtgggagtcgggtgagaggagggtgaaaaggcattccttgaccaagtaagtctggaaatgctgcaattctaaccctctctttgggatccacaactgtctttaagattctgagaagtcctacgggaaagacatcaatttggctttgtttaacttatgtcctgatggatcatgggagatccctcagcatggcacgggaccctggcctttccggggacacagcagggattgctgcttcagggatgcctgcctcccagagtgttgtcaatgtctccctccccaccctgaaccagcacagaggatcaaaaagactggggaagagggcagaaaacaacgtggcacagcctcctcgcccaaaccgcacccactagagcagcgctgcccaaactgtgatgtgcctcaggccccctggacatagtgtgaagatacaggatctgattcagcaggatggggtgggcccgagcttctgcagtcccaacgagcgccttgttgctgctgctcccgctctagggaccacacttgaggtagcaaagctctctaggccagtggttctcaaagtgtgggtgccagactcatctgggaacctgctagaaatgtgaattcttggccctcccctggcctgcctgatcagaaccctgggggtgagtctcacagctgtgtttgaccagcccaagggactctgaggcacactcgagtttgaaggttgctctagaccagtggctcttgccccagctgcacattccatcacctggggagaactaaaacattccagtcccgtgctgtgcactgggattgagaacctcactgactaaattttgaatctgccaaattttctaaggtctaagttatcaactggactttggtcagggttcttggaaaatactgatgttggccgatgatcagagcatccagtgcctggaggcacaattccctgccccagtaagctgtgggggtccagcagggtcaaccctaaaacagcctatgatacaaagcaaaagtacagggaatagagaaaaagatattcactgaagcaaactgagcatggaatagaggcagagcataagctgagatctgcgggcaaagaacaaacgttgagtcatgatgcgaagcttaaagaagaggtgaagatgtgcatcaagaaacagctgttttccttgaggggcgtggcctctgtggctgtgttttccctatgcaaatgagggtcctgggcctcctcacctcctcagcccgtacacgtagcacacggcaatcgtctccaccagcacgatgagcagcagggacagtgtggccgcgtagtcgttgaatatgtcaaaccagtagttcccagcctccatcgtgaacaccatgccaatggcacagttgacaaggcacaccagacctgggggccacaagaccagctgctcacctgcccgagacccccccactactgcttaccagttctctacaggacagtggggtcgtcggccctcagggaattttggctgattgcttcatccacatgggttgaaagagctgtcatggtttggactctctgaaggtgtgtgccacgtgtgtggggcagggggcacaatggtgtcccgaagcgtgttggcaggggtcactgatgttgactcactgagctgccctgcaggggtggcagagcttaaagctcaatgaacaagcagacgtagtgggcactgtcattccaggatcccgcccaggctgtgggtctacaattataacccccgctgtttatcccaacaactcagccctggagctcatgagaaatgaatcaggggaggaggcttgaatatggagtggccccatcaggacttcctagagaggacttgcctccacccagaagagggtggggcagggaagagacaaatgtccacccagatcctcccttgtgccaggcacttgcaatgcgttggacccttaggcctctgaggcaggtgtccggagccccctttcacagatgggaaggcaaggctcagagatgtctaaggctcccccgacatcccatagcacatccatggcagagtgaggattcagacccaggccctttagcctccagaacctgggccttcatcccaggcccctccagctgccttccctggggaccccatgcatgtctgagtctagagcccacacctgccctttccactagcacaccgtacactgccagctaccgagccctcctgctatcccgacggggacacacaaggagaaaggggccatgcgctggctgaaggctatgggcacacctagtgttggctacaaagaccaggcctgaggagggggtctaagtgctgcagcactctgaagaggtgggggcaactccaactggagtggtcggggcttgaaggagatggcctgggagctgggtttgattcatcctgcatgtcaaggaatggtgttttcagagacggagtagtgtaggccacagggtccttgaggcactgcctgattggagtggagcagatgggccagggagtgaaaccatgagagatgtaattggaaaagccagctcatttcctaagatctgaaatgtccatcaacagcagaatggataaagaaactgtggtatgtcaccttacaatggattattgtataggcacaaaaaggggcagacgatcgctgctcgaaacaacatgagtggatctcacaggtagattctgagtgaagacaatagacgtagagtgtgtacaataggacttcgttcatatgaaattcaggaacaggaaggccaggcgcaatgactcatgcctgtaatcccagtattttgggaggccaaggcaggcagatcacttgaggtcaggagtttgagaccagcctggccaacacggggaaaccccatctttactaaaatacaaaaattagccaggcatcatggtgtgcacctataatcccagctactcaggaggatgaggcacgagaatagcttgagcctgggaggtggaggttgcagtgagccaagatcgcaccattgcactccagcctgggtgacagagtgagactgtttctttaaaaacaaaaaaaaaaaaaaaaggaaaaaaacccctaaaatgtagaagtcagaaatagaggtgaactccaggggtgcatactgcctgggaaggggtgtgaaggaactgtctagggtgtggaaaatgttctgtatcttgacctaggtggtggttccttgggtggatacatatgtaaaatccactgagtttgtacttaagaaatgtacactttataatggtcatacttcaggccaggtgtggtggctcacacctgtaatcccagcactttcggaggctgagatgggcgaatcacctggggtcaggagttcgagaccagcctggccaacatggtgaaaccccttctctactaaaaatacaaaaattagccaggtgtcatggcgtgcacctgtaatcccagctactcgggagggtgaggcaggagaatcacttgaacctgggagatggaggttgcagtgagccaagatcacgccactgaactccagcctgggcaacagagcgagactccgtctgaaatatatataatatacttcaatgaaaatgaacagaaacaaaatcgagttctctcctagcctggagaactttgaatgtcaggttggggagttgggttggggtggccacttcacttccctgtgatgtggagaatggaacgcacagggtgaatcacatggcccaggtcccaggttgtgagaagacatggcaggaccgtggtgaggtggctgcaaccccctgtagccacctgaaccagcccatgacccctgagggagctctcccctgttcacccccacgccttggccctcctgacccctgcctcctccactggctggccccgctgacctgagatggcctccttgggcaggtggctggagatgatcttgctgtctgtcagaggggtgaggatggccgctgtgttccccagcatgctcccaatgcccagcatcagcagcatgaagaagtagagcaccgaccacagctgggacacctccatgtttttaatggcctctgtgtagacgatgaatgccaggccagtgccctggacggcctgcccagggtgagaagacaccagttacatgcaagagggacttatagtcttattcacgcactcagtactaagcaacatgggggaccttggaagtggccatgagaagccacattgtgaggttggagcttccatctgcagatcaaccccttacactcagctgggctgaaacgaaatgggagctgccaggagctcatatatgcaaagcacgtgagaacttgtagccagcctgcaacactgagttcccctctcctgccccaacttacgtacattctggatgaaagataataaaacaatggataatttctgcttctaatgtgatgaccgactaggtgtcctgaaacctccgtggctgggacctgaggagggagggcggggccagggcagcaggaagcagaattgtagggagacagcttggtcagcaggcaaccaggaggggcaggtgctcagcggtcacgtccctgtgctggtaactctgttgcggaaatgttaaactatggaaattgaggctggaactcctgcttaaagacaaatcccctaaggggctcaaaagggataataggttgtgcgtactctctggctacccacagaagaagcaaaaacaagccctccctgggtagaagcccccccacccggtttagatgcacaggattcccagagattgagcaaagtgctcataaacagggatttacaaacccacaaggagagaagtcactatgagtgaagaactagcaagataagaaatcagatttagaacatccctccccgaggtggcagatgttggactgtcagattcagaattgctatggactgaaccatgtccacctgaaatttgtatgttgaaaccctagctcccaatgtgactgtatctggagatagggtctttagggggtaattaaggttaaattgagttataatattggagccctaatctgaccagactgtagccttataacaagaggaagagagagagagagaactctctattatgtgaggacacagtgagaagataggtgttcacgaaccaggaaataggtcttcatcagaaaccaaaccctgctggcccttgatcttggacttctcagcctctaggattgagagacaaattcctgttttttgctgggcacagcggctcatgcctgtaatcccagcactttgggaggcttaggtgggaggatcacttgagctcaggagtttgagatcagcctgcgcaacatagcaagaccttgtctctactaaaagtaaataaaagaaaataaatttacgttgtttaagccacccagcctatattttgttatggcaggctgcactgactaatataagaacacaggtcaattctatagtataccagttgctcaggggcatactgaaaatagttggctttatgtgctgacaacaagggagtgatcacttgtagagaacttaaaaacaatagtaaaaatctacaaaaagttgatatactttttatgattatcatgagccagcaattctaaatagtgttaaaatactgctctccttctcttgcctatggccaccactgaaacagttacgtatgaaatgtttaaagaaacaaaggataacattacaaaaataaacatgtatcaataaactattgggatggacaagtaaatctgaaaaaaatagcatctatataaaaaatatagttattgaattaaaaggctcaattgacagttaaataccagattagatgcagctgaaaagagagttagtgaactgaaagatatatccagaaatgaatcaataaaataaaaaaggataaaaagatgggaaaaataaaagagaggttaagagacctgtaggacaggatgaaaaagtcacatctaatgaagttccaaaaggagaaaaatgagagaatcagagacaacgattatgagataataggtatgaattttccaaaactgataagaaacattggacccttagatccaggaagcccaacctcacccaggcctagagtggataaataaaaatatattcatgccatgtctagattgcagaggccaaagacgaagagaagatcatgagaaagagaaaaagctgcttgcttacaaagaataaaagaaaatatcaagagcaacaatggaagcctgaatcacatggcaaacatcttcaaagtgttgagagaaaataattgttaacctggaattttctactccgaggaacaatgtctttaaaagatagatgccaattatagaaccaaatttaagaaaactgttctaaatgaaagtattttaaggaaaaacctttggagatgctgggatgcaagaaagaatggtgaacaaataaaatggcaaacatgtaggtaaatacaagagctgtataaaataaccataatgtcatgtccaatgtatggggttaaggagacagaactagaaaacaatcatttaaaatgggagataaaatgaaagtactctaaagtccttttgaattttgggaaggaggtcaagatactgtttaactttagactttattaagttaaatatgaaaggaaaatttcaagaagagaaatcaagcaaccaaattccaaacagcagggaataaagtggaatggggaaagaaaagaaagaaaaaaaaaagaacaaagcaacaggaaaaatgaagtctagataaatcaataaccaaccatgtaattcttggctgtagagccaagctcaaaagtaagtgaggaaaactcccaggtgccatccataaaggaaagttgaagtgagagcactgaacaagtgctgaagccaaaggacctcatgggtcacctgaacaggacctaggccttgagggctggggtttgtgggctggggtctgatgcctgcctggggaagcaggctcatgccacaggccaataacaggcatggagctagggctgaacaaccaggagaaaaaagcattgtcccacccatgaaatgacctacagtggttgtacccatgaaacaaagtgccaaacaaaccaaacccaaccaaccaaccaccccaaaaatatcaacctccaaagtagcttactagcaaccagagccacaggccctccctactccctatccttgaaaaacattacctaggaacactctctaggaataatctctagaagtatttgcattaaatataagaattaggcaaatatgcccactatcacttctactcccatgtgctagaagtcctagtgaatacaataagaaaaagggaatgagatataagcattgaaaagaaaaatgcaaaatttgatctgcaggagatatgatagtttacatagaaaactgaagcaaatctatacataaatatgagaattaataagagaattcatcaagattgctagataaaaggtcaacatataaaatatttagctttcttttgcaacaaaaacaaatgatagaaatgaggggaaaaaacaccattcacaatacaataaaacagtaaggtaatagaaatctaatgaaagatgtgccaagacattcatagagaaagttagctgaagaatgttttaaaagacttgactgaacaagagaaagtatgttcctgagtcaaatatcacaattcaaaagatattaattctccccaaattacactataaaatcaatgcaagtctagtaaaaattccctagattttttttttccaatgaaacttatcaaactgatcctcaaaacaatgtgaaaaaataaaggtcccagcacagcagagataattctgtaaaatataaataaaggtgactttcagtagcaaaaattaaaaaaaaaaccctccaaatgtctattagtaagggaatggataaataaattgcagtattgttgtgtgatggaataaaatgcagcatttaaatgaacaaatgaggttccacatgtattattatggacagatctcaaaattaaaatgctgaatgagagaagtatctttccagaccatttatgcccatttaaaaactgctgacataggagtgcaaaaggcttgttaaaaaaagaaaaaataaaacaaaaactgccaacaaaacaatgatattatttaagaatacatagatgggtaatagaaatataaaaatgaaggttcttgcctttggtgagtagggaaaaaaagggggactttttaacttcatctctgaaatgttcttttatataaaaaaatctgagcccaaaatgacaaaatgtttacaattgatctttctgagtggtatatatgggtgtttgttattctctctacttttctgtattttaaaagcttagaaagacaaaagaaaaagagagaaaggacagagaggtccgccaggaagtttattataactagcattctcgaacagccctcaagagagtggtgttaaagcctctcttccccttggagttgcaggaaaagtaattcacgatccttctttatttttacagacctcgcctatctcccaagtcagcagctcaccaaggttcccatgagtgtgtggagagaagccagtccttgaccttgcctgggcatcttaccgtgtctagctccgattccaagctgcagtttttgatttgcgggaacatctcgctgtatttgcttgggtaggcagatgcgaggtagcccttcacctgctccaggttgctggctgtcaaaaagccatcttcaaggtcaaaagtgttggtcagcagcagactcaccctgcagagcagaccatcggatcgaccttcactgatcagaaaggcagctgtcaccaaagcctcccgtcagcctcttcttttctgattaggtgaggaaagggagtctgttgcttggtgatcttttaaagggcagggtaattttgaatggcactgaagaagcctcagatatgaacagtgatgacaacaggcaccaaactcacacagctaggctattttaacctctggaccaacatagtccagcggaagtttctgtgctgatgaaaatgctctctatctgggctgtccaatttggtactcactggccacatatggcaactgagcacttaatggtggacactgagcaactgattgaaagtaacaagggaatgtactgaaatatgaattaagttatttaaatgtgaattaagttgcattgatttaaatgtaaatttgtaaatagccacttgtggctagtgactacccaactggacagcatacctcctggatgatgtctttgtattttgggcaaggggccacagaaagtgaatcctgcaatctctgtggctcagctagaggcttcttggttacttctgaggtgggggagatggggtagaagaaacaaaatttgatcgttgtatgtcctattatgctaagtgctcacaacacgctaacgtgccctcatccctgccaggcagatgttgacatgccccaggccctccagcaactggtggtggtgtagggagtccaaatgtgagccctggattgaggactccaaaactggtgcactttgccccagcccttgcccaggcgacccttcagctcagagctcagggaggcctgggactcggtgggacagcccaggcttacttcttcaagcagttttcataattgaaggtggccttgaagccatagatggagaaggtgacaatgctggcaaatatggaggtgaagctgttgatgagggacacgatgatggcgtgcttctggcagttgttggatggctcattgtagctggcgaaggcgatcaggctgccgaagcccaggccaagtgagaagaagatctgggtggctgcattgatccaggccttggggttggccagctgctctatctggaaggccagcagggacagggctgatgatccctgggtggaatcccaaatgctcagacccgcaacaggagagtagcccagagaggggaaggagctcacctacagcacgcagccatcaggggcacccctagggctggagaccagctctcctggccccatccactccctggcagatgaaacacacacctcaagctgcacacctcccagggctaaggtgctgtggagaatacaggtgctatgtggaggacataaggtgctacgtatcctccatagcacctcagccataggaggtgtgtaaccagaagcagctatgctcaccactatacgccagtgcggaggtgtgcaatggaatactgcagggtaaaataattaaaacacaaatggggccctgattcataggcagttactgcacaggtctgggcattcagagatggagggggtgtggcctggcaggggaggtctaggtgtgggttgactctcggcactgacatcggtggcgtctggaatggggaaggggaaggatgacacagtcattttatttctagggactgcatttgccaaatgaagaacttgccccatcccaaaggcaagagtgcaccctccatggatgaaccctgggtgtggggtgcatggagaatgggtgggttgggaaactctgtagggaaacgggtgcgtggaaccatgtaagcaggcaagcaagatgaccagagtggtgctcatggcaaaaagcttggtccacagtctgaaaggggcttgaggtgaggcagtggcaggggtgcagcagttgggggacagtgaggatgaagaggagaagctgaaagaaagacttaatgctccagaattaacagggagtggggatgacctggctgaggaggtgatccagtgactgcaggtactccacactcctgccacaccctggtgggctcacatcagcttccgtaggtacagcgttggcccactctccacctttccctcttcccacccatcctggaaggtggcaggataagtgaggggtgcccgtagggcccttccgcttcagcccgtaccttgggagtgaacatgtacatgaggccattggtggctccgtggagcgtgaggcccctgatgaggtagatgatgagcacgcaatagggcagtgacgccgtgaaatacaccacctgcgggcatcagagggcagagttggcctcccggagcagtggggtccacaggacagacccatgccccatggaacaccacatctggggtattcaggctgcaccgcccagctgctgacagctggaaaaggcatggagattcttggtcacacacaggctctgggttagggctggggaagtgggctggtgggatgtggtcgctcacagctgtgaccagcacgacatttcttattcagtagagaagaggcaaacaggtaccgagcctctgccttccaccctcccttcaacctgaccttattctggaaaggatttgaggttacccacaaaaacacatcagtcacgttaacatttcaaaattgctaaagaaatcagcatgaaaaaaatatatgggcaatccagtaatgagcccacaggaaaaagcagcccatagaatctgtgcataagtctctacccagtttctgagccagattcagctctgagcttcctggtggcctacacacaaagcaggaacacaattaaaaggaaaaaaaaatctgcagcttggaggaggacagatttccccaggactggggcctgagagcagattggtcacgagtgctcatacaggaaagcagcgaggtgtagcgtagaggacaatgtccccataataaacacaataggaaattcagatctgatttttatggcaaccctccagaaagggtttacttccttaggctttaacattacacctgaatggacatttttgtcaaccagatcttctttctccaccgacatgcatcgtaagttcaatgatgttttgttaatatctttggtgttcatggtagctttagtagtcacctgtcatgctctgggtgattctaactgttacaaagccatagaatacagaccttcaagtgcacgtgtgcctatccaggaatggatttttttctgtaaatcaactcatatgtgtaccagagcctcatttgtaaaggaaataaatattttgcaagattgtcttttgtgtaagagttcccttaaagtttgagtctctctgtgagaaatatggctggtggcctatgttcaggtgggcttgaattacacttggccctcccccttcctattgaggtgtggcatcatcttctcatccatttccaaggccaccagaatggcactctgtacgctgtcacccaggggacggcaggtggaatgtggggtgtgtcttttatcactgcttcttagctgaggttgttgtaacttgagaagagtaataaatccacccaagattataagaaaccaggtaagagagatgaaaagacagagcactcactcgtgaccaacatccatcacaatgggcactaagcaggcccttagggccagccccgagaatttccctccttcccccaaggtgagcaagtttcctggaggctcatggagtccctaagtgggcagaattgctggacacgtgatccagcctaatctattggaagaaaccaattctgaccactctgcagagattctggcaggaaacaaagtcgattccaacagaggatgccaggaaatggcacatggtctgtgacaagattagctctatttacatagagctgttggggtacttttcccagggagaagggtgtagctgaagcagaggaaatagatgataagaataaataagtttttatggcatgacatggtcttatgcaacacatttcaaagtgattgggaaaaggaatggtctctaatctctacctctgcagatgttgccctctgatctcttggatcatgatcataataatctggcaaacataaattacaaaaacattttttatgagcatgacagtatggccaggctctacgatgggactgagtgggctgctgcaggttctaagctctctcggggaaagagcacctgtgctcactcgtccctttcctcagccatggcacaggggactttgggggctaagaggctggtcatcaggggctcttagaaaccaaaataaaatgccctaccaggcatgatactggagttgtcccatgggccctggaataccatgggtagctctggtctaatgcctcaagaaatacatggggggtggggtgtggctggaggagacaactcaggtagtcagagggtgaggacaggtgggctcctaggactctcagcaggtgacagttggaattgatgacatcattaaggcatagagagagctatgtggctaccaaaccaagacaatgggaagtcttggggtgaggctgggctttgccctcactagctgtgcccttgggcaggtcaatttacctctctaagcttcaggtaactgggatcatgaaatctaccatgaaaggctgttgccagaatgacacaatgtgggtgctcaagccgtggtgggtctactgtgagaagtgacagtgaatgagacagggtgtgctaggctccgagacatctgctgaagcttcaggcaggtggcgggtgatgggaacactgaaagcaaaccttctacgtggagcagactagagatgaaggaacatgtcagccccagtgaaagtgtgagccttgggatgcaccaagaaaggattatggagatcaagcccgacagctctggagggtgattggaagcagcttagaacaaagggtctcaaactcagctgcaaattagaatcacctggcgagcttttaaacctcccctgcctccccacccagtgctcaggacacaccccagactggttactgcagaattttggggggcggggctaaggcatgagatttttgaaaactctccagaaaataccaatgtgcagctgagttggagagccagtggctagggtgtctcgaggatacatacaatcttaaagaaaagcaaactcactgtctggttgtctgggtggtatggatttggggctgactgctacagaaaaactttttttttctaagaaagtccttgttttgagatttagggttgcaactttaaccatctctggccctctctatagtcatctagtaggtgacttgtcccagcaacaccatctgtgccctctgccctaacatagctgctgcctttccactgcagagggcactcccttggcattgcctagggttggagacagaggcagctgccccttggtgcaccctcccacccaccaggagcaccgggcttctgtgcctcactgtcccaccttgccagtggactcggtgccacgcaggatgcacaggtacaccaccagccaggccaggaggaggcacagcgccggctcccactgcacacccccgttctcctggagggacggcgagatattgagggttttcctgtaccagaagtactgtgtggaggacgccttctcacactcctcatcgtagcccgtgtggttaccattcagtgggcagacagaccacggcaggggatcctgtgggaccaaagcaagtgttatccagggaggtgaaggctgaggacaaaggctgtggcaggggtgagggaggtggccctgagcggagactcttggaagagaagggtgctggtccccgaagggcaggtggctggagcccctgaaggcagactgggagttggagagtttgtcagggggcacgggtgaggcaggaaggggttggaggagggggctctactctcgttgcaattctacgggtgttccttgaggactactgaactctgtggtgggtcccagagactgaatagcaaatggaccacagccaggccagccctgatgatggaactccgacccacggcctgtgcacaatcagctcaggcacttaaaccacaccctctgcagcactggcccagattgcttaggacttggtcaatgattgagagagtccctattttttggccaactcagaaccaaccagagaaagtgacagagagcccagttcagagtagcttaagcagatgagagtcttactggctccaccctgcaaagtccaggagtctaactgcttcaggtatagcttgactctagctcaaagaagtcaccagcaccaggttctctcgggctcagacatgcaggacagctgtggggcctgaacctcatctcctgctagcttccaaacccaatgtacattgcaggaaatgccattcgccaccagcacttagtgagcacagaacctgagacttacgcatctcaggacttgaggaaatcagcaaagaccacccaagtgagaacaagcagaggctgtttacttaggacttgctacagcaagggcgatagcagcatcgcttgcatttggcggggctccaaggcaggcggggattgggaaagcttgttagtgagaaaagagaaggctccaggtgtgcccccataggaggctgctggcgtgtcacttatgaacaaaggagcctcaatggtgcatgcatcatgaccatgacccgaggccaagtggtaaacagtggtgctgagatgggagggaggggaggaaaagttacttctgactgtggggtaggagaccccaaccctgctctttgaggaccagccccacattgatcagttttgcacatatctgggttctacaagcccagatttaattagacaaaaacgcatcattaatggaagcaagtctgaccaccccactgggctcaatcccatatttcacaggagacagaaccaaggcccggggtatcacctaatgggtcatggctactgtgccagtaggcagctggagcccaggtctgcacacccagacagtgctcaggactgtcctggtgaggacctccacgcccacccctgcaatacctccccaggccaccctagcctattggaatgtgtgagctggtttcttgctttgacccatatcgtgttcaaagctggccaccaacagtccttccccttcccatgtgcacatttctcccatccagaagtggtgtctcttgcctcagcctgtgagtctgggctgtcctccgatgcaagctgaccaactgaatatggtgaagagatgctgtgtgagtgacttcccggcccaggacttcagaaccctgtagctagcctctcaccctcttggagaccagctgtgggacatccaggctagcttcctgaatgatgcgggtgcagggagagggaggcacgtggagggaactgaggtgcccagtggcagccagcaccaagtcccaggcaggtgacaggggtcctggtagacctgaagcccagttgagctgcctaggctgacatccccttgggccatttacagcctgtgtgggactgacctgagtctgttccctggactacctgctgatgccagaccgggcctgcttcccaggcttggctacacgactaaggcacccgggggtgatgcccaggctgcacccccagtgactctgatttcatctgtttgggatagggcctggtcattggatttttcacacctccccaccctgcaccccgcaccccgcaacttcatctccccagtgtgcagccaggttgaagaaggtttagcgtataggagaacttgttaaatgggccagttcccagtctgacctccctcactcacctctgaaccagcaggtgaggacaaggatccccgcatttgtgtgcataacagcccaggtgctcctgctgagaagggctggacacaaggctggaaagcctggccagggagtgagtagacaggagcacagactctggggccaggtccctgagtccaaccccaccagctatgagctactcggctcccctctgctcgggtgctcagtgtgctcagcctcgtggggtggctgttttgattacatgagtgaacacttctaaagtgctgggacctgtgtctggcccaaagcacatgtaagtgaatgtctgcagctactattcctctcattattatgggaccatggaggagggcttcaaagtagagggactaagggataagtccacagacctatgaaggatggaatgaatgaatatttaagtgattttcatgaatcgctggcccccatacttctgactattagaaaaagatgcccctttcttgaggcactttatttttgcttttgggggatgagcaaattattctgattttgttaggacaagacacattacttccacttttggaaacttgtcttaataagtatacaaatctataatgcttacaatgtgtatggcaagcccttagttggcagtactgttgtgcagtgcacaagctgcccaaccatacatgagccctgcacagaggacaggaaacagtcaccaggctatagagtaagaagagttgccctgtttccactgagaaggctggggagaggcagagttgtggccagtgttcatgaaactctaggttgaaccagggaaagaaggagggactgcaactaagctcaggttacagctttcttgccagagatacgtgcaatggggcaagcttggtggagctcattgggaagccagagtggggtatgccaaatcaggattattaaagtcattcacccaagcattcctcacgcccccacagagtcaaggctatgcccaagcaccccagaggcaaacccagttcagtccatagtccatgccagccctatcttgcttgcggaccttggggacaggcatgtcccatgaaggcctggctcaggggcaaagggtaaggcattggcctggttagctcctgcctcctccactgttcccaactgggaagaagccaaggtgaaggtggttcctggaagcaggtgggggcagtggaggatggggttcctgagagtgaaacggtaggagccaggtaacagaaatgagcatgagcagtggaaaggaaaattcctcttgtcctgaatgtacaccagctctctgtgtggaattggagttcttgcttctctacaattctagccccttccacttttctacagagtgtcagctgtagttatcatcagaaatgtgtggtttaaaatgtttaggaatggccctattgtgttacagggtgacaatggtccttctaggagaacttaggggtctgcagggaaaagaagaggctcaggctggagtcagaaacctggaagcacgagtggccctgaggaaagcgggagaaggggacggggaggaagaggacaggccgttgctgtcttgctggattgagggaatccctccccaccagtcctctccacagatttcctcctaggcacactgtgcagtagttcttaatagtgtgtgtgtggggtcacatccatcagagagaatccactgaaagccatggaccttctctccaagaacacgcacactctcaccggtggactcttgcttacagcgtaaggggcccgtggagcccgggttcagaagcccttcacgtggtttggggtgcatggcttcccctccacctcacaccacccaccggctccccgccccgaggctgctcaccttgccccacacccccttccccgagcgggtggccctgtttttctctccctttctcgctcctactcctgttctggcacgggccccccggctcacctggaaggagtggaagaggtaccagaaggcccaggcgttgatgacgttgtagtacatggagaggaagaaagacaccaccacgctggcgacccctgcgaggaagcagagggccgcgctgaggaccgaggatggcccttccccctccgccaggcccagcgtgtgctcccaggacacacctgtggcgaccgccccggggtgggcgaggcctccctccaccaggtttgtgtggtgagtattaagcgagaccaggcacctgtgaacacttgggaagggtgatttctttttctccaacctccctcctcaccttctgggacaggaggctgatgacatgtttttgagatctaactgccaggcactgtgctaaataagtactttatttacctttggtccttacaacagtattatcttcatatcgcagaagagaaaactgaggcctggagcctgcccaagactacccggctgttaagtggcagaactgggttcacaacctcatgctgtgagaagcactgttgctgtgaagtgctaccttgtccagatgtacagttatgctccctccttggctcaccagcggttgagtcacctggtagccaggagagggggtgtgaggaggcggtggggagggggctgcccgtaattcggtcaggcctgcacaaaacccagggtgcggcctgagagcacagagaggggtgggaggcagcagggctctggggctggcccacaccagcccttgagaaccagcgtcccctcctctccccagccgcaagtgctgggacactcggtagtagaaaccggccatggtgcctgtatttaccccataggcatccgcaaatgctataaaccagggcttcccctccccacccccactccactctgagcactggttgttaaatattcaccagcatcccctggttggcacaaatatctggtatctttcctatgatgcagaagatgcctctgagaagtcctctgtgattgcttattcaggcagattgtaaaactacacacttctgtgttaaaaattaatagcctagcgaaaccccatctctactaaaaatacaaaaaattagccaggtgtggtggcgggtgcctgtaattccagctcatcaggaggctgaggcaggagaaacggttgaatccgggagtggaggttgcagtgagccgagattgtgccattgcactccagcctgggcaataagagcgaaactccgcctcaaaaaaaaaaaaaaattaatagccattcaagacaaggaggcagtctgggtttggagatgatttgtgagaacactggacacatttcttctgcatctgcaaccaggtcacatataagcttccaccctctttgctcctgaaacgtcactctgctttcctgcctgccttcctttctggggtgggaggggtgagcatcacaggctatggctacttctggtcagggttccttctgcatgcagaggcagccctgggtcataagcaatgtgcagggcaggtggaggttgtcctggaagtgcctggggctctggctcaaggtcactcaggagaagcatgagatgaaacagtcctctcctgctgtccgtgcgggcctcagcttccgcaccccagagacattaatggcactccacaacacctcagcggtgtaaagaagattaaatgagctcatgcacatatatcctataggctggctcccagcatgtagtaggtgcttgctaaaagagagctgttatttagcagggagaagttggtgagtttccagaatggttgttagctaggacttggagttacagctgtttcccttttacaggtgaccaagctgaggtccagagaagagaaggagggtggcatctgttccccaaggggcatgcatcctccctgtcttaccgccctgtgggtaggaaacccagctcctctcagcccacattctatgtcatccccaccaggccatttgttcaccccaggcaagagctctctcttgggccttgtgctcgccccttgatccagcagctttgctgatgggatcccacccacacccccatgctgcccgggtctctgggtgggagaggactggaggggccccacgtaccgacaccactgaggtacgggctgatggtcctccaggcgccgatgctgccctgccgcatgcgctgccccacagccagttccaggtacaagagcggcattccctccacgataagcatgatgatgtaggggaccaggaaactacctgtggatgtccagagctgagagccaggccaccaccaaaaggcttttctccacgaccactcaacctctgtgcaaacatccttccatcctcctgtctttctacttgtccatgcattctcctacctttccatcatccatcctcctctttctactcatccttcatccttctttcattccacattttcatccatccctcttgctgccattcctctcatctatctatctactattcattcacccactttctatccatccttccatccaaccatccattcatccatccgttcttctgtctatctttccatccttccatctatccaccctacatccatccatccttccttccttccatccatctatatttccaaccttccattcatccatccgtatttccatatttccatccatccatccatccatccatccatccatccatccaaccatccatccatccttccatccattcatctgtccatccttccatgcatccttacatccatcctttcatctttttatcttcctactcagccacctgtctgttcgtccatccatctgtggatgacatgcagccatgtcagttgttgaactctttaaattcatcctcgctgggaggcaaactgccactgtcccaagctgcttgaatgcctttctcaatgcctccactgtcccagcccttctgccaaaccccacattccatcttctatttcagcaactaatagttgatcagggccaagacaattgtgttgttaaatatgtcagacatcatgcctggatccatgcattcagctgtccacctctatgcacttcctttgggctttgtgcacagccctgatggtgctccacatgaggtagtgtatgaaacagacacttactaagcacttactctgggccagcccctggctggtgtggaatgggagagtagcaactctgctccctgcccttgaggttccctgctgttggtgatggtggggagccagggagtgtgaattttgtcagggtgagcctaacaaaatgtccagtgggaaaagagggcaggacttctgatcaaataaaacccagacactacaactgcaaagattaagggctgattacagagcaaactggatcctcagttgttaaggtaaacaacaaaataactatgcttacatgaacatctaatatttaccaaaaatgtctccattgtacacacgtgctgtcctgtaacccactcttctcaccctatggcattccccaggcactctcccaatcacagacctttgcatcaccccttaaagagctgcatgatgttctgctctgaaaatgagcccagaatgcatttaatcaattgttagacactcaggctgtttccagctttctgccatcctaaacaaagctgtgaaatgaagcctggtccacttgtttgtgtatttccttgggatacaaatcccagaagtggaatggctggggcaaagaccaggcagagcccccatggccacaccacagaaagaaaggcatgagccgcttgcatgggtggatgagtgcccacaccaccaggcttggagttcctagcttcatcctgctcatgtgggggcctagaacaaatcctgccctctcatgtccagacactgctataactcctctaggccaggctcccttcctttccttcagaaccttgtttcagcaccttgtgagttttctctcaatatcaaaggagtccaagaggtcattggtggctctcaatcatgaaatatctgacaataaagattgggttcacacactgagactttgaagccacattcaaaccctcagtggttataagataatcctgtttttacgcggggtgttaaacagtaactatgtaaggcctggcaaggtccagggacgactgtctctctgacagggtctgactgcccagtgcccatgggtagggtggaaatctaaaacctgatgccaagtgggaacatgggggctgtttggccctaggcattaatcatttctgtcactcctgacccaacctatcaaataaacacataatctgggtgaatttgctctgcaataaatttttcaagaaatgatgctagaacaattgaacattcatatgcagaaaaatgaaactcaacccatatctcaaattttataacaaacaaatctcagaatggattacaggcctatatgaacaactaaaagctataaaacttatataagaatacaggagaaaacctttatgaacttgagtttgaggcaaagatttcttaaatacaatgttaaaagcactatctatggaagaaaagattgagaaattggatttcgttacttctttgtgaaagacactgttaagagaataaaaacaaaaactatagactgggagaaaatacttgcaaaacacgcatcttgagaaaaactttgtgccaagaatatataaaggattctcaaaactcaataagaaaaataaccctttcaaaaaatgtaaaaaaaaaatgtgaacaggcatttcaccaaagaatgcctgtcttagtctgtgctgctataacagaataccagagactggataatttacaaagaacagaaatttattggctcatggttctggaggctgggaagtccaagagcatggtgctagtatctggagagggccttcttactgcatcatcccatggcaggaggtgggagggcaagagggagcaaagggagcaagagggagcaagagggggctgaactctcttttataacaaacccactctctcaataacaaaaacactcctgggataatgataccaatccattgacaaggccagagtcctcatgacctaatcacctcttaatggtcccacttctcaaccctattgcattggaaactaagttttcaacacatgagctttggaggacatattcaaaccatagtaggatgattccatttatatgacattctggaaaaggcaaaactatagggacagaaaacaggttggtggtggccaggagtaggggagtaggaaggggttgactacaaggggcatgattttggtggtagttgtgatggctaatactgagtgtcaaattgattggataaagggatgcaaagtattgatcctgggtgtgtctgtgagggtgttgccaaaggagattaacatttgagttagtgggctgggaaaggcagacccacccttaatctggtggacccaatctgatcagctgacagtgaatataaagcaggcagaaaaaagtgaaaaggtgagcctggcttagcctctcagcctacatctttctcccgtgctggatgcttcctgccgttgaacatcggactgcaagttcttcagttttgggactcagactggctttccttgatcctcagcttgcagacagcctattgtgggaccttgtaatcatgtgagttaatacttaataaactcccctttctctctctctctctctctctctctctcttccccctattagttctgtccctctagggaaccctaatacagtagtaatacaactacatgccttaaaggcatgtgtggagattaaatacagccacacattcttcagcgctcctcccctgaagaggtggagtctattccccacactgtgaggctgggctggccttggggctggctttgtccagtagaatgtggtgtccatgttggtaccagagcccaggcctcaggatgccttgcagcttcaccttccttctcttggagtgtgcctgagacagccatgtacagataccagaccaggctccagaggatgagaggccacgaggaggagaaccgagggagaccagccagctcagcacccactaccaggtgtgtgagggaccttctggctgcatgagcaaggccagacacaaacagtaaaggaacagctcaggcacccacagaactgtgagaaatgattaattattgttgctttaagtcactaattttttttctttttacctctcaatattttcagtgtgtatttccaaaaacaagaacattatcttatataatcccagtgcaatgagtaaaatcagggaattaacaccaacatcaaactattattttatctgcagcccttttgcaattttcttgactgtcccactgatgtcctctaggcatccagactctagctcacaagcccacaaggcctctagctgtcaggtttctttagtctcctttaatctgggacacctccttagacatttttgcctttctttgtctttcatgacctttcacagtgctttagaggagcactggccagttactttgtggaatgtccctcatttggagttttggcagaaacactaaagttatcctgtgtccttgtccagaggcacaagatgtcaatgtgttccattcacggtgatgtagattttgctcacttggttgaggtggtgtctgctggatttctctgctgagagttactattctccccttagaaataattatcttcttggagatattctgagcctcagtaactatcctatttctcatacttttgcccagtagttttggcatccagtgaagatttttgcccaaaacgattattgccacactggttgccagatggcgatttcctaattccatcattccttctaagtcctggagttttcaagtggtttgttatgaataaataggtaactgaggcacacattgagccctgtggtaatgtctctgccactgtgagtccatattaccccagatgagtgggacgcttacagtcacagaattattggaagatgtagactcagctcagcctggtgaatccttactcatcaccacctccctggcacccactgtcacatctccactgcaccgccctccaggcaggtctttgtgattccaccctccagtcccctccctgcagtttgttctcagattgtgacacacctgccttttccatccctagcctctcacctggtcaaatcttccttggctcctccttccacctggaatcaaacccatactccctcccttgacctctgaggcttggggaacagggctcccaccttcccttccctgccgctggcctctctccatccactgcagtcacactggccttcctgctggtctggcctcagcaccttggttcttgctgttcctcctgcccaggatgctttctctcttctttcagtgctctgcccagacttggcttccccagagccgccttctctgtccaccctcactagaacagccttcttgccatcttggactccttaccctgcttgatttaccttctgaacatttccctatgtgaataaggctataattttctttgtttacttggtgtctgcctctctactagcaaggaagctctcctcttgttctctgctctgcttagaacagcactgggcagagagccagagtccattgaatatttgttgaatgcaggaaagaatccttagggtctcactggatcttccagatgcatcacttcctccaagtgtcaccagatcactcaaaactaagacccaccctcttgtcttgcaagcccctgttgttgaggcacctgccgctacactgaatgtctactgctctgtccacacctccaactcctaaacagtcagctccttgagggtagagatgggatctgcatggctcatagttgatctctagctcctaaggaaggacctggcacagagtaggtgctcagtaaatgtttgttgagtaactggctctactgtggtgtatagcgtaatgcttgggcttgctgtccatgtgttgtctcttcttgtaatctccatctctttatcctgttcttctgaactgtggaataactttggatagggtctcgctctgttgcccaggctggagtgcagtggtgcgatcacggctcactgcagcctcgacctcccaggctcaagcaatcctgctgcctcagcccccgtgagtggctgggcccaaaggcatgcatcactgtgcctgactaattttcaattttttgtagagatggggtctcactatgttgcctaagctgacattacagggtgaaccagtgaaccactgcacctggtcctgccatattttttgctaggggagatccatactggctcttggtgataccctgtttccaaaaaaaaaaaaaaatgataaaaaagaaaaagaaagctatcccacagctcagaagaaaaggataaagagatggagattacaagaagagaagagacatggacagcaaacccaagcgctactctatgtctaataagcgttactcagtttcagcagttgtgcctgcagaaagaacactgcagacacaactggtagaaaagtacaatcacaaattctacaagtcattttcccagttgtgtacattgaaagcactcactagtcctaggttaacttgatgaaaacatttaatacttagacatatagcctgtgatctttcagaaattataagattcacataataccatataaatttatgtaatattctaggtccatgatacctaataactaataaaaaataaaattggctgcagagttctcctttgcagaaatgaaaatctgaaaacaacagaaaagcatctatagatttttgagtaaaaaacattgtagctaactcatgtggctacaaaggacagatgttctcagacatgctgagaaagcgaaccacctatttactattcctgaaaaacttaagtgctcatgaactgcatccaaccagtgttggatcaaaataaggaactcagatatggggttgtgttatagtagaactaactagtggtaaataaaccaacaaaacagaatcaagtctgaaaatcatactgttaatatcattgtaaagttatacaaatggaaaatgtaatttctgaatgagaagaaacaaaatataaagagtaaaataatcatcataatgtgtctgaaatcctagattatatcaacaaaagttgttaactggaatgggggtgaggaaagaagcaagaagtacaagtgtgctaaaatttttttctttcatagggtgatatcaacagatgacatttcattcttgacagtgataactagagaaaataagtatactttcccctcaaatttaaattaactgctaatagaaaaaataggaattataccttctaaatcacttgagaaaaaaagtgaagaatatatacttcataatgtaaaagatcaaaacaaaatccaacaataataactaacaaaaaggaaaagtaaggcagtacgaaatgtgatgaaaaataacagcaaacataacctgataataaatataaacggatcaaattcctccactaaaacatgaggaccactggattataacagcataaaactttacgtgacttaaacttccacaactggagaatggttaagtaagttatgttacctctgtaaatggaatattatggagctatttaagcttatattttcaaaaaatattacatgattttggaaaggattaaaataagttaattttgaaaaagcaaaataccaagtcacatataaaaatatggttctaattttttacagcaaaaatgttaacagtcattacctctgggtggtggaatttctggtgatttcgtattttattatttgtatatttctgcattttacagaattttttcctaacttttatatttttagtagagatgaggtctcactatattgctcaggctgatcttgaactcctgagctcaagtgatcctcctgcctcggcctcccaaagtgctgggattacaggcatgagcctccacacccggcccttttacacaatttctacgatgaacactcattacatttataacccccaaactcacaccatatgttattctagagcatgttgttgcttatttttctaattatcatagccagtacgttgtctatttgctaaacctaagaatctcactagaagagacattcctttctgtatgaaatgtatcactgcaagccctcacatcataatctgtctcctttgagggccacagagatgcccgcccgagtcagtgcctttcatgggaaagcttactcaggtgtccaaactctttctctccctccacttacatatctttttttccaaaaacaacaacaacaaaaacaaacaaacaaacaaaaaacacagcagggattttttgtaaaccttttttttttctttctggggcatgtgtgtgcttgtgtatgtgtgtgcatatacacaatgtttaatgtaatgtttaatgtaaggaacaccgagcacaccaggggatgctgaagctgctggcctgggggttccactttgggaaccactgctctattctgtgagactctccaccccagcgccttccttctcttcattcactcgcctccatcttggtcttcccccaaaagtttcccatttggagtcaaacccagtcaaccttttgaaaaccaagaacaagggcacaggtgagaaaaattaaagccgtctttactcttcctgactgtcactggtttaaacctcctagaattccctcccatctgttctctgctctccttgctcatcccctcgggcagcatcaccccttctccagctacccagtgcatccttggcctccatgctggcaatctctgtaaaccacagctctgactgtgccacttccctgcttaaaatctggctttgctgtcagagctaagctccaccttcttagcctgttatttggggcccttagggacatgctgactcctttttcatctccagtttcctctcctgccattgccctagtccccgcctcacttctcacagccacctggggtttctggccatttccctcaaatgtgtgcttttctgtgccttttgcatacagtttcttctgcctggaatattttcacccctaattctacatgatgagctttgacttctctttcacagctgctattaaatgttgccattgctggaaggctttctagatcctcttgagcagttagtccttcttgagttatttcagcgaagcctatgaacagtgctttgttaaagcttttcctgcttggtccacccccaacccctgtaccctataatcaccatatttgtaaacttccgtcagcgtagtccctggcttgcagaagatactcagtgaatatttactgaatgacttaaattgcctagaaggtttatattatatattgtttgtaaggtagtgattctcaacctgggttgcacagtagagccctctggggagtgtaaaactcctgtttaagccacatctgagaccaatccaatcaggatttctggggataggacagaagcatcagtattttttaaagctatgggctgattccaacacacagacaaatagaggcttctccaccagtaggcagactctatgttcctgactggtcacttttcctccctaccaagtgggagtgagacatgtcagaccccacaatgcaacaggcacaggagggatggtgtatcagtctgttctcacactgctgtaaagaaatacctcaaactgggtaatttataaaggaaagaagtttaattggctcacagttccacaggctgtacaggaagcatggctggggaggcctcaggaaacttgcaattttggaagaaggtgaagggcaagtaggcacgtcttacatgactggagcaggaggaagagagagagtaggaagctgctacatacttttaaataaccagatctcactgataactcactatcacgagaacagcaccaaaggggaaatttacctcatgatccaatcacctcccaccagaccccacctccaacattgggattacaatttgacatgagatttgggtggggaccaaactcatatcagatggatttagcccggggatcaaaggagggctttgtggaagaagtcacctttaatttagggaggaggtttcctggagaggatgaagagcacactgggaagatgccaaacattttgaggtatattcagggaagggcagaggtggagaggaggttagaacagaagggacaagggatccttgcaggtggacatcgcacaggctcctggccaggccctcctccaatgtcaaggtgagccatgggtgagtgtcacaggagaaccacaggaagaagtaccctgagccacggcaattcttatttgggggtcctagaaaggcctggacacctgaggagtcctgtcctgcctgtagcagatgagtgcagggtgctggggagagagccctggcttgtcacagaagtgacttgagccccagctatttctccagaagtcttgttctctctgacttgtttcctatctgtaaatgggggtgacaggaccaactgtgggcatgttgtgaagaccaaattgaattccttcagaaaatgcctcacatgatgcctggcacatgctaggagcccaacagggcagatgttaccaggattgaatctggaaaacttgggtgagcagcaggggcccctgatcatggtatttcccaactactgggggccctcacccactttacaggtaaacagctgcagcactgttccctgatccatccatggactgacctgctgtgaatcagtcccaggctgggtgctggcctgaagagctgtggccaccgcagctccaggccggctcacaagagccaaccggccccacctctccccaaccccacactccggcacaatacgttggcagtctgaaactggccatggtgggaggatttacatcaaggtaatctgcaaattcttggaattgggtcttgctgttccaccaagagccagttgttaaacatttactgggaccctactgccgggcctggggccacagaagcaaccctgacccttccctgaagtgtggtccatggaccaagccttagccttgctagggagctttctagaaatgaagaatcctgtcctcccccacaggcgtctggatcagaatccctggaagtggggtctagcaacctgcagtttatgaagatgctcaggtaggctacagtttgacatgcaattctctaagcaatttggggtaagcagtacaggcagctgaaagagctggcttcctgtcccagacagcaagggctttgcagggatgtggagcattccagtctgagagtgatactgtcccactgcatagtcaggtgtcctctgatttccccctcaatattgcagagagaaaatttaagagaaaaaaatccatatttccaccagtcacacaactgttctcatctctccatgtttcttccgtgcacaggtttatgtaaaatagttagtgcagtatttgctttttacaccttagtgcacacacacttgcatccccgatttcttcctgaacaactactgccttagattttgacatggttgcccaagacctgctgactttttcaaaaagagattttgtgaagttctttgagctgccttttattttttatttttctagagcaggcagccagggctgtacagagatgattggtacctggaatgtaatcttcagaattaacattcctcatgccgggccgggcctggcctggggagcaggaaggaaacaagcctctccagtcacgggcagagtcccatggagaggggcacagatccctaatccgtcttattctgggaagtattttggcacagcctggctctgtggtttataaacaaattctttgtttgctgggggtatttgcagctctgcttacaaggaagttatacacccctctgcagcctttcataatgtggctgatttttaccttccggtaagggatgggttgtaaactgcctgggtttggggcaacacaaatcacttcttaaaggtgactttactgtgcagtgaaaggcttgggaaagcctctagcatcctctagcgtcatttattctgtggcttttcctaataccttgctcattcactcaacaaatatttattggatggctcctgtgactccatcacatcacagaggttgggccgggcggagacagagaaactgaagaacaatgtgcagttcttctgaccaagtgcttatgtggcctgtgaagtagtgaggagagtcagagagcacaacggagagaaagcaatatttggtcccacctggagggaatggtgggagttctcccagcaacaacagcctctcaggtggaggaaatatcttgtgtgaagggttgaggcacagaaggaggtgctcatggaagtgtttggaaggcaggaggaggtttgaagctgtgtggcaggaaatgaggtggaaatattggacaagtggtcaagttaggtggtcaagtgcctacggtgccaagtggactgttcggtctttattctgtagacatgtggctgacagggtgccatccaccagacccacaccctccttttgtctgtgcacccactaatccatgcatacacccagccaccaatccatgctccgtccggcttccactcatctatctatccacccatccagccgaagcatcctctgcaccaggcacaggattacttcttgtttctttttcttggaacctgagggtcttgaggtttccctagcaaccccttgatacatattcaactccagaactatcagccccacatgcatccctctgcagactattcaggtgatggtggtattataaacaaggaattaagtagtcatgtgacagtgaggctcacctggactgatgactgggaaacatgtacccaggataaaggtatcatgggtaggtctactgagcacagaatgatgtggaaatctcattctgacaaataattctttttaagagtcagttatagagctgttagagcacatggtaatgctgttagagcatatggcaacatatgcccttcacatcattatggtgtatttatgcacttcaaattttaaaaaggaatcaggaaattaagaatgcactgttttaaaaactctatgaattaaccttttgttgatttggggtaaggggaggagggagcagtgtttagctcttggtcttctcaaatgggttcattttcgtaaatactttggtctaacatcttccatgatcttttatggtgaaaaaaacatgctaattatagaagtcctaatacacaaacacacacatacacacacaaaaacacacacacacgacaaggtaaacaaaaatcacccagaaattttgttaacaatttgatgtcttttccccattcttttctctgcatatttttaagtaattgttttaaaatgtcaaatccattttatatagctttgaatctgatttctcctccctccacttaatacaggatacgagaaaatacaattttttttttgaaaatgccgccttaaaggctgcgaagagcaaccttgaatggatgctctataatttactgaaccaatcccctttatttgagggcttaggaagttgccaatgttttgctcttattaaatgatggtgaccatccttctacctctgtcagaactctgacaatttcctttagatacaattctagaaacgagacaaccgagaaaaaaagtgttttagatgctgagacttaaatccctcttgccacattgccttccaaaaaggtacttgggcttcacgaggttatagacatgtgtagaaggtgttcccagctttccgcaacgctaggggagtgcggtaagagcgcgtggctggctggctgtccccggagcgtgcatgatgcttcggaggaaacatttatttaagaaaaacaaaacaaaacagaatgatttgcatttcctgctttctgtcgttccaaactcaaaccaatctccttataaaaaatttaaagaaatggctcaagattctcttaacctgagtttcaaaccgttgatttaagtttcggatctgaaagttgtataacgagtttctgttgaataagacaatttcctactcactttttacacctaaacgtaaggtttactcactaagacgtcagaccattgacacttctctcgaagaaggagaccgcgtcccctgcgctctcagagccgcagcctggccaacaagggtgagggttgggggcttggccgcccccgggatggggcgaggggttcccgagggcttgggagggcggcttgggagagagctccggctccggaacgaggtgtcctgggaacactcccgggtctgtaacttcggacaaatcacgctcgctttcccggcctcagtgtgccgttctgtaacttgggtctaaccccggctcgcacacacggcggggacgcgcacagagttgggctggggccggggcgcggtgggcactcacctccgccgtacatctggcacaggtacgggaatcgccacacgttgcccaggcccacggcgtacgagatgcaggcgaacacgaactgtagcgagttggcccacagcggccgcgctttctccatggccccggcctcggcgcgctcggctccggctcgggggtccggcacggcagtctcagtgcgcggtcgccaggcgcgccgtcccaccccggctcggcttgggggtggccccgcgcctccgccgccgacgcagctagctggtttttaaattgctaatctcattaacggcgcgcccgtccgagaggcgaggctggtaaatggatgacggcgagccccaccccgcccgatcgtcgcggccgggaaggcacccgagattgcagaggacagggcggagtcccctggggtcctccggctcggcggggcctttcttcaggctgcggaactcctcgaagtgggcgccttccctcggccactcacctgtcatttatcgagcgcctactgtgtgccaggcattgtctggggacacggctgtgaaccacttcccagctccgtcttggagctgacattctggtagagggaaacacttgaattggactgcatgaaatgccccattttcaaccattttttaatttatagaaaggacaatgtcatatggttcaacctagcccacgtataagactgagagacgcgaggaagacacctaaggcaaagtaaaggggtaagcagttgcggggggtggccagggatggttagggagggcttctcagaggagagaacataacatttgccaggggccagaaagaagtgagggaccttcccggcagtcccgtcccctccgtccacccaacagcttggccctgcgtgcctactgggtccggggacggaatcaggttttgaactgctgtgggggactctactgctcaggccagcctaggggccagaaattttgattcattaggccagggtagggaactaagaaacctcgtatttctgccagtcttacaacgtgatttgcttgagggtggtcactagataagacagagcttggtgctttgcagtaatgtggaatctgggtttgtataccaactctgctactgacttagctgtgtgaccttggacaaggcacttgacttctctgagtctctgtgtactcctctgtaatgctaacagatatcttcccctctctcctgcctggcaaggaagagctcatgtgaggattaattgggaacttagcttactacctggcacagagtaagttctcaataaagaggccattaccaagtctccagcaggctgaatgaatgaatgggtaacatattaatactaatgccacgctttgaacagtgcctaatacattgtaacagataagaaaatgctaaataataataataaaatttaaaagagatgaaaagcagagttgctagtgaaaatcttacttgaagccaaaatgaaatcagtgctctaggacagctccttgttgggctttccctggagttcctgcctgtctggtcccagaggagaagggtgagtagggtgagggaggtggaggcttcctcagacatattacctgtcctggaacttcctacctcgaaaaagcaaagcagaaaaaaaaggcagcacagcaggagaaactactttaatttttttaaacttcagattctagataaatgttttttcctacccattgcctcctccccaaaggaacctaccatcctggtgtctaaccccatgggttagttttgaccttgatgaaaatggaattaaatgggatgtactttttctgtgcctggcttcatttgctttccgttgtttgtggggttcattcatgttctagtgtgttgtgtagctgtgggtcattctctctcactgcagtatacttgtcggtggtgtgagtatgctccagtctactactgacagatgtctgtgttgtctccagtttggggctgtcatgaatagggctgcaatgcacattctagtgcacgttcttccgtagatgaatgcactcactgctgggaacttcttggccttaggataggtgtgtttggctttagcagatattgtcagactgttttccagagtgtggtagtacaagctgacactccctttgggtttcagttgcttttgctttgcatcctaacacttgtcattctatttctaaaggtctgcccagtcttgtaggtgtatagtgatagttcattgtgccttttttttttttttgagacggcgtctcactgtgtcgcccaggctggagcacagtggcgcgatctcggctcactgcaagtgccacctctggggttcgcgccattctcctgcctcagcctcccgagtagctgggactacaggcacccatcactatgcccagctaattttgtttttgtatttttattagagacggggtttcaccgtgttagccaggatggtctcaatctcctgaccttgtgatctgcccgcctcagcctcccaaagtactgggattacaggcgtgagccaccacgcctggcccattgtgccttattttaacttccctcatgaccagtaaggctgcataccattccataggctaattgggccatctaggtatcttttttcatgaagtgcctgttcaaattttttgtcagtttttaattgggttgtctgattttttcctaccgatttgtagttctttatgtattctggatttgggtcctatgccagtttagtgtattacaaattgcttttctcagtctgtgttgccttttattctgtcagtggtgtcttctaatgaagagatatttttaactttaacaaagtccaatttcccaatcttttcctttagtgtcctcctttggtggtttttcttatgtcctgtttaagaaagcactcctttatcaactccaaggctgtgaagatattcctgagaatatataagactcaggcaaaatgagtctcagccatccatagatagggctacccgccctccccctacaaaggactcctcacagcaatggcagcagacggagtgccagcattttcttgtgctggttccctgggctccaattcgacggggctgcctttttaaagtggttttgcattgtttaggcagaaggcttgttgctgcctccagctatctgcttgcatgttcttgttctcatatatgagttattcctagagggtacctggctatgcagtgaccttcaggaactgggcactttggagagatgcctcacctggaccatgaggctgctgggaccttgttggtttgatggaggcaaggcctctctttaattccctacctctgaaatcaggccagcacctccttccattcatactgctatactccctgggagcccatccagtatgtgagaccctgtgtggtagctttgggcagcacgaagaatcacccagataaccccaaagagcagtaagtaaatgcaatggggcagataatcagggctcctggtagggtccccatgactttctgaagcctatgtgacagctctcatctgacaaggccagttgtgctgctgggactcatagagtggagaggacaggcctggaagggttggggggcttccgcagagagccagcaagacagagggtggagaggagtggtaggctggcaggtatgtaaccactggctctctgcagaaaaagctctgatttgtcacatttgccaatttctgtggtgtaaacacttttactatgactttttttttttttttttttttttttgacagtgttttgctgcaatgcccaggctggagtgcagtgtcacaatcttggctcactgcaacctccgcctcccgtgttcaagcaattctcctgcctcggcctcctgagtagctgagattacaggtgcccaccaccacgcccggctaatttttgtatttttggtagagatggggtttcaccatgttggccagcctggtcttgaactcctgacctcacgtgatccacccgccttggcctcccaaagtgctgggattacaggcatgagccacctcacctggccttactatgactgattctaagctaccaaagtgatgtcactaaacgtggagacatgcagtagcacaccattgtactgagtctccactatccagatccaacaggcatagataatagtacagtcaataattaggaagtgccaagttttgtgtatttattacctctgttttaaataacttattcaattgctagcttatgtagtttaattcttagtggccatgtttaacaaccagcccacagaattctagaaaatttaccagttggctctcaagagtgtgtggcagctggctttggcattcagcagggggattggggctagggaaatcacttctgcatggcagggacaaggggagtgagttcagctcagtggtgtctggtgccccatggcaatggggttttcagcttagctgagccccactctgagtgctccttggggcctccactgctagtatgcaagacactgcctgtggaccggtctcactgtgccccatgtcactcaggacagacttacctgcaggatagaaggctagcatgccttagttatctgatttccggaaggggtggagacactggggagggccctgactcagttgtatgggtgtgggctcctgggcccgtgccagggttcctgattaccctgccgaccatgaagttcatgccactttcaataatttgctcatcctagtgatgccattgttacttaaccaccctcagtggctcccagtcaccacaagataaagtccaaactccttagcctggtctgtaaagttttgaggatttttaaaattgggccctgaggaatttaactcttgcacacctaggctccaggagaagctaaacttttcactttccggaatgtgcatttttatacttctgggatgtctctcagccaagagcacctctgctttctcaacccagaaaaatcctgtcctttctcttgacccagatgatttattacctctttttaaaatttaaattttaacacattaatttttttagagatgaggtctcactatgttgtccatgctggtcttgaactcctgggctcaagcaatgctccagcctcagcctcttaaagtgctgggattacaggcatgagccactatgcttggccttttaccctttttaagaagccccagaaccccatctgcagctggaatatattgcttgctcttccctgcccccgggccctgggtacatacctgacttttctttttgagacggagttttgctcttgttgcccaacctggagtgcaatggctcactgcaacctctgccttctggtttcaagcaattctcctgcctcagcctcctgagtagctgggattacaggtgcgtgccaccacacctggctaatttttgtatttttagtaaacacagggtttcattgtgttggccaggctggtctcaaactcctgacctcgtgatccacccgccttggcctcccaaagtgctgggattacaggtgcgagccaccacgcctggcccatagctgacttgtaatgcctgccagtgctgtgctgtcatgaagagtgcatcgtatgtgtcccctctggactatggctcgcatcatgccttactcatccttttctccctagtgccaggtacatggttgaatctcaataaaagtcagctggtaaaggaaaaacctgctgcagattcgaagcatttaagtacaagttcatttctgttgttcacagcttcggcaacagtcagatgtctgcattttagaacatttcttcagcacattcaagttcttgacatgactgttctccctgctgcccaaagcacttgctcgctatccctcagggagcacaaagactcacacagtacaaataggagtgtagaagccagcaggaggagattctgcaaaggaaatgctggggctgctgtggggacttgcctagctcaggtggtgaaggagaacctgtgtgtgcacgtgcacacatgtgtgcgtgtatgtatgtgtatgtggtgccaaggaggtgggaatgccccaacttttccctgaaccctgggactctcttggctgcaagtggagcttctgacctcagagccccggtgtctcagagctgccaagctccttggagcaatgctcctcaaacatcagcgaatcccctgggggtcttggtccaatgcagatgctggctcagtaggtccgggacggcacctgcgattctgcatttcccacaagcccccaaggaatggtggtgctgttggtccaaggccctcattccaaatcagacccatcgatactcccgttctccaaccatgtttgccatttttgccaatagccatatttatcatgtttgtgaaccatgtggactgttatttatttatcatttttctttaaattaattcacttttcacttcaatacatttaaaaacaaaattttacatcactaccatacacgtaaagctagtgtttttaaaattcatttaagataaattgaagaaaatttaaaaagtttaaatgtctatgtctggtgctgcctcaaaacaccttacgtactcccagtggcagatgtcccatattgggcaccacagaccttgcccacgaactgtgccacagagccctagaatttcatgaatgtgcctgtaggactgtgcccagggcttggacaggttggtgggaatccaaccagagtagccccaccaccatatcttgatatcctgtattgtgtttctgtgtggaattttatttgacaaaaagttaaggtccaaaactatcagaaacccactgctgagcccatacatttgttttagagaagccctggagtttgctgtccgatatggtagccactagccacatatctttacttaacttcaattaaaatgaagtacaattaaaaattcagttcctcagtcacatttcaagagcacaatagccacatgtggttagtggctactgtcgggacagcacttacatagaacatttccatcactgcagaaagttccattggacagtcctgacttgtggaagctgggagaagaatttggtgataatgcttgccacagtctcttgcattctgggcctggactgtgggcagctgcttgggataaagtaatgtccctcacactgtccctttgttctcagagaaggaaagatgggaccttccttctctcctctcctctgcctctcaagatgctgaccagggcatcatctcctggcaggaggccagctgtgctgaaagtggctccatccctacaagctacttcagctgcaagatgggaaactctaataccatcttttggaccccagtccctacctctcctgctgcctttcagtctcctgggccccagaatgtgctctttgccccactggtcccctgtctctggccctccctgttttcccagtgcctccctctctggcctggccttcatggttggtcaagtccacatatctccctctcactcatctttgccctctcttccttttgctgtttctcagccctgtgccacccaaacttgaggatttctgggctccccagactgctgctagggacttctggaaagtctcacaaagctatgactgtatcttccgcaagcatagattgtgaggcctcggcagggccttgctgttgctcacttctttgtgatccacgtctggctgtggttcgttcttgtggccctggggcagggttcccgatcttctccatatgcctcaaacttttctttccatactcctcatcccgctgatgacataataaaggtcttgggaatcccccagatggctaagggaactacccctaggctgggcctctacctgagattctccctgctgtccagtcaccttgagtgtgggctcccactccctcctgggccttcagcatccctcccgtcagtcattcctctctccctagcattgctgatggcttttcttttcctttcctttcccttcccttcttcctctctctctcttgctgttcgcataaagacattctcaggttccactagaagcatctttaaaaacttctagatctgcttaccatcaatctttagacaactgtgtggtccacattccttaccttggttcctcatcacaccattcattcctttacctcttacaaggtagtagtgtggcactcagacctaagttataacaaatccattctgtcaaatatacccagaaacatgacccatccttttttccttctgttataatggaggggttaagggaggacccttcttcctggctaagccccttcccatgccaggactatgtgtgccttcaacttcctctgtgtcttcacacacccaggctgataataggtatacagtaatttctaaataaagactagatgacttaaggatattaatattgttagagaatagagaaatttggaaaatgaagttaatgagtactcaaaaagatattaactatattcaatttttttcttttttacttttcataatgaaatacacatagagaaaattacacataaaaaaactatacctcaacaaattatcatctccttgtgtctttcagatgccagctttctccctgaaaaagtatccactatgccgacagtcctttcttggcttttttgtgtggtcttaccacttaagcatgaatccctaaacgctatacttacttttgtctgtgtttgaacttcatattgtgaaaaaatagagtggctattctttgatgtctgacttcttttgccttacattatgttttctttgttgttgtttcatctaagttgatattgcagctatagtttttacttggccagtctattgtatttcttatgtaactacaaattatttaaccactttactattgatagatatttggattatttagcttttggatattatgaaaaatgctgcttggaacattctggtacatgtgttctggtacacatgagcaagcatgtctatgtgtagaaaggctgaaacatagtgtgtatgtattttaagctttgatagataattccaaaagtgtttcaattcatttatatgtatgtattcatacaatacggtcagagaattctaactgcaatatattcctgcatagtttgatgaaagcaaaaaaaaggagaaatgagttattaaaaattcaggacaaatataaagcacaaagtaagacaggagcaatatcagttcaaatgtatcagtaattacaataaatgtaaatggattcaatgggccatatgaaagacagagactgtaatgactggaataaaaaattcacacatacagttacatgctattgacaagagatataccaaacataagctcacagcaacatttacatgaatatattaggaaaagaatacattaggatgaaaagaatatattaggaaaatgctatccaaaagaaagccaaaaaaatatcattagtgatagaaaggacatctatcactagaaagctataacatttaaaaaaattacagttcataaaatagcttcaaaaaacaacaaattgatttcttcatggattacatggataaattgacatatctaccatcatgatggagatatctgtactcatttctccatttttgatagataaagcagaaaataaaaagaacagggagtgaaaattgattaatacagattattagaataatctaaaatggaacttctacaaatagcaataatagaaattaaaaattaagtggatggatttaaaagtggatgagacacagctaaggagagatttgatgaacgcaaagttatgtcagaaaaaattatgtggcacattgcacagagagataagaaacaaaaaccaagaaaaaatttaagatatataaataagctatgtaggacaatgaagtctaatatatgcttacctagaattctggaaggagaagagagactggaacagagaaacacttaaagtacaacagctcaacatttcccaccacagattcatgaagcccagtgaatcctacgtaggataaaaaaatgtaatgcccatcaagatgcctcatgatcatgctccagaacatcagggtgaggcccttaacccacatcaaaggtctcaccgcagaggagtgtttaatttgtggcattttgaaaaaaattaaaaggtagaacttaaatcttggacaggtaaaatagcatatgacagatgagtggtaagagcggaaatgttctaaggaggtgaacaactttagactttgtgaaagtatgcaaagcaaacatttcaagttgtccccagatttcttttatagctttccaggatagaaagaattcatacactgcatttggttgttatgaatacagttgcttttaggacagttttcccacctttttattttcatgacattgactttctaaagagaccaggctaactgtttgaattgtataatgtcttacattcaggatttgactgattatttcattgtggggtcatttaatatggccttttccccctgtaacttgcagagaatgtgttaatttagtctttatatggcacatgcatgcacgcacatacacacacacacacacacattataacatcatataggcacttaggcaattaactgtatttattattgatggaattttgaatttaaaaagtgtataggctaggtgcagtgactcacgcctataatccagcactttgggaggccgaggtgggaagatcgcttgaggccaggaatttgagaccagcctgggcaacacagtgagaccctgtctttgcagaaaattaatttttaaaaaattagctaggcgtggtggtacacacctgtagtcctagctacttgggaggttgaggtgggaggatcacttgagcccaggagttggaggctgtaatgagctatgaatgcgccactgcactccagcctgggtgacacagtaagaccccatcaaataaacaaacaaataaataataaaataaaaagtgtacaaccttcctgagtttacattcaccaaatggggcgtagtgctgaccttcttcactgagctattccaagcaatttagaatatttggcaaatataacaagacgcagagagcctccaggatcggaggaactgctggccagagctgaaggcaacatggctgcacagaactggcactgggttggcagctgcaggctacagctctgtgttgctgtggctctgtttctggctacacttctgtgagatatgataacaactaatgggacacagatgacttgaatggcagccttaaaaataaaggaaaatgaaaagacatctaagacttgaaagcaaagaaagcctaacttaaaataatatagggaaatactaaaataaatgtttgaacttgtacttcaccagtatatactggtaaaaactcagggcttcctgagcctctgagtaaggttacacaatgattttaatattctatatccttttgcctgtatgcctacatccaaaggacaactgtgtcaactgagtaacctgagtggattttctgtgaattgatgcctattgttgtctgaagtaactaatttgagtaaacaacacaaagtgggcgtcctttctaaaggaacaagaggaatggaacaaagaggcatttttcaggtcagagagaacagatgcagaaatgagcttgtttagaaaacattgtggcttctcaccacgatcactcagctgatcccttgcattaaggaagattcagccacgtgctgtgaaaacaagggactcagagagcagtgtggaatccttccttcctttttgttggtcttggctgaatttattccttcacctcaaatatttttgctgggaacaagcaatcaataccaactagaaggcataatctggtggagaaaaacagatggagcactgtgaaaatattttcaagggtcagggtacacctggggccatgctgtctcaattagtgaccccctaaggaatttcactgtgtcctgctgtactgttttgtacttgctcttttcatttcataacaggagaagccctgtgaatcttactctgccagaaaacacacatgctttatttcacaagctcggtggttcaaattatatttgatttctttccctgctccatactccaaatgtggcctagcgatgggcagcgtcggcatcgccagggcgcctgtgggaaatgcagactctcaggcccctcccagacctctagaatcagaacctatttttaaaaagacccccccaagggatttgcaggcaggttaatgtctcaggagcacacagggtttttaaccctggctgcacatcaggatcctatctatggagctttaaaatacagatgcacgagactccctgaaaaactgagcttggcagaggagtctcttgaatgtttggcttctagaagcttccatggtggctgatgtgggatacccttctccagaagaggaagatccctaccaacactgccgtgccactcattattaacatttctagatcttctccccactggctcccctccagtttccatatccccaatgtcccttgtttaaggtccacctctgcctgctctttcccactgttaaaatttctcttctaaaatacattcagagtcaacaggaaaaggtcttaaagataatttatcacagatgcaacaacaatttcttctcatgaacttgaggagcccaaaatcttttccctgcttgccaaggtgctatattgtctgaaaatagctcaactgcctgggaatggttttgtgaaatcgattccctactgtattatagggaattaagtgctcccaaaacttcccttctgactttgtttccatttcccaatatacagcctacccagaatgacgtgttatcattgtctgccatgttttgtttaatttatgctgtactttttttttggggggtggggacggggcagatggagtctcactctgtcacccaggctggagtgcactggtgtgatctcagctcactgcaacctccacctcctgggttcaagcaattttcctgcctcagtctcctgaggagctgggattacaagcacatgccaccacgactggctaattttttgtattttttagtagagacagggcttcaccatgttggcaaggctggtctcgaactcctgaccccaggtgttccatctgcctcagtctcccaaagtgcttggattacaggtgtgagccaccgcgcctggcctatgccgtactttttgtgttataatacagcatatatggcatacagcatactatggaaaataaatacatgtataaataataattataagacaagtgctcttgtagccatcacccaggtggttgagacttggtatagtgtgtggccagttttcataaatattctgtatttgcacaaagagaaaaaaaattggatgctgcagtttgttttatttattaggccaaatctgctattgtattgttcctatcttctatatccttatgatgattttgtgtctgtgcattccatcaatcactgagagaagtgttaaaatcttccattatgattgtgaatttttctattttcttttaattgtgtcaatttttactttatagaatctgaagccattaaggacaaactttaaattgttatatcttcttggagggttaaaattttaatcatatggaatgactctatctctagcagtgttaaattctctatttggataattcagattgttgtgtgttttctgcatacacaattatatcatctgtgaatgagttttttttctggcctcatgctttggtttaggcctccaccactatatgtatctgtcattgctccaaagtctccctgtcattgaagccttagtgacagccctatgtaaaatgtcaactaccaccccaacattgtttctctctttccttcttcattgtatcccttgggcactatttggcatgttatatgtgtttcttgtttatcaagcccgatttgctcatttatttaagagaggtatcgagtctatgtgccagaccctgttctggatatgggggatgcagcaataaacaagacaaccacagatctcagccccctcggaggatacattctggtggcgaggcagaaaatagacaaacaccatgcttctacttcagtaaggcctgtcttgaccaccatattttaagaaaaacatcccttctcttgattctactttcctttctacctaccttatgcccccccttttttttttcgctttactgttttatagcccagccaatcaagagatgtcgatgcttactttgtctccaagtttctcttgttacttctcacagtcacctcagctaggcccctcagcagtccaacaaaactatcttgtcaaggacaccagtgaccccccacatagctaaatccaacagtcagctgtccctttcctggacctgccagctgcatgccacccaggtaatgattctttcctgctgatgtgatttgcccagccagcatccagggagacgctctcttggtcttcctctcactggcccctgctgttccatctcttttgctgatgtctcctcttccctgattccttggggttggagcacctagggcttctcactgacactcacctccttggtgtgcctacctctttaatggtttaaaagccctctccaccgataactcccaatgttgtatctctagtccagaccacacttcagaggtctagacttgtatgtctggtgcctcccaacatccccatttgggtgtctgagaggcatttcatggttgtctaaaagaggatttctggccagacgtagtggctcatgcctgtaatcccagcactttgggaggccgaggcaggtggatcacctgaggtcaggagtttgagaccagcctggccaacatggcaaaaccccgtcgctactaaaaatacaaaaattagctgggcatggtggcgggcacctgtaaaaattagctgggcatggtggaaggcacctgtaatcccagctactagggaggttgaggcaggataatcacttgaacccaggagaagaaggttgcagtgagccaaaatcgtgccactgcgctccagcctgggcgacagagcaagactctgtctcaaaaaaaaaaaaaaaaaaaaaaaagaaagagaatttcttatctttgcccacttcccttcctaaagccagctccctatctctgttgacaccaagcctagcctagcagttgctcagccccaaacccttgaagtcatcctgagtcctatctctcatctcctttcaatctgtgctgatagtctattagttttcccttcaaaatatatccagaacctaactctctgacactgctgatgggagtgtaaattggacacctggaaaatttggggggcagtgtctactaatattgaacattcatatatgctgtgatccagcaatgacactcctagatgtacatacctacaccaaaagatccacactagacgtttatattagcattctctgtattagccacagactagcaaaactccaaatgtccagcaacagtatgatggataaattatggaatattgccactatacagcaatgagaacaaaaaaaaattgctacatgcaacaatagggatgacactcacaagcacagtgttgaaagaagctggacacaacagagtctatgctgtatgatttcacgtacataaagttcaaaaaggaagtcaggagagtggttacctttggaaggagatggtgcctgggggccagcacaggaggcctctaggggtgcagataatgagtgattcttcatctgggtaccttagtgctttgtgcaaattctttgagctgtatgcttatgatgtgtgcactttgcgtacataagttttacttaaattgaaaaagaaatccagcttcaaccacccttatcacttcttttttttttttttgacagagctttgctcttgttgcccaggctggagtgcaatggcaccctcttggctcactgcaacctccgcttcccgggttcaagcgattctcctgcctcagcctcccgagtagctgggattacaggtatgcgccaccatgcctggctaattttgtatttttagtagagacagggtttcaccatgttggtcaggctggtcctgaactcccgatctcaggtgatccgctccccccttggcctcccaaagtgctgggattacaggcatgagccaccatgcctggcttacccttattacttctatattcctacctcagtctaggccactaccatctttcacctggatgactactaattttttttttttttttttgagacggagtctcactctgttgccaggctggagtgcagtggcacgatctcagctcactgcaacctctgcctcccaggttccagcaattctcctgcctcagcctcctgagtagctgggactacaggtgtgcgccaccacatccagctaatttttgtatctttagtagagacggggtttcaccatgttggccaggatggtctcaatctcttgaccttgtgattcgcctgcctgggcctcccaaagtgctgggattacaggtgtgagccaccacacccagctgactactaatattcagtcacctcttcacccctgctcacaatctagcccaaggacagtctattctttttttttttttttgacaaggtctcaatttgtcacgcaggctggagtgcagtggcatgatcatggctcactgcagcctcccacctccctggctcaagcgagatcctcccacctcagcctcctgagtagctgggactacaagcatgtaccacctacctaatttttaaattttttgtagagatgaggttttgccatgttgcctaggctggtctcaaactggactcaagtgatctgctcacctgggcctcccaaagtgctaagattacaggcatgcaccactgtacccggccaacagtctattcttaatgcaaccacagagtcgtcctttttaaatagcatcaggttttatcattccaaggcttataaccctgcaatggctcctcatatcctttgctcagtgtctcctcaatgaggtctatcctgaccaccctgctgaagctgcatccagcatccctccagcactcttgatcctccttgttctactctattattattattaccatagcactttcttcttgtaacatattataggggtttgaaaggtagccccccaaaagatacatctacccagaacctatgagcgtgacttcatttggaaaaagggtctttgcagatgtcattaagttggggccttgagatgagattatcctggattaggatgggcactaaatccaatgacaagtgtcttgaagagaagaggagaagataaaagggaaggtgatctgacgacagaggcagagactgaagtgatgtgtctataagccaaggaatggcgagaacggccagcagccaccagaagatacgagaggcatgcactgcatctccctcagagcctccagaaggaaccagctccaccagcacctgcatttaggacttctggcctccagaactgcgagagagtaaatttctgttgttttaagctatgcagtttatggtaatttgttacagtagtcctaggaaactaatacacatactgcataatttatttactatttattattttccgtatgctgtcactgtaagctccttgagggtacaaattatgattctgttcacaatctatttcaaataccagtgcttgacacacagtaggcactcaaacttaaaaataattgattctattgataaagttaataaatattgattaaagtaatctaagatttcgttggataaatgaattgtgacatatctatacactagaaggtactactcaacaataaaaggaatgaattattatatacacaccaatatagatgaatcttaaatacattttgctaagtgaaggaagccagatattaaagagaatatactatatgatttcattatgtgaattctagaaaaggcaaatcaaagctgtcaagagaaaaagcagttcggtgcttgctcagggaccaaccaggctcagggagcctggctgcaaagggacatgaagggacttggtgaagtgatgaaagtgtcctctattctgattgtggtggtggttccagggctatctatatttgccaaaactcttcaaactgtacctttaaaaggggtacatgttattgtaaattatacctcaaaaaggtgataaaataaggtggttcatttatttagaataatgtaataattgtctaaagcaaataccaagtatagactctggagcaggcctaaaggtgtcagagtcaaaaaatatatggcaagaaggtacagtagaaggaagcaaaagatataaaaccccaacaacagaaaagagacagctgctgattattgagagctctcccaaggatgtacgcatgagaagacaccattagcagagcccacactgcggaccgtgcagtgacatctcccttgctgcatcaagcccctggaacacaaaccagcagcctctgtcatgaaagaaaaccgctgctggagaggcaggaggatagcttgagcccaggactttgatacctgcctgggcaatacagtgagatcccattctccacaaaaaggaaaaagaaggaaagaaagaaaatctctgtggggtaaatagagcagctgttctgggggatgctggtagttgtttgttatccccacccacctcactatctccctgttctttccttcaagatggccttaattctgacgacagatcactgatttaatttatgaagtggagtaaacactgcttaaagtattcaaaggtttcactgaatatgatcaggatcaagctctttaaaaaagttaatcagttattggttcagaaacactgctggtggctttcaaataacatgttttataagaaagagaaattccagactagtctctcttgtgaagattgatggaaaagggcctgcattgccaagacaatcctaagccaaaagaacaaagctgagcgcatcacactacctgacttcaaactacactacaaggctatagtaaccagaacagcatggtactggtaccaaaacagagatatagaccaatggaacagaacagagccctcagaaataataccacacatctacatccatctgatctttgacaaacctgacaaaaacaagaaatggggaaaggagtccctatttaataaatggtgctgggaaaactggctagccatatgtagaaaactgaaactggatcccttccttacaccttatacaaaaattaattcaagatggattaaagacttaaatgttagacctaaaaccataaaaactctagaagaaaacctaggcaataccattcaggacataggcatgggcaaggacttcatgactaaaacaccaaaagcaatggcaacaaaagccaaaattgacaaatgggatctaattaaactaaagagcttctgcacagcaaaagaaactaccatcagagtgaactggcaacctacaaaatgggagaaaatttttgtaatctactcatctgacaaagggctaatatccagaatctacaaagaactcaaacaaatttgcaagaaaaaacaaacaaccccatcaaaaagtgggtgaaggatatgaacagacacttttcaaaagaagacattcatgcagccaacagacacatgaaaaaaatgctcatcatcactggccatcagagaaatgcaaatcgaaaccacaatgagataccatctcacaccagttagaatggcgatcattaaaaagtcaggaaaaaccttcaataatttatcggctaactggaactagcaagatatgaaaaggatagtatatcatcactgtcttagaacaggacccttgtaaattatacctcaaaataagggggagtagactctgaggccaagattgtgtgcaggatgtcgatcaggagggagccttggggccaacaggtgtaaaggaagtcaaggcagcaggactgggcaggcccagtggcatggctgtcagccctgtggggagctctgaggatgagacacactttgacactgtcccacactgaggcgagagagttatgtctccattgattgttactggaggcagccaccttgaaagggagcataaacttgggcaaggtggttctcttcagctgggcagtgctcaaatggcagacaatgaagggccagctgctagcaggtcttccagtggctggggccatagtccctttattcctgaatggagattaggaataatctgcacacagtggcagcaaaggcaaggccaagtcagatggtaatgatatgagctgcttttaatttcaggcagttgattacttacatagacagggaaaggaagtgggtcagccaaaggtgctaggttcctcggtccttctctcacactccaaaaaggacaacacctactcaaaaggggcaggatgactgcaacaggagttgtgggatactttgttgctggggagccaagcctagactgcagctaagtggttttgcattctgcaggtctattctgagctcttcagaatctcatcaaaaccctcgcaggaaagacagggaggcaagaggagctggcctcggggcaactcctcacaagcttcccatcctccctgttctgggagaatcatgaggcattttgccaagacctagactattaataactgtggctcaacccttgcctgtacagcatctgggccaggatggaaccgttctctacagcacctgatgcaacaaccaagtggagtatgtttcaggcctctaaggatagtttaacagtaagaaattaaatatcattcacaacattaacagaaaaaagagaaaaattatatcatctcaacagatgcagaaaaggcatttggcaaaattcaacacccatttatagtttaagcttttctagcaaactaggaataaaaaagaacttccttaatttgacaccgaatatagcaagcattattcttttttttttttttttttttttctgagaacagtcttgctctgttgcccaggctggagtgcagtggtgcgatctcggctcactgcaacgtctgcctcccaggttcaagctattctcctgctcagcgtcctgagtagctgggactacaggcgtgcaccaccacgcctggctaattttttgtatttttagtagagatggagttttaccatgttgaccaggctggtcttgaactcctgacttcaggtaatttgcccatcttggcctcccaaagtgctgggattacaggcgtgagctactgtgcccagcctgcaagcattattcttattggtgaaatatttaaagtgttctccctgagactgggcatgaagcaaagatgctatcttttctattcaacattgtactagaggtcctagccagtgcaataaggcaagagaaataaataaaaggctcacaatctcatttattcaaaattatttacctggaaaccccaactatttgaaacaaagctggtaatctggaagactaacattctcttataaagcaatctaaaaaggtcttggagcagcaaagatgccacaaagcctatgctcttcacacacagagtcccttaagccctcatcctgaagctacgtacaatcctaataaatggctccatttattttccaagcccaccttggaaaatggcaagagattggcaaaccaaacaaaaccaatgttagctaccagcctaaaaggaaagaacacgcataaaccataaaacgtagatgcagcagtttaaaaaaacagtgcttataaatcacttattaaaagggcaaacagctccacacctcagcagccctgagggcactgcagtgcaggacaataattgacacttgtaataatgactttgagtcatcaggaaaagataagattatgcttatgactcactgcttaagaaggcaggaaattatattttgtattaaaggtttttaatgtctgattttaaagaagtttgggttatttatatggagaaattttagtgttaggaaattactttataggtaatatctgatttcttttacaacctaaccactaaggtttttcatggcttaagcagtacttggccaggaaacagaagtcaatttcacaagtgtttggattgagcacctgtgatacttgagtcataatgacgggctctgctccaggcactcagtccagggatgttcttttttttttcagagttgttactatttaaaggcagctgtggcttggccacgtgagcatactgggctgaaaatggtaagcaggatttgtaatttcttctaagtcgagtcgaccctttgatgagtaagtattgaaagcatgcaaatattccttgcatttgctcttctatcttcttagttcactgtgggatgagatgctattgatgtcacacccaattccccttatcccagcctggaatgtggcctgcagaaggttctctgtgtctcttcacctgaagccctttcttggctacggaagcatgttcagcctaggtccaacaacaaggagttaacatctcaggagtaatcctcatcttgataaattaaggcctggtggatacattcccagcttcctcacgtctcagtgggattgagcgtggtggtccacagtgctaacctgctcattaacacacattttatctcctttcttccctttcctacctcatgcctccgtaccctcaccccactttctgggatcccctccccacttcaaccaagatccctgcctcagggttttgcttttgggggagctgaaataaaacatctggtgccagaaatggccctagaaagtggcctcaggatgagacactggacttgatgccagccagatgacaacaggatcccactgctagtagtaagtgtagtggtgataaaccctgtcacactactgggttagttaccaacactctcacctgggtatggattggaatgaaagaagagaagacagtctctgattagccaactattacctgaagagatgccctgacaactagaaagcccccaggtctctatttaaaagaacccacatctcctatgtgcagaagccagaatgtactgagaatccggcccatgattggattacagcagtgatgcagattcaaaggagaccaaattcacatgcccggaaagtctcctttgcttaagtcagggccctgattgggaaggaatgtgactctgagatatgaggggcccatttgggcaaatgccctcaacgaccttgatatcccagattcttctgaacccttgggtctagaagaagtggctcactcccccttgctagaggagggtagcctcctatcacctggaagccattccaaggcctctcttgaaaggagactggcaagataaccttggtcttcctcaggatcggtccctacttccactcattacttctaaaccaataaatagggctgaatatcagcatgccctatgcagagaaatattatcctgctttgagaagaaatggattagtcccccaaaagaacagaacctggactggcagaaactggaagaacatgtatggttatggatcttgaggatgctggcctagtgggaagtagaaaagaagttggataaggaagagtttattgacatagactgtcttctgtgactcaggatttggcatgtttgtaagaacacatggagccagtcctaatacactgctgcaatgggccttggtgcttgaggatgatggtatgccaaaaacgaggtggagattccacaactgcttaacaagagtgctgaggagggttcagaaggctcagagggatgacatgctagaatggatataaggcgagagagcccacccatgggcaggggtatttccttcactgaaacaataaagactgcattggtaaggggacattaacattgttgagaagctcagtggtggctgtcttctgttggctagaactgacaacagaagatgctggcacataactgggcctcctatgataggaaggattccagaacaaaaaactaatggctgcactcagacattagaggaataaaatgaatacagtaacctaatgggccgtaaggccagaagaacaaccagggagccaaggaccagtggctaatagattacggcgctcctagaggtgaggtgaatgggcagtcaatgaagttactgttataaaaccaagccaaccaaccaaacagctgatgagtaaaagactgatgtcagccaccacagtggaaaatcctgatctctcatagttaccagacctagtcagttctcagttccagagcccatggattgaaggagagtctgggtctcctgaggaggagccctgcagcactatagcaatcttaaataatacacactgtctcaaatctttcccaaagagccccatggccatttttcagagtaactgtatgctgagaaagcagaatatacacatctttcaagagctactcaacatagggcctgagtgacatacccaggggatctaaagcaccaccacagccctcttgttagagtgggacatataagataggcaatctataaagttctgacccaaggctatctcagggcagatccagtaggcctgtgggtcaatcccctgatctcccttgtttctgagaggataaatgggatgagtgcacttaactgagagaccccaaaattggtttcttgacctgagggataagagccataatggtagaaaaggcttatttaatgctccaaaatgctctctccatcccaccccctccccactcctggtcaaaatcaggggcaacatcccaggagtattgacagtgatccccacaatatcccattgaatggttcctgcaaagcaaaacagagcaaaagtggaagatgacagtggactaacataaaccaagaagtagctccaatagcagctgctgtgctggatgtagcatcccttcgagtcagcacttgatatgaggctggagatttggttaatgaattcttttaaatccccttcagaaaagagaatcaagaacaggttgaattcacctgggtcagataacacagtgtacactcaaagttttgctccaggagcatataaaccctcctgctctgttacaaaactgtccaaagaagtccttgatcatcgtgacattctgtagaacatcatcctggtccaatactttgatgacaaaatgttaactggacctagtgaacaggaatgaactggcaaataatctgagtgttccttatgacacatgcaccagagagaaggaggtaattcctacaaagattcagaggtcagaggtccaacaatctagggaatactgggacatcctgccaagtcaagagccagttattgcattttgtaccttctactactaagagaggtaagcactaggtagtattatctggattctgaagtcagcatgtacaacacttaggaatattgctctgaccatttcttgggtcactcagaaggctgcaagttttgagtacacagttaggagggctttgtacctctctatggttcaggctgtagtgtaggggtacctcttggtgatatgtgggggtaacaataaatgggaaatttcacaaatacagcaggacaggggcaaaatgatcaggggctcagacatctaagaaaggaaagtctaggtcatctcatgaggccagccatgctgaccagcaaaagtgctggttgagggtgaggggaatctagaataagtagaagagggagatgataaatgttaattatggcttcaggaccaatatgcaacagagaggactacagcctgtcccactaagcttttcgttgatgttttcctttttgtattcattgttttaaaaatattgtgaccaaccattatcctcgagagaaagtgaacttaacatgggacaccaggtggtacagtagagcggagtggatggctggagatgctggtgattacttcaacatatccccttcatctattcccagaggttttcttttcttttaattgagatataacttacgtataaaatttatcattttaaagtatacaattcagtgatttttagtatagtcacaaagttgtacaactattacaactatctaattccagaacatttcataccctcaaaatgaaatgcaggacccattaacagtcactccccatctactcctgagtttgcaagcagacagttcccatgcttggcttctggaggagtctctttgcctgagagcattctctggaatttggtctacatccaggcaggctggacatggcaaggaattaatacctcagatttctaacctcaaccagtgagggatggaaagtggtggataatattcccagctaccttgtccttcagtgtaataattcagagatgttttctgtaccatgtctcagagggtccccagcaggattgggtcccagttgcccatagtggtgactctttcgatctgtctcagttcctcagtcttccgcgggatttcctgaaatcacttcccaaataaactacctgcacccaaatccttatcctatagtctacatttgggaaaacccacctacgattcttttcaacaagactatcatgaggtctttgtcaagcaccttgctgaaattctgacatactatacctctcatgcttttaaaaagacaaatgaggccgggcgcagtggctcacgcctgtcatcccagcactttgggaggccaaggtgggcggatcatgaggtcaggagatcgagaccatcctggctaatatggtgaaaccccgtctctactaaaaatacaaaaaaattagccaggcatggtggcaggtgcctgtagtcccagctactcgggaagctgaggcaggagaatggcttgaacctgggaggtgaagcttgcagtgagctgagatcacgccactgcactcaagcctgagcaacagagtgagactcttgtctcaaaaaaaaaaaaaaaagacaaacgagtttagtctgccgtatcatgtgatcacatgccactatgtgcagctaatttttaaattttttgtagagatggggtcttgcgatattggccaggctcgttttgacttactggcctcaagcgatccccctgcctggaactcccaaagcgttgtaattacagtcatgagacaccgcgactggccctgccatacctgatttcttactagggagatccatgctggctcctggtggttatgtttcttttccaagtgctcatgaaaatccatttaataagctgttagttaatttgacagtaagcccattgttattttacaaaactataaaggattttccaagttccattttgctttgtctaacagtggttttttaatctgtaaaagttaaaggatgtattataggcaaaaaagagaggaagttatacttcatataatgtaagagattgagtactgttcacatcaattcatgttttacaataggcaataacagctacacgcttacttgatgaaggagctgatgacacaatccaaaagacaccacagtcccccacaaaagcctccaaaccagttgtcaccaacccactcacctctattcaagacagaggtcattacctttaagtataatatttcccctttttcctaagcagttttgaaaatggttttgtcaaaatattattgtctaaatactactgttttgtctaaatgtgaaatatcattttgctgaaatagcttttctttctggaagactggcttacatgacaatttatgatttgaatatctagtggcaaagctttggaacataggcatttacacataagcagagggaaatcattaatgccaaacttttgcaaccaatatatatctaaaagcaccaagggcttaaaatttgagcatctctataaatctctttcagttaatcagaatggaaataatgaatagcaaaggctttatcaaataagattacacagtcaaggtagggcagtatttttcttatgctgagttttataagacataagcaaattatcatttaaacatttatttaatataggttaaaatgtaatacataaagagaaaaaatgaacacaaatgtcaaacagaagaaaaccctttatattttattttggtcaacaaaaagtctgtgcataactcagcagcaggcctgaattaaattaaaccaaagctgcattgtgatggccatcaatgtacagactgcctgtctggcttagcacatcaaaagtctaatcaaggctcaaaccaccatccttagaaatccaatatatatatatatgaaaaaggctttctttctcagttaaattagataagtcttaaagttgggaaactactaaaaacaataaaaatttaaaactgtattttgctaaagggtatagagtaaataacaacaacaacaacaacaacaatgacaaaccagaaacactaaaatgtgtttacatgtgaaagaatcatcacgttgatttacgtcaaagaacatcatatttgtttatcttaatgcttggcatagttggttttaaggttttagaaatatttttgaatttattattaaacaataggaacgtactgtacagaatatttcaaaactgctaccaagaaaacaagtacaaattctacctagcaatataggtttcttatcaacataccttttttcctcactggtttcaaactgacaaaggtgtagggagaaaataattgaatggtttctgaaggccacactagccctttagccaagagttctgcttctgaattacatagaacatcttggtccacagacaatggaatggatttttggagagagtgtcaatttagggctaaagaaatacagggtgagaatgaagccctcaacaaaagctccaaaagggcacagaaactggtaagtgacctaaatatggagagacaggtgaggagaaaatacatagtaaatgctggctcgttattgcattttattctctcccttctctcatccattcatcttcttaagactgccttctgtgtccttttgcagggaaattatcttaccctttaacatttgttccttcactattttaacaaaaagcctataagaaaaataataaattcaaggctattactaaaagcttgaataaaaataacaacaagccctatgctccaatcagtaaactcgtttcttggaataaaatcttcatttgtggaaatggaatgatgtctcttagtagacagtgttcatttagggtgtgatactctcacttttagaagcaggaaaaattactaaatattaatatgtgaaaagtaaggactttccttctgagggattattgctttatggacttgactttgtttatccttatagtatatcactgccttacataactgtggatatgatgcccagtttctaatgatttgtccaaaatcgtctgagaaaaccaggccaatacaaatatagtgaaaacctcttgaaaatacaattattatagacccacataaataaagtctaatctgaagtctgatagctgattttatgttgaatatacgtcttttaaaaagtgttcttattgaacataaaatgtaaaataacattctggaaacaagtataaatattacatttattctgagtccagatactttctaaactgtagaagtgcaggatggatttgacttatccattagtaatacagactcatgaaaagttatgctgcaaaaaatgctgaacctcctctgataaatgatctttaagatggagagactgaggaagctaagtgaatgttcatgttcactgctgtaaattttccttataattggtaaaaaggctacccataatagaattcacattttcaatgaatttatagtttatcatcaaatagagtaaatgaattaagatttcatttttaaaaataaagagacatatttatttgtaataactctctttttttggtaataactatctttaacaatgctattatttatttttacccatggggaatgcataagtacaaacattgttagcttatttaacatttattaaaaatacagactctttatactaatgcagaaggataagcctcttcttcccactctaaaaatctcttctttgctgtaaagaattctcagtgcatgtgagctaagactctggagcactcagtagagaggtgtgtgggatgaccagacagaatcactaggttttctctgttttcaactagctgaaaataggaactctagttctaaatattcaaagtctaaatattagaaaaataaggagaggggatatgacaaaatgcttttcaaaatacatgcctgaggtgagactgcttgtatgtttgcatgtggtagcttccagaggaaatcttcagctttaatcttcaggttcatatctggagatataaattaagaacacaatgtcaggataccttttgttgttgttattaccaaataagtttacttgaagcagtggcactatatttctcacttcaaattactgttacggtagaagttggacacattcaactttgttttgatggtgactcagaggggatttttacatcaggtaggaggataggccagatcactgctaaggctccaagtctgtatatttggcatttagacctgtgataacttcatataattacctcaatcatcatgttgacaagaacagttgatacgactatatgagtaaagggctagcaaatctacttctctaaggacaaatctcaccttgaattccctttctagctctgctcccctggaactctgataaaggtaaaatgtcaactcagtttccaggcaaaacatctgatgaccacatctggacctggaggactatgaatgaactataaatacatggtgggagccaccactttaggtttccccctgtgcgatgagttcttttaactggacatacccttaactgggtatcatgtgactgctaagagagatactaatcctatgtagaacacggacttctaagccaagctggctatgacacccatctgcatgaatctcattctctccaacttaaactgtcatttaggggaacagtaagaccagttcttggactgcttagagtataccaccaaggagaagagaactacctaatgctgccctgcgagcttgctgtgtttcctgtctgacatcctgctaagtgaatccattgccaagagcagcttactgtaggcctgtgtgagtctaaaggcctagatgaacctaaaaagaagccctggtgggcattatagataaggtcaggccagagctcctccactttcctcaaatgaaggcttctggactaaatgatccagcaactaccaccggcttgacctctctggaacaagcttagatttaacagagaacaaacatcaatccagagagagaaatccaaaggcgggatcagtgtggcttactgtgccagtcttttcctcagatctttgatttggtcattcttcttggtaagaatctctttcatgtttcgataagctgctgtttgctgaaatttcttttctaattcctgcttagtaaaaaatgtcagcccattactaaaaaaatagttaaggaaagagataacaaatgcgataaaaatatgtagttttttttgcttgaattttactagtattttgctaatgattttctaatttccttaaaggacacatttatataaaactaagactatccaaactttaaaaatatattctttcaaatgagaagccataaaatagtaacattttcccaagtacagtgttggtaaataactcaagccctggatatgataaatctatttgaaatattaaactaattttcctgtaaaataagcacacttttttcccaagtcccatagtagtgtattttagcaaaatgatttttaatttagttaaattttagctcccatattcttttttcccattttttatatgaaaaaatttttaatttttttatagagatgggggtcttgctatgttggccaggctggtcttgaactcctgggctcaagcaatcctgccatcttggcctcccaaagtgctgggattacaggcacaagccactgcacccggcctcaactcccatattcttaagagtctaatccccaaagtgaagaatctagctctctacatattttatataaattatgacaaaagtatagaagtccttaaaaaaaacagtccctcatccctctgcaggctgtgggaagaaggagcagaagagcaacatggtgggatgtagggcaggattcaagccacctacagaggagcatttcactacaccatagagggagaggagatgtcttattatcacagatattttagtaccaaagatggaagaatatcagtgcccggaaatgattaatctttagaacatattggctaataccttgagaaaaaataatctgaatttgcagttgtccaacgtttatcttagccacatgtattcctctatactgtgtgcattaatcatgcattaacagacaaatcccttaaacatggtcttctgaccttttcagccatgtgcagctgctcctgaaccctgagtagattgtgcttggctgtcgccagattctcctccagtgacttctggttttctgtcttgtcattaagtgtcttctgaaactcactctttaaggcagcgacagtgttttctaagttacttaagtcttgggcctttataaaatcctatgaaaaataaatgcatgcatgtaatttcatgttgatattctaaaaataactgttttagaatggtgattcaacatcataggagatgaaaaaaatgatgtatgttttgtgtgcatgccagcctcccttgccagcctaggtaagtgccagccccttcagagtcaccagcaggccagtccattgtcagccctgggtacgtggtgtcttgcacacagccgacactcagtagccactgaattccaaatacataaaatatgatttgtgaactgctggtatttccatccaagatgtgtgtaccagggttgagatggcaaacaggtttcattttgaaaagccaaatttaaaaaaatcctcaaagaagtttgaattcttcaaaatgatagaaaaaatgataaaagtaatataatttataccaaaaacttaatagacatatgttttagtcattatttacaaggaaataatatgagagcacaattactgattacatggttttctaaatttttaagattttaagttttttatattcatgagatatgtataatttttgcatactttgacaactatagcataagacaggcactggatcttctctcttcctggatcttgtttttgactggataagattcatgacagaaaaaacatttgtactgataagacagtaaaatggtctacaattggttaatatgtagatgaagaaatacttagtactttcaagtggctctcacgcctgtaattccaatactttaggaggccaagggaggaggactacttgagcccaggaaattgagaccagcctgggcaacagagcaagaccccgtctctacaaaaaatataaaaaattagccaggcatggtggcacatgcctgtggtcccaaccacttgggaggctgaggtgggaggatcgcttgagccggtgaggtcaaggttgtagtgagccatggttgcaccaccgcactccagcatgggaaacagaataaggccctgtctcaaaagaaaaaaaaaaaaaaaaaaaaaaagtactttcaacagaagaaaaaaaaaatctttcctcatttttgaaatctggtctttgaaaaaaagattttcattgcaactaataaaagcacgtattcactggttgttcttgtgtccaaaatcttaaagtaaaattggagcaaagccccaaaaagcttttaaacaaattcatcagccacatgtgtttgcaattgtttgacttaggagaaattataaagcggttctggaacattcgtgtttttataaatctattgtcattggcatataatggttgaaaatcattagctatataagaagtatcctcctattttaaaaatatctacagataaaatggttcaacgtctgagatttgcttcaaaaaaacatggctggtgggaagaagaaagtagaggtacaaatgaaaccagactggccatgcattggtaactgctaaatagagtgaagagtgcatgggggttcattatactattctctctacttttgtgtatgtttgaaatttttcatagagaaaagattagcaaaagcccagtgaagcagattttgggtttgtttaccagacatttgcaatgagagtatgaccactagaaaagccaatgctgtactgaatatctacccaaatggtcctgctcacaggaaatcatactgcagcatgcacactcaacagaaagtccacaggagacagactgtacatacaatgacttcccgcaggcggagtgacattcagtcattacattcagacaagcatgaagaactacaacactggatttcattgtactctatggtgccggcgggtacagacgcatctgcagattcataatcattttgtcacactcatcaaaggcaaacttaagtaatgttcagtataataaaacccaaatataaaccaattaaaaacttttcttttcattttctttcccctccactgtaattggatgtcaaagtgagaggggaaacttaaaaaaaaaaagtgagaatatcttgcataccaggaagattgtagaaaaacttaaaaaataaatgtgagaatatcttgcatgccagggaaactgcaggtgtgtgagctatgtactgtcccctctgccctagaggatggacagagggaaggtcactggttctcaccaggccttttgggggcaagaatgtcccaacacatgacaatagaggcatttgtctcagggagtagcaggggtggggtacagtgagcagtaactaagacttaattttaagtttataacttcattctacttagaaaatgtgagaaaggtagctaaaacttgtttcaccttttgatttccttgatcaagctgtaaatcttgcagtgctttttctagttttgacttttcatccagtgcatttgtagcctatagtgaagtttaaacaaaacactttcagtatttaatctgtaggcagttcaataattgtgtcaaaacatttctcagttacctgtatttcaatggtcttcaaccttgacttcaatttctcattctcttcttgaagtcttaaaatttcctttgtgagtaaattcaaattttattatattaaccaaaatattttaatatttgaaattattacttgtttcacttaaaaatctaatttttaaatttaaattacataatagctcaaaaatgtactactgatattttggtaatatcccaatttcatccagcctatcagcctcagtatctgtgagtcagctttggatctaagacatctagtttcttttctttcagtttctcagacacatcttccctctttcagtcctctgttttctgttttcaaatttttttccaaagacccgcttccctgccaactttctcctagctggtcctgcaaatcctgggtctattctcagcctacactgcacactgttgccccttatcctgagaactccttcacttcagtaccatgctcaagcccacagatgcttctgactgaggtgaggccaaacacttttgttcttatacagctcaaacatttgaatcatctgtgttatttttcagtagactcaaataaacacatcagcccagtcagagggcactgcactctgtttcaagtcatgccgcctcctgtctgaccactgcctgttctgttctcctgcccaacacactcacttctctttcctctacaatttaactggtcttcatccttcaaggcccagcttaggtacccctttacccaagagcctgttctcacctactgttatccacacacaactgagtcttctctgctacccagtatgacacctgtagcacacaggagaatattctctggtctctatttctagaacatcagttctactttcccaataaaactattacatttttggccgggcacggtggctcacacctgtaatcccagcactttggaaggccgaggcgggcgtatcacaagatcaggagatcaagaccaacctggctaacatggtgaaaccccatctctactaaaaatacaaaaaattagccgggcgtggtggcaggcgctactcggaggctgaggcaggagaatggcgtgaacccgggaggtggagcttggagtgagcctagatcacgccaccgcactccagcctgggcgacagagcaagactctgtctcaaaaaaacaaaccaacaaacaacaataaaaaacccaaactattacatttttgagggcaagggagcaggtattacactgctttttatttctaacaacatctagcataatgttgagaatacaagggtcatgaaaaatagctgaaatctgaaatgcttcaacatcagaaactttctgagtgctgacatgatgctcaaagaaactgctcattggagcatttcagatttcagatttttggatttgggatgctcaactggggtctgtataatgcaaatattcaaaaatctgaaatccaaaacacttctagtcccaaggataagggatactcaacctgtgctgataaataatttttttttttttttgagatggagtctcgctctgtcgcccaggctagagtgcagtggcgtgatctcagctcactgcaacctctacctcccgggttcaagcaattctcctgcctcagcctcccgagtagctctgactataggcacgtaccaccacacccggctaattgataaataatttttataaacttaaaaacccttctccttgttaccgcagatcacaaactttaaatgtccatcaataaacgctgtccaaaatttcatgctcttcactttaccttgaaaaggtgtgatcaggagctacttcaggctctctagaaggttaagtatgccctcttctggcccatggggtaccatcaagtaaaactactgcaatggactaattatcctcagaggacctgaaacaaaccttccacttctgtttctccaccctaggcaatgacaggacagaatgagagactttccgtttctcaaaataataatattaccttgtttaggagttctgctgttccaccttcattaagtggagcaagttttggctttgtgacatctaagatgggctgaaacaaaataaagaaaccaaactgaaatcaccacagaataaagcatgtataatcattgaacacttgcactttgcaagtggaagatactatatataaacatattcactgcgatgtcagttccacaggtgtggagatttctgttggtttcatcctttgttactcccagtgcctaggatatgcctgtcctacagtgccccatacatgttagagacaaaaataaaacctatcttccctgtatcttttaaaaatatatagatagaaggaaaatgagggaagaaaggagggacggaaggagctcaaagccagatctgatatagagcctagcatctagcaactagaattttagcctgtgggagctgaaacagtgatttctacatgaaccttagactctgtgaaaaacaataatattgatgaagatctaggcaagtataatacagataaacaataacttggcacaaataatatagtagtttagtaatatatattaaaaataaaataattcatgccctctgatccagaaatttcttagccagaaatatgacccaaaggaataactggaaagtattttgcatgtgtatgtacatagattcatctcagcagtatttatccaacaatggagtatttacggtgtgcccgtgaagtggaatggtaagtggccactccaattaatgagaatgattagaaagagaggtagataactactagtattgtctccatttgtcagatgagtaaaatgaagctcagctacctcagataacctgctcaaggtaacacagccaggaagtgacagagccaggatgtatacccaggtgtggctgaccctacagcctgcgctctgaatcttctgagtagagtatttatgagtgggattgagactgaacttagggatcatgtgtatgtgtaagccatcacagacaaaagcagtttttcacagttacttccaaaacattttttcttttgcctgaaaatatgatagacaatttctgaattttactcttgaattgaatgcttttccttaagagttctcagttttgatctctgaattctttgagcaacttgaggattttaaatactggctattaagatatggatttagaatgaccaaaaagttacctttttgtttgaagatgtaatctctgctttttcaaattctgcaacttgttctaataattctcttgaagaagaaagcaaagataaaaattattcatttaaaatagatttatatcacacgcaagaagagtaaaatcactggtaccaacccattacatgccagagagaacagagcaagatggaccaaacttcaccatatcaaaaatgttagttgcaaatggttgagaacctaaaccacatggactcaaatgtaatcatccacagtacctggcattttgtatctactaggtatgcaatatctactgctagaaataaaccataatgttaatacaaatatgaggaaaatttatagtcaactttgtattcttgaggtgctatgaggagactgttttattacataatgtgtattgttagctagtaggtgttcaaaaaagattcttaataaagtagtctcagaaaaatgaaaatagtccatagtatctactgaaaaagagtaccacaaattcctaggaaagacagatagtgggggtgtgccatctgaagatttgcaaaggccaatgagaagtgactacacacaagcttagagtgttaacagcagtcagcttctaagcttcttaaagcaccaccttctcagagttttctcaccagtcatctactgacagtggcagaagttcaatgattttcctccccagctcataggttgtcctcagcgttgttcaacactctgcatgtgaactgatgtgctgtgactgtgcttagagtagttcacggggcttggcggtcagtccttcctgatatctggcatgctttttcttaaaatgagtttcaacttcaccaattttaccatattttttgaatttgagctcttagatgtccatattataagcttttttgtatatttcctatttcaaagttaataaatgtatacttttaaattccattatttagaaaacttccaatgctactggattgaattgatggtatttattatatttgaattgacttttcaactgtctcataatctctatttcttagttgaccaatctataaagactgatggtaatactgaccaagctaacaaaaatgctgtaagaaataattaatgatagcctgaaaagcaatttcataaatctcgatggcctttgtaatacctaggaacagtagaaacagagaacttttaaaagggtgcttagtggtacccaagagatcactcagtgactcaatgctttgctgttaccctacccaaatttcctcacacactagccccaagaaaatatgcagccaaagatgttcactaacttttaagattatgcttgggccattattgtcacagttgcaagttcaaattttattaccggttttcaagttcagagatgtctgtctgtagcttaagataccacttctcagcttgtgcaaacagctgtcgcagaagtaacacattggtataggcagtgttgatgagctcagattccacctcactatgaaccacagcttgtaatccattgaggacttcagagacttcatctatggtgaaggtgtcctccaccagcctgaaaaacaaccatgatccaaaacttatagaaaaacaacaagaaaaatctacaaaatacagcaaaattaagaaacccacattcatgtaatctaagaaattcaaagattacagtgaaaatctctctgggaactatcttctttattaataaacattgaaaataatttaaactcaattaatttttgacatctattcaaatgattaaattgtgcacatcctttaatacaagtaaatgctcaaacacattcccaaaaccatcatctacttttttaactttttagtattaaatgtcttatttcaaactccactgaaatcagtcttattacatttaataatttcaaaagtcacccggaaggcatagtctcatttctttctaatatttctctaacattttaataactgtatgaactattcacaggttagtaaacgtctatgggaaataaatggtaattatatatattgcttctctttgcattcttgagacccaaaataataataataataaaaactagcttatcttaaagttctactgaacactccacaaaaatgaatatcatcatcaacaatagcattagaaatctactctcagggccaggcatggtagctcatgcccgtaatcccagcactttggcaggcagaggcaggtggatcacttgaggtcaggagttcgagaccaatctggccaacacagcaaaaactcttctctattaaaaatacaaaaaattacctgggtgtggtggcacgtgccttaatcttagctacttaggaggctgaggcaggagaatcgcttgtaaccagaaggtggaggttgcagtgagccgacatcatgccaccgcactccagcctgggcgacaaagtgagactccgtctcaaaaaaacaaacaaaaaaacaaaactactcttacatagagaatgcttgggttggaagagaactttggtgccatcttctacaatcccctaactttacagataggaacacaggtttgaagagtggagatgacttgcctatggttacattggtggtgactaaaccccacaatcatcttcagcaatgattctgggcaaaggattcatgcccaacagctaaatccttgaaaaagcttctgtgtgtgccttccagtttcaatgacagtatcacagtaacacagtcctctcctctccctacctctaccctccaaagtcccttctccctcagattctcagcagatgaagagcagctaccgcaacctcagctttattttcttccctacttccaaaaagacatcatcaagcaagacccagttacacgaaagcattatcatagttaaactcaagttaatagtatttgttgtataattctttaatgtttcatctagccagcagaatttagtcattctcaaaaaaccacaactttttaaatataaatccttattaaaatattaataatctttctataatcttcaatagaacatatgttctcgccaattaaattgttgctttcatctgctgggggataggaaaccagattaccagatgagtttaatggactgaatggtctaaggctgatggcctctaatactgagacattcatgagtttatggcagctggagctcacttggaggtctttttcacttatatctgacttgacattcatctcttgctacaaatcagctacggtccaaccattatcatctcatgctagaaatcaactaacaattttggtactagtcagcattatgatttcctgctgttttcctctctactaattattcagtatgaaacacagaagtgttttctcactaattgccatgtcttatagctctaaccatttaattaataactcaagtaattaaagttctggaatcttcaatacaacaagccaatcattaatccacaaacccttggcaacttccttctcaaactctgccatcctacaattatcctacaattatcacatgcatttctgacaatagattcattgctttcaccacaatacaacttcttttgtttcctgtatccatgaggcttagtgtagctgctcttagcaaataattgatcatgatgaatcccagaaattgtctggcctctgctatggcacccccatactggctaccagaaagaatccatgttcctatttggtttgcttagagtcctcctctgatacctgctctccttgaggtcttggaagcaggaatctacagttttgagtctcaagcctctctttgaacgagcaaaacgcatataattaataacttcattttgatggtgctcatttaggcccaactctgcctgaaaaagaaagaggtaatttaattgttagttttgaagatctgatcaaagagccaacaatgaaaatgcataagatatcctgtggtcgagactgctagatctccatcaaattctattcttcccttcttcctggctgcatggctgcccacctagatgacacttccttgccctccttgcaatcaagtcactgctgactacttctcagcaatgaatgttgtggtctacttccaaagacctggtcttaagatatggggtgtacctctgcccctccctgtttctctgaaacctggaagaggtggcgacttgactgaatcatgcagacaacatcaatgccctagaggctgggggagccgcaagatgaaagggccccacgtctctacctcatggagaggcactgaccctctcactgaactgagatgagcagtgagatggctgttaagtgagagcgaaataaacttctgtattcttcaagccacttaaccttacagcaaaaaacagcaactctgttatagcagcttaacccttaccccattaaatacagctttaacaagtatatttgatttggaaagaaccactaactggtctgtactttaaaccagatgacagcttgacaaatatttaagaggcaagcccatggaggtagggctagcacccaaataacagagcaggtcagcagtcagctaagagcaaggcatcagccatgttagttggatttgtaattaagctgctgatgagatttacaaagcagtttaggtggcataagtctttaaggtctggaggatagaatggagatagcaagagttgaagggaagcaaaagggaaatctctaaggtactcaagtacaacaggttacagtcatatatgcacttgagttgtgaataacaagacagatttctattacacactaaaaataattgactacctacattagagacaatattatctctgatagtcacacattagtatgggcaagaatatcccacaatttagaaatatcacaaaacaatgtcacaatttgctaaaaacaaagcataaatacagattctttttttttagagacggagtctcgctctttcacccaggctggagtgcagtggcgcaatctcggctcactgcaagttccgcctcctgggttcatgccattctcctgcctcaggctcccgagtagctgggaccacaggcgcccaccaccacgcctgactcattacttgtatttttagtagagacggggtttcaccgtgtcagccaggatggtctcgatctcctgacctcgtgatccacctgcctcggcctcccaaagtgctgggattacagaggtgagccaccacgcccggcccagattcttaataattattcactgtctatagtattacatttacactctttgctctcccaaaacctcccaaactctcttaccctgtttcccaggattctactaaatgaacactctactttagccacactagtctgctcatcagtcctgaaacatgacttaaaatttcctgccttgactttcactcatgttactctgatcctaaagtatctctccattcctatttgagaatctgaatcctacccagtggtatgatggtaaatatttaacagcaggttttctaggtaggggggcctgatttgtagcactgctgatttccatggcataaatacttccatcatggctgatttcaagccaccaatataatgtcactgaatgaagaggtaagaagaaatgcatacaattggatctcaccagccagtacacacatgctccaccacatcactgaattcctacccacccttcatggcctaacctgtttcacctactctgtgccatctcccaatatgccctcagtaactctataggtatgccttcctccaaaacctagcatatataatctctgctacttctttggtaccgtcacaggctgattactacctcgtattattgattatcttttttttcaggtcttgctcttccaagtagattgtaaactctatgagggcatgaaccatttcttataatgcacaacacctagcatagtgccttgtgccagcaggtggccaattcctatctgttcattcctttccctcctttcaaggaaagttaagactgtcccaggaccaagaaggaaaaattactcaaactgagaagggtaaatgacagaaaagttcctttaaaatggattggaatgaagaaagggggtaaaagtggacagctgagttcaaaaggaaaaatagcatcagcctaggaaacggctattcacaaacctttacttccacacatatactatatgtatctatgtcaaatcattagagaggaaatggaataggtagatatgtggtataatagacaaagcactggattagaaaccaggtttaggtctagctatgcaactatctaccttggtaacagtctgttaccaagtcacttaaccccaatgacattagttttactatctgctaaatgagaggtagatatgatgatcagtcctaaaatggttagaaacaatgggaggtatccaagtggggaagtcagaatttgtttgaattttattgtagaaatattccgttaaaataataataaaaagagctgaaaacatacagcaagaaatcctgccagagcattgccaagctagtgtcttgaaattgtaccacaaattgtgtatgtgtgtttagggggaaggggatagaagagaaatgggtaaggtaccagaaagggttccctgttcttaaccatgcccacaaatccatatacaatttaagataagtacaaggaggaaactgtaatgataaaaatgagcacagtttaataatacctatcagatactgaatgcttaatattttcacaggtactgcactgtttacacgcattatcttacttatcatattaacagtcttgtgtagttattatctgcaatttactaatgaagaacctgagcctgattccaaagcctcagttgttaactgatggaaaggaatgacagaagatagaacaggaagagataccaatttttttgtgatttgttttcaacgtgttctcctgatattttagggaaatcaagagaatgagtggagaggctctaaactcaagaaggggagggagcaatctgtttagctcacaggtgtcttctcagctcccagacagcgcttggaacacagtgtggactaaatagaaattctggttgctgaagtatttcagtagctatttcaggtggtgctctcaaccctggtttcatccattttcctgaacacttcagtgctgtgcactgttctaagtatgactggtatttaagatggcatgctatattcgctggagggattaatgatattttttgagcaagccaaaacaaaggaaatgtcacccaaattcctcagctgtaatacggggtgctggaattcttaaagtcacctccacatcagaaagttggatttcaatcacacagaaagctggattcgttctccctgctcctctggttaccgcgcgcgcgcgtgtgtctgtgtaaaccttagagcttcctgaaactgagtgagaaccctgcgtatgtgttaatgtgtgtgtgtgcgtaaacttggagcttcttgaaatagagttaagaaccctgccgtgcaccttaggccggcagcagtttcctctatctctcctcacctgccacctaagagttgtgccttggctccagcccccgcaggcaggagagaaacgaagcgatgcggcggagctgggctgctgggaaaaggcttcacccaggattaccccagaagggcttgggctgcggttaaccgaatctctcgcgcccggcgcagctccccttctcagggaggctgaggtgcggccagacccaacgaggccacgtaatcattccgggcccacccgctcagtgtctccagccccggccgcgctctctcctgtgcgcggtgcggcgcctgagggtcggttactcaccatggcggcaggcagcggcggcagcctaaaggaacgggagaggccaggcggtgccccgccaagcctgggatcgccgagggtagttggaccacagaaaatggggaaggagggtaggttgtttagaagcctctggttgctaacggaaaccgaggcacgtggactgcaattatgcattttcattggtcctcaggatcacgcgacaggaagtattgcgtaaccggttgactgccacatgcgcattggcttccagggccggaagtcccacctttttgtgccagttcacttttgggagctgactgcagttgcagaaggtagcgggagggttgggctgcctggagttgcgtgtggccaccaacgcgcttcgcgcctcgtggcgtccgcttatggattgttgggaagttcttgtccagaacttcctgtggcataggtgaccccaaggatgaatggacatcccagacctttcaatggtctcatagggcgcggcccagacatttttttttttcaggagttcctacctgagcatcagggtggctgagacaggccaacaacaccaatgccagcaggttctcaaatagagcttcaaacgacccctccccatgactccgcccattattattactgtgttgttattatcttctcttatatttccagctaaaagtctctagcaacatttttccatttaaaaaaaatgcaaaaagcatgggttttctccgagagcagtgaatttcaaaaggttccatatgcctggaactactatggaagcttgttgaacaaattcctgggccttatctccagaaattctgattcacaagtctagcttgggtccttgggatctgcactttttaaccgatgttccaggagtgatcacagatcaggaccactcttagaaacactggcttggaaggacaagtgtaggatgagatcgattattgcaaataccagggactcagagtccttcactcacatgatacagaggtgatgtgcaggcatttgcccacagaaggatctcaagccttgggtcaagaacagtaaacaaggttctcctgtgtgtcacctggagcattccaatgcacggaatgatggcctgaaggcagtggcgtgggtatgcccaacttcagctttggctaggctccctacccttggcactgcaatggcatttgggcaggatccctgtcttcttgaaagattcctaagggcagattctctcaaccctgaatattaaccccttccaagctcagttaaacttcccctttaccatcccacctccccatttctgtttagtgagtgttgttgaatttggttgccattatttagtgcctactatgagctattaatagacacattccattccagtagttaatcctcataatacgtggttctttcctctgtagacattcgttgtgttcacatagtgagagggtcactttacaaggtgttgtgggtgcgagatgaagttcataaaaacttttatgactgatcagtaaacaaagttggtcatcagcttgcactgctgaaaagctcgtttattttctcccaggccaaatcttgtgattgcgaagtgttatcaattcaagggaatgaaaggagcgtgtgtataatgcaaatattacatttgtggcttggggattttaaaatttgttctgcaaaactccatcagctagttattgtaatttaaaattctgctttaatctaaaatcttctataccaaggaggttaatcaccattagccaatctacccaacagagttgagtgttgttacataagctgtctaaatagtgtcagcaaatctgaacatgaattttagtctcaaaagtgatgaatttggctcatgaaaaggctgaacttgtacttcaggttgtttactagtgcgggttggtcaccaaagcaaacaattcgagccgtgagggagaacagctccatcctactttactagtgatcttcttaggctctgtttttatttattttaattgctgtgacagttttttaaaatgtgtgtatgtgtgagtgtatgtgtgtgtgtaaatttggagggaggcacacaagtccattttttaccttttagcagagttcaacataaataaaatgaagataaattctttttatattattatgaaatgagacttatgactttataagttcccagtcatcatactaagaccaccagtttcagggtgtttgcaacctagacttggcaaaaggaggaatggaaagctgatcatggcctcctcagggatgccaacagattcactcattctgccactatttacagaacccctgttgtgtgcaaggttctgtggccatgatagtgagtctgaggaaaaaatctgaggggaaaatctgagggaagaagtggagggactcagaaagccccagctgcccctgcactataaattttggggggatgcagggggactaaggtgaggctttacttaagtagaaagaggaaatgaagaaaatgattaagtaaaaaaaaaataggtgatacacagaaaatgtaaaaatctgaaaggttatatgggaaagagaaaagtttgataaatattgaactggtagtaggtggaaaataggggaaattattttaggacattattcttaagaagacaggatctttgcagcatggcttcttgcatgaagttctaccatacaagttctcttcaacttccccatcttgccccaccttggctgctgagaaagtagccaagaccttatagaagagaagggcccagattacagggctctttacaggagatatgcatttgagtaggcctgaagtaggcaagaggctattttcagttgctttcaaaacaccctagtgaccagcagggtattggagagtgctgacaaactagattagtgaaatcactatcacatgcattaaagcaggtcaagcaaggaagtggttcaccataaaatacaactccctctaagaatgtgtggatgttggcaattacttagcccaaatgatagattagtttcactgataatctcaatgcattaacaacaccccaaagggaacaaacaccgaaaccatcaaaatgagaagtctacctcaaaaaattttaagaattggttgtggggaataccttctggtaaagtacaagaaaaattgattgtaaagatgatgatacgcaccagctcctctttccatactcccttatgcatatacatttcagttaaacccacaagctcagtctgtatattcagcagctgttaatggaaatctggatactcgcaagacacaatggggaagggaataatgaacaagatgggattggtctctttcaaaaatggccttataatcaagtgaagggagaattcaagcttgcagaataatttcaaagtagacagtaagtagtagggtagttcagagagggtgcgagatagttcacttctgttgaggctggagaggagagattcagaaaagtcttccagaaggcagtggaatttgggctaggttttaacaggagtgtggaaaagttggggatgagtgtgatgatcgtgaaagtgagagttgtcttggacagggaaccagaattttcatcaggtgctgcagtagaagtgtacagagatggacatgaatcagtattacaagtggcaaactacaaaaagagatatactgacagcttatacaaggatggagcacctttaagagtgtcttattcagaaatgtgggtcttcctagatctgtggtcttcactaaatgtttccatggacttctggcaatgtaagggtgttcaccaattgcatttcatcatagaaaatgtaaacaaaaaattaaatttgctcagaaagttttgcctacaaagctggggctgtgtagtcctattggaagagctgaatagctgtgtcatgaatagctgtgttcatgactggaagttttctcaatgggatggataaataaaatatgaaaaataaagtgaactcaaacggaaatgtcatttttagccagcttatatgagtttgtcttcccaactactatgttgcaagctccttgaaggaagaaatatttattatataataacatagtatggctgggctataagaagctctgagctatgcttgcagaattaaattggagataaacaggaacatctcaacaaacatttgtgagttcctactgggttccagatactgtgtttgtgggttgcttttggccctggacatgccctctcttggaaagcatatcataaggcagcagacatattcagctatccctgtttcccatgttaaatgtaactttgaggtgatttatataacttttaggagtttttgagaatgaattatttagttctcatgacttaacccttatgtttttatataactactgtttgagttctactttgacttaatgctacactttgaagacattccataaaacaattactaatttatattttgtggtttcttttaatattttgagcccaagcatttacagttgctccttgaacaacacaagggataatggtgctgaccccatgcacagtcaaaaatccacatataacttttgactcccccaaaactgaactactaatagactgctgttgactggaagccttaccaataacataaatagttcatgagcatacattatgcattatatgtattatatactatattatttccataaagtaagctagagaaaagaaaatactagaaaatcataaggaagagaaaatatatttactattcattaagtggaagtggataatataaaagtcttcattttgaataggttgaggaggaggaggaagaggagaggttggtcttgctgtctcgggtggcagaggagaaagagttggaggaggtggaaggggagtcaggagagaaaggcacactcggtgtaactttatggaaatgcataatttctgtctgactttttcttttttgtttatctaaaaatgtttctacgtggtaccagtccttcttccgccatttgcatgtttcagtgcctgcataatagaagggtccatgtcataaaagaagtcaaaatcagtcttgaataattgaaaccattcttccagattgtctaatgtcaatgtgttttctggcactacttctacatctttctcattatttggcactggttcggaagcacttatctccatcaacttgtgttcagctaattcctctggtgtggtgtctattagctcttgaatctttctccaagattcacaccttgaaaccctttgcccctgttcttattttgcatatctacaatctctttcatggtttccttgtttggctgatgcacaacatccagacacagttttctccagctattgtttcagggttgatggctttcatggcttttcctgtagcaaagatgacatctgcagtggtgtgtaatctttccagacctccatgatgttgtctccgctggggttctcctccacagcattgacaatcctttccataaagaaccatgtgcaatgagccttaaaggtccttatgacccccgatctagaggctgaattatagacattgtgtttgggggcaagtagaccacttcaacacctttgacatggaactcatggggttttgggtagccaggggcattgtccaatataaaaagaaaactttaaaagtcagtcccttactggaaaagtacctcctgacttcatggacaaaagcattgatggaactaatccagaataagggtgcttgttgtccaggtcttcttgtacaaccaaaagattggcagctggtgttcacctttttccttcaaggctcagagattgcagctttatagacaagagcagacctgatcataaacctcactgcatttgcacaaaacattggagttagataatcctttcctattacattttggtgctcatttctcttctttatgaataaatgtcctttgtggtatcttttttcccagaatggggcattttcatctgcattaaaaacctgtttaggcagctatcctttctcttcaatacttttcttagtggtgtcttgaaactcacctactgcctcttagttggcagaagctgccaactaagatatttttaaagccaaacctctttctaaaattatcgacccatcctttgctggcactaaattctctggctttagatccttcatcttcctttttctttaagttttcatatatgacttcactttttctcaaactatattagagatgcctttcttagagcaatcctatacccacataaaagctgcatttttaatacaagataaaaaggtagttcaccaaaagtacaaggtttttgcagcagcttgagtagatgcagtgacgccttcatgaatttccttttcttcttttttacaatggtccttatgctggagggcagctgcagctgcagacctaaatctatggtacatatcaagtaattcaactttttcttgtaatatcatgactttgcttactgggagtacttccagcatcattagtgacactttgtatggatcccatgatgttatttaaggcttacagtattgcgctacacacaaaatatgcaagaactgctggaaatcacttttttactatgacacataatttactggagagatgaactgctcaggtggagataattagcctcatagctattttaagctgatacttgaaacacttgagctcattgcactagcaacaagaggtggctacaaaattattacattagtacaaagtgtactacagttaattgtatgcagttatgatttaatactgcatctttatgtttgtttacatttctctctgctgtgaatggtgccatgtggtctctaagtgtttctgttcataagttttgataaattttatatttttgtaatagatttgtgtatattttagggtagtgaattataaaatagaccaacctttacatatattttatgcattaattaaaatccgaattttttgatatttccgtgagttttttcaaatagtcaaaaatctccaaaaatttttccaatatattaattgaaaaatatccatgtataagtagacctacacagttcaaaccaatgttgttcaggtgcaactgtgtatttctgatttcaaacatttttataggccatcggccctgtgtctaaagtgtctatcggttgttgggagaacaaagatgaagtaaggtccctgctctcaaggatgctaaccatccagcaggacagacggacccattagaggatcatgtcatgtcaacataatgtgatcaccttttaggaaaccaggcaaggggcacttagctcaatttagggtttcagggaaagctttgaggaaaatccctgaattgaaccttcagggattagcaaatgttagcctgggagaagcaaggcagaaaggacagagggaacatagcaaacacgggcaccaatacctgaaacagcccagcatgtggactccttacaaacgctaagagattaaatgttagatgagcttttacttttagaagtcaatattgccaaaatgtcactgctttgctaaaaatattaagcaggaaatgaatgacctgggcagggaaaaaaataactgaacacactaaaacccagggtgatataaagaaaagttacatatctggtctagtgctaccattgaagctaagacaccaatctaagggactagtgttaagctaattggagaatgtctttctaggaatggagggaatttatctgacttccacccggtcagcctgcaaaactaacccaagtacagggatagcagaaacgtggtaagaatgtcttcattaaatcatccacaaaaaagactgtggagaataactttgaacagctaacatacacagaactgatacttttcgtgtatagaattgaagataaatggttcccagttgttcttatgtgatataatttggttttattttaaaatagtgagactgaatataaaccagaagacaacatgaacttaaatatctgcatatataaggcagaaaaaatttgcattttaagagatttaatgtatgaatttctatacttgattttgtgtaagagaagccgtgaaaaccatggagatagttgtttttactaggatcgctgtcgtgtccacataagaaggttctatttgtgtgttgagagatttttccatgtgcccattgtatttgttacttagaatttacaatattttgaaaactttccccttcaaaatggatatatattttaaaaccttctacaatgtgagtaattatagtttaattgattgcatatttactgtgttccagtaatacatgtttcatgtctaacatgctatgtttaatcctcaaacagcctcatgagatgcatactatgattactcttatttgtgaagagagaatggaggctaagtgaatgtaggtaacttttacaaggtcatgtagtgagtcgatggaaggacatgcatgagtatgcagaggctaccagccagatacacagtctccccactccctgcagaatggagggacttgatggtctcactctcacacctcctccccgcagcaccaccatggagaggcaccagtacaccttcactgggaagctccatgtggaccattccttccttttatccattctcggatgccctgattcctaattcccttgattcacattcaatcatttcagtgtccccaaattgcctgatagaaatcctaatcaacacttttcctctccagcttccagtgactgccttgtgggattcacaatatatttcttgatgtcctgagatcatcagctttttcctcaaacactccttaccaaagaggaagcttccttctctccaccctctccctcccaacacctgtacctatgggtggctggtagtctgtgcgtccttcacagtcacctcctgacccttgagtgaagccagccgctcaaccagccctccctcaatgaagctcttgtttcttgctctgctgctccctcttctccatcaacccttcagcatccagaacattcactcattcaagcatactcaatcaggccttgggatttctgcaggtgacctgcagaatggctccaccctatcttgccatccctgatacatgacccacatagcacccctttgtcatggctttacctgctgttcttcagaaaccttcagctccaattcacttcaggacctgtctgctccccacaccccatcatagccagcagctgttccacgccttgttgaaattttgaactcggaaatgcttctcgctaatcatcaccaactctctgaccactgctctaactctctcactccccttaaaccttgcctctaacttgattgtgatttagctgtgatttttttttttttttttttgagatggagtctagttttgtcacccaggctggagtgcagtggcatgatctcggctcactgcaacctccgcctcctgggttcaagcgattctcctgcatcagcctcctgagtagctgggattacaggcacctgccaccacgcccagctcagttttgtacttttagtagagacagggtttcactgtgttggccaggctggtctcaaactcctgacctcatgatccgcccgcctcggcctcccaaagtgctgggattagaagagtgagccaccgtgcctggccagctgtgatcttcgaaacttctattttcttctagcccatcagtccttctctttgactcatttctctttggtctcaagtcaaacctttgtgcaatcatttaactatgagaagtttctatttctcaccagaccactcaattttaatatactgatggattccaaccttaaatttttcccagccaggtgcggtggctcacacttgtaatcccaacactttgggaggctgacgcgggaggatggcttgagcctaggaagtgaaggctgaagtgagccatgatcacaccactgcactccagcctgggtgaccctgtctctcattttttttttgttcttgttcccaaactagagaagtcacataactaactatattgacttcataaaaactttttgacattttttccccaattttctctgggctttttagatgcctggacattgtgggtcagctcctgctccactccacccaagtggctatctcctaaagcattcctagtcctgacacgttcatctccctcccttctcttaaatcttaacatatgatcctcctgctacttttctagaagggaagttcccttaatatccctaaccttctgctcaaagaaagtacctttatctataagcaaggaaatatttaaagagtattaacactcagtagtgtctggggcatgaggaaaaaggcactcttaaaaactgttgataggaggataagctagtatgacattttttggaggacagtctggaaattgtcatcaaaactgaaaaggtacacaccctttaagccagcaatttgccttcacttctaagaatttatttaagaaacaacaagaccacaaagatgtatgtacagagatgtttacagcagctttttctgtggtaaaaagtcttgagatagtttaaatgatcctcttatgggggactgactaaatgaattatggagcaataaaagagtagttttctgtagccgtcaaaagaacaaggaagaatccatgtgcacggacatggaaaaatttccatagtatatagtgaaaagaaaaaaagtcaagttggagaatagtaagatcccatttttataaacacacatacatgcaaatttggaaaggtaaagcaataaattcctcacatcaaaatgtgggaagaggtgctagagtggcagtagggatgggaggtggttgatccctactttatatatgtctgtaacttgaatttatttcttaagcagacaggcattacttttacagtttaataatgaaaagagaaaacaaaaggtaagacaaaagcagcttttgtcactttttccattgttttatgtgctcaccccaatcaaggcaccttctttctaagagccagtatttatttctgttctctttaaatcagaagttaggcagacatttcaggccatgagacctagattggaaaccactcaaaggaacatgccctttcctcttcaaacactgttaccaacatttagatactttcattttggttgcagcccactatttttagctttttcttctttttttctccagatggctgaagagaccgaggcctttcacactgaaggtggggtaggtggaacagatggaagggctttacctgtggtcgattaattgtttcataacccttttcatgagctttctttgagcaggcatgcttggttttggtaaagtcctgtcaaaatttctttgatttgaattagatgtactgggcaggtcccattcagatattt

SEQ ID NO: 23958 - DNA, 2052 bp, Homo Sapiens
atgaggcgctgcccgtgccgtgggagcctgaacgaggcggaggccggggcgctgcccgcggcggcccgcatgggactggaggcgccgcgaggagggcggcggcggcagccgggacagcagcgacctgggcccggcgcaggggccccggcggggcggccggaggggggcgggccctgggcccggacagaggggtccagcctccacagcgagcctgagagggccggcctcgggcctgcgccggggacagagagtccgcaggcagaattctggacagacggacagactgagcccgcggcagctggccttggagtagagaccgagaggcccaagcaaaagacggagccagacaggtccagcctccggacgcatctagaatggagctggtcagagctggagacgacttgtctttggacggagaccgggacagatggcctttggactgatccgcacaggtccgacctccagtttcagcccgaggaggccagcccctggacacagccaggggttcatgggccctggacagagctggaaacgcatgggtcacagactcagccagagagggtcaagtcctgggctgataacctctggacccaccagaacagttccagcctccagactcacccagaaggagcctgtccctcaaaagagccaagtgctgatggctcctggaaagaattgtatactgatggctccaggacacaacaggatattgaaggtccctggacagagccatatactgatggctcccagaaaaaacaggatactgaagcagccaggaaacagcctggcactggtggtttccaaatacaacaggatactgatggctcctggacacaacctagcactgacggttcccagacagcacctgggacagactgcctcttgggagagcctgaggatggcccattagaggaaccagagcctggagaattgctgactcacctgtactctcacctgaagtgtagccccctgtgccctgtgccccgcctcatcattacccctgagacccctgagcctgaggcccagccagtgggacccccctcccgggttgaggggggcagcggcggcttctcctctgcctcttctttcgacgagtctgaggatgacgtggtggccgggggcggaggtgccagcgatcccgaggacaggtctgggagcaaaccctggaagaagctgaagacagttctgaagtattcaccctttgtggtctccttccgaaaacactacccttgggtccagctttctggacatgctgggaacttccaggcaggagaggatggtcggattctgaaacgtttctgtcagtgtgagcagcgcagcctggagcagctgatgaaagacccgctgcgacctttcgtgcctgcctactatggcatggtgctgcaggatggccagaccttcaaccagatggaagacctcctggctgactttgagggcccctccattatggactgcaagatgggcagcaggacctatctggaagaggagctagtgaaggcacgggaacgtccccgtccccggaaggacatgtatgagaagatggtggctgtggaccctggggcccctacccctgaggagcatgcccagggtgcagtcaccaagccccgctacatgcagtggagggaaaccatgagctccacctctaccctgggcttccggatcgagggcatcaagaaggcagatgggacctgtaacaccaacttcaagaagacgcaggcactggagcaggtgacaaaagtgctggaggacttcgtggatggagaccacgtcatcctgcaaaagtacgtggcatgcctagaagaacttcgtgaagctctggagatctcccccttcttcaagacccacgaggtggtaggcagctccctcctcttcgtgcacgaccacaccggcctggccaaggtctggatgatagacttcggcaagacggtggccttgcccgaccaccagacgctcagccacaggctgccctgggctgagggcaaccgtgaggacggctacctctggggcctggacaacatgatctgcctcctgcaggggctggcacagagctga

SEQ ID NO: 23959 - DNA, 5780 bp, Homo Sapiens
atgtcggataccaaggtaaaagttgccgtccgggtccggcccatgaaccgacgagaactggaactgaacaccaagtgcgtggtggagatggaagggaatcaaacggtcctgcaccctcctccttctaacaccaaacagggagaaaggaaacctcccaaggtatttgcctttgattattgcttttggtccatggatgaatctaacactacaaaatacgctggtcaagaagtggttttcaagtgccttggggaaggaattcttgaaaaagcctttcaggggtataatgcgtgtatttttgcatatggacagacaggttcgggaaaatccttttccatgatgggccatgctgagcagctgggccttattccaaggctctgctgtgctttatttaaaaggatctctttggagcaaaatgagtcacagacctttaaagttgaagtgtcctatatggaaatttataatgagaaagttcgggatcttttagaccccaaagggagtagacagtctcttaaagttcgagaacataaagttttgggaccatatgtagatggtttatctcaactagctgtcactagttttgaggatattgagtcattgatgtctgagggaaataagtctcgaacggtagctgctaccaacatgaacgaagaaagcagccgctcccatgctgtgttcaacatcataatcacacagacactttatgacctgcagtctgggaattccggggagaaagtcagtaaggtcagcttggtagacctggcgggtagcgaaagagtatctaaaacaggagctgcaggagagcgactgaaagaaggcagcaacattaacaaatcgcttacaaccttggggttggttatatcatcactggctgaccaggcagctggcaagggtaaaagcaaatttgtgccttatcgagattcagtcctcacttggctgcttaaggacaacttggggggcaacagccaaacctctatgatagccacaatcagcccagccgcagacaactatgaagagaccctctccacattaagatatgcagaccgagccaaaaggattgtgaaccatgctgttgtgaatgaggaccccaacgcaaaagtgatccgagaactgcgggaggaagtcgagaaactgagagagcagctctctcaggcagaggccatgaaggcccctgaactgaaggagaagctcgaagagtctgaaaagctgataaaagaactaacagtgacttgggaagagaagctgagaaaaacagaagagatagcacaggaaagacaacgacaacttgaaagcatggggatttccctggagatgtccggtatcaaggtgggggatgacaaatgctacttagtcaatctgaatgcagaccctgctcttaacgaacttctggtttattatttaaaggatcacaccagggtgggtgcagatacctctcaagatatccagctttttggcataggaattcagcctcagcactgtgagattgacattgcatctgatggagacgtcactctcactccaaaagaaaatgcaaggtcctgtgtgaacggcacccttgtgtgcagtaccacccagctgtggcatggtgaccgaatcctatggggaaataatcacttttttagaataaacttacctaagaggaaacgtcgagattggttgaaagactttgaaaaagaaacgggcccgccagagcatgacctggatgcagccagtgaggcttcctctgaaccagactataactatgaatttgcacagatggaagttatcatgaaaaccctgaatagtaatgacccagttcaaaatgtggttcaggtcctggagaaacaatacctagaagaaaagagaagtgccctagaggagcagcggctcatgtatgagcgggaactggagcaactccgccagcagctctcccccgacaggcagccacagagtagcggccctgaccgcctggcctacagcagccagacagcgcagcagaaggtgacccagtgggcagaagagagggatgaactcttccgacaaagcctggcaaaactgcgagagcagctggttaaagctaataccttggtgagggaagcaaacttcctggctgaggaaatgagcaaactcaccgattaccaagtgactcttcagatccctgctgcaaacctcagtgccaataggaagagaggtgcaatagtgagtgaaccagctatccaagtgaggaggaaaggaaagagcacccaagtgtggaccattgagaagctggagaataaattaattgacatgagagacctttaccaagaatggaaggaaaaagttcctgaggcaaagagactctacggaaaacgaggtgaccctttctatgaagcccaagaaaatcacaacctcatcggggtggcgaatgtattcttggaatgcctcttctgtgatgtgaaacttcagtatgcagtccctatcatcagccagcagggggaggttgcagggcgtctccacgtggaagtgatgcgtgttacaggagctgttccagagcgtgtggtggaggatgactcttcggagaattccagtgaaagtgggagccttgaagtcgtagacagcagcggggaaatcattcaccgagtcaaaaagctgacatgtcgggtaaaaattaaagaagcaacggggctgcccttaaacctctcaaattttgtcttctgtcaatacacattctgggaccagtgtgagtctacggtggctgccccggtggtggaccccgaggtgccttcaccacagtccaaggatgcccagtacacagtgaccttctcccactgtaaggactatgtggtgaatgtaacagaagaatttctggagttcatttcagatggagcactggccattgaagtatggggccaccggtgtgctggaaatggcagctccatctgggaggtcgattctcttcatgctaagacaagaacactgcatgacaggtggaatgaagtaacgcgaagaatagaaatgtggatctccatattagaattgaatgagttaggagagtatgctgcagtggaacttcatcaggcaaaagatgtcaacacaggaggcatctttcaacttagacagggtcattcccgtagagtacaagtcacggtgaaacctgtgcagcattcagggacactgccacttatggttgaagccatcctgtcagtatccatcggctgtgtaactgccaggtccaccaaactccaaagagggctggacagttaccaggaagaagacttaaactgcgtaagggagaggtggtcagatgcactcattaaacgacgagaatacctggatgaacagataaaaaaagtcagcaataaaacagagaaaacagaggacgatgtggagcgggaagcccagcttgtggagcagtgggtagggctgactgaggaaaggaatgctgtgctggtgccagccccaggcagtgggattcctggggcacctgccgactggatcccacctcctggaatggaaacccacataccagttctcttcctcgatttgaatgcggatgacctcagtgccaatgagcagcttgttggcccccatgcatccggcgtgaactccatcctgcccaaggagcatggcagccagtttttctacctgcccatcataaagcacagtgatgatgaggtttcagccacagcctcttgggattcctcggtgcatgattctgttcacttgaatagggtcacaccacagaatgaaaggatttacctaattgtgaaaaccacagttcaactcagccaccctgctgctatggagttagtattacgaaaacgaattgcagccaatatttacaacaaacagagtttcacgcagagtttgaagaggagaatatccctgaaaaatatattttattcctgtggtgtaacctatgaaatagtatccaatataccaaaggcaactgaggagatagaggaccgggaaacgctggctctcctggcagcaaggagtgaaaacgaaggcacatcagatggggagacgtacattgagaagtacactcgaggcgtgctgcaggtggaaaacattctgagtcttgaacggctccggcaggccgtcacagtcaaagaagcactttccaccaaagcccggcacattcggaggagcctcagtacaccaaatgttcataatgtctcttccagccgaccggacctttctggctttgatgaagatgacaagggttggccagagaaccagttggacatgtctgactatagctccagttaccaagatgtagcatgttatggaactttacccagggattctcctcgaaggaataaagaaggttgtacatcagagactcctcatgccttaaccgtcagcccttttaaagcattctctcctcagccaccaaagtttttcaagcccctaatgcctgtaaaagaggagcataagaaaaggatagccctggaagcaaggcctcttctaagccaggaggactctgaggaggaagaaaatgagctggaagctattaacaggaagctaataagttcacagccttatgtacctgtggagtttgctgacttcagtgtttacaatgccagcttggagaacagggaatggttttcctctaaagtagatctgtcaaactcacgggtcttggagaaagaagtgtcccgtagccctaccaccagcagtattaccagtggctacttttcccacagtgcctccaatgccaccctgtctgacatggtggtcccttctagtgacagctcagaccagctggccattcagacgaaggatgcagactccaccgagcactccacaccatcgcttgtgcatgatttcaggccgtcctcaaacaaagagttgacagaagtcgaaaaaggcttggtaaaggacaagataattgtggtgccactcaaggaaaacagtgccttagccaaagggagcccatcatcccagagcatccctgagaaaaactccaaatcactgtgcaggactggctcatgttcagaactagatgcctgccccagcaaaattagccagccagccaggggattctgccccagggaggtgacggtagaacacaccaccaacatccttgaagaccattctttcacagaatttatgggagtgtcagagggaaaagattttgatggtttgacagattcttctgctggagagctttccagtaggaggagtctaccaaataaaacaggcggcaagactgtctccgatgggctccaccaccccagccagctgcattccaagttagagaatgaccagggaggcacaacctcacggtgagagcagcaagcacccttcctcaggccacagcttggcgtctttgttcgcctggtcaccttgggcaagcaccagccccatctctaaaacatgctgccgcctggctggacctcagaccagaagctggagaatccacaccgtgcacttcctgggccacctcctttcccctccccagtgggagaagcggcactttgtcacttgggtgaatcaacagcctctgctttttccagaaagcaagagaactgaaaatcctggattaactaagtgacagtattttttttttgcacttactacacacctccactgtatagaaacctctacagattccaacagactttattcttgtacaattttaatcagttcttactgtagaatctggagtcaatgctctaatctgttttttataaataatatatattatgtatatgaaatgtgtatctatagtatgtctggagacagacaaggctgcacactaaaatgcagataaaggtgatttgtagaaaatcaaaaaaaaaaagaaaaaaaaaaaaaaa

SEQ ID NO: 23960 - DNA, 7925 bp, Homo Sapiens
cgccagcccggtcaggcctcggcgcggcctacacgctccgctcgctcgctcgctcccgcctcccgccccgcgcccggccatggcggagccgtcgtccgcccgacgcccggtgcctctcatcgagtcggagctgtacttccttatcgcccggtacctatcggcgggcccgtgtcggagagcggcccaggtgctggtgcaggagctggagcagtaccagttgttgccgaagagattggactgggagggcaacgagcacaacaggagctacgaggagttggtcttgtccaataagcatgtggctcctgatcatcttttgcaaatctgccagcgcatcggtcctatgttggataaagaaattccacccagtatttcaagagtcacttctttacttggtgcaggaaggcagtctttgctacgtacagcaaaagactgcaggcacacagtttggaagggctctgcctttgctgctcttcatagaggaagacctcctgaaatgccagtgaattatggttccccaccaaatcttgtggagatacatcgaggaaaacaactcacagggtgttccacttttagtacagcatttccaggaactatgtatcagcatataaaaatgcacagaaggattctcggacatctatctgctgtttactgtgtagcatttgataggacaggacatagaatctttacaggttcagatgactgtttggtaaagatttggtcaacacataatggccgcttgttatctacattaagaggtcattctgcagaaatttcagatatggcagtaaactatgagaatacaatgattgctgcggggagctgtgataaaattattagagtgtggtgcttgagaacttgtgccccagttgctgtgctccaaggacacacaggatcaattacatctttacagtttagcccgatggccaaaggctctcaaagatacatggtttccactggtgctgatgggacagtttgcttttggcaatgggatttagaatccttaaaatttagcccacgtcccctgaagttcactgaaaagcctaggccaggcgttcaaatgctttgttcttcttttagtgttggtggtatgtttttagccacaggtagtactgatcatgtaatcagaatgtattttttgggttttgaagcacccgaaaaaatcgcagaacttgaaagccacactgataaagtagatagtatccaattttgtaacaatggtgatcggttcctaagtggtagcagagatggaacagcacggatttggagatttgagcagttagaatggaggagcattttattggatatggctaccagaatctcaggggacttatcttccgaagaggaaaggtttatgaaacctaaagtaacaatgatagcttggaatcaaaatgatagcattgttgtcacagctgtgaatgatcatgtcctcaaagtgtggaattcttacactggacaactgcttcataacttaatgggacatgctgatgaagtatttgttctggagacacatccctttgattccagaattatgttatctgcaggacatgatggcagcatatttatatgggatattacaaaaggtaccaagatgaaacattattttaatatgattgaaggacaaggacatggagctgtgtttgactgtaagttttcacaggatggacagcattttgcctgtacagattctcatgggcaccttctgatatttggttttggatgcagcaaaccatatgaaaagattcctgatcagatgttcttccatactgactatcgaccacttattagagattctaataattatgtcttagatgagcaaactcagcaggctcctcatcttatgcctccaccattcttggtagatgtagatggaaatcctcatccaaccaagtatcagagattagtaccaggccgagaaaattctgcagatgaacatttgattccacagctgggctatgtggcaacaagtgatggagaggtgattgaacaaattataagcctgcaaaccaatgataatgatgaacgcagcccagaatcgagtattcttgatggaatgataagacagttgcagcagcagcaagatcagagaatgggagcagatcaggatactattccaagaggactttcaaatggtgaagaaacaccccggagaggttttagaaggctgagcttagacattcagtcccctccaaatattggtctgcgtcgtagtggacaagttgaaggtgttcgtcagatgcatcaaaacgctccacgcagtcagattgctacagaacgtgacctgcaggcttggaaacgaagagtggttgtaccagaggtaccactaggcatatttaggaagctggaagacttccgattagagaaaggtgaagaggaaagaaatctttatataataggaagaaaaagaaagactcttcagctctcacataagtcggattcagtggttttggtatcacagtctagacaaaggacatgtaggcgtaaatatccaaattatggtagaagaaatcgtagctggcgtgagttatcttctggaaatgagtcttcaagctctgtaagacatgagacttcctgtgatcagagtgaaggttctggttcttcagaagaggatgaatggagaagtgacagaaaaagtgagagttacagcgaaagttcaagtgactcttcatctagatattccgattggacagctgatgcgggcatcaatttgcagcctcctttaagaacatcatgtcgtcgacgaattactcgattttgtagtagttcagaagatgaaatatctactgagaatttatctcctccaaaaagaagacgaaagagaaagaaagaaaataagcctaagaaggagaatttgcggaggatgactccagcagagcttgcaaatatggagcatttatatgaatttcaccctccagtttggattactgacaccacacttagaaaatctccttttgttcctcaaatgggtgatgaggtaatatattttcgacagggtcatgaagcttatattgaggctgtaagaagaaataatatttatgaactgaaccctaataaggagccatggagaaaaatggatcttagggatcaagaattggttaaaatagttggaatacgatatgaagttgggccccctacactctgttgcctaaaactagcatttatagatccagcaactggaaaacttatggacaaatctttctctattagatatcatgatatgccagatgttattgactttcttgtattgcgtcaattttatgatgaagcaagacagaggaattggcagtcttgtgacagattccgctctattattgatgatgcttggtggtttggaacagtgttaagtcaagagccatatcaaccacagtatcctgatagtcatttccagtgttatattgttaggtgggataatactgaaattgaaaaacttagcccatgggacatggaaccaattcctgataatgttgatccacctgaagaattaggagctagtatttctgtcacaacagatgagctagagaaattgctctataaaccacaagctggtgaatggggtcagaaatcaagagatgaagaatgtgatagaattatcagtggtatagatcaacttttgaatcttgatatagcagcagcttttgcaggccctgttgatttgtgtacatacccgaagtactgtactgtagtagcttatccaaccgatctttacacaattcgaatgagacttgttaatcgattttacaggaggctgtctgcgttagtttgggaagtcagatatatagaacataatgccagaacatttaacgaacctgagagtgtaattgcaagatcagctaaaaagataactgaccaacttttaaaatttatcaagaatcaacactgtacaaatatctcagaactttctaacacatctgaaaatgatgagcaaaatgctgaggatttggatgatagtgatcttcctaaaacatcttctggaagaaggagagtccatgatgggaaaaaaagcatcagagctacgaactatgttgaaagcaactggaagaaacagtgtaaggaactagtgaacttaatttttcagtgtgaagattctgaaccatttagacaacctgttgatttggttgaatatccagactacagagatattatagataccccaatggattttggaacagtaagggaaactctagatgcgggaaattatgacagccctttggagttttgcaaagacatccggctgatatttagcaatgcaaaagcgtatacaccaaacaaaagatcaaagatttatagtatgaccttgagattatctgccttatttgaagaaaaaatgaagaaaatctcttctgattttaaaattggtcaaaaattcaatgaaaaacttcgaagaagccagaggttcaagcaacggcaaaattgtaaaggtgacagtcagcctaacaaaagtatcagaaacctcaagccgaagaggttaaaatctcagacaaaaataattcctgagttggtaggttctcctacccagtctacctcaagtaggacagcttatcttggaacccacaagacaagtgctggtatctcttcaggtgttacttctggtgactcttcagattcagcagaaccatcagaaaggaggaaaagaaatagacctataacaaatggttctacattatctgaaagtgaagtggaagattctttagctacctctttgtcatcgtcagcttccagtagttctgaggaaagcaaagagagttccagagctcgtgaatcctcctcacgcagtgggctatccagaagcagcaatctcagggtaaccagaactagagctgctcaaagaaaaactggtcccgtttcattagcaaatggatgtggcagaaaagccactcgaaagagagtctatttaagtgattctgataacaattcattggagactggtgaaattctaaaagccagagctggaaataaccgaaaagtcttaaggaagtgtgctgctgtggctgccaataaaataaagctaatgagtgatgtagaagagaattctagctctgaaagtgtctgttctggtcggaagctgcctcaccgcaatgcttctgctgtagctagaaaaaagttattacataattctgaagatgaacagagcttaaagtcagaaattgaagaagaggagctaaaagatgaaaatcaaccattaccagtgtccagttctcacactgcccagagcaatgttgatgaatctgaaaacagagactcagagtcagaaagtgatttgcgggtagcccggaaaaattggcatgctaatggttacaagtcccatactccagcaccttcaaagacaaaatttcttaaaatagagtcttctgaggaagactctaaaagtcatgattcagatcatgcatgtaacagaactgctggcccatcaacgtctgtgcagaaacttaaggcagagagcatctcagaggaagcagattctgaaccaggaagatctggtggtaggaaatacaatacatttcacaagaatgcgagtttctttaaaaaaaccaagattctgagtgactcagaagactctgaatctgaagagcaagatagagaagatgggaaatgtcataaaatggaaatgaacccaatttcaggaaatctgaactgtgaccctattgctatgtcccagtgttcctcagatcatggatgtgaaactgatttagattcagatgatgacaaaatagaaaaaccaaacaattttatgaaagattctgcatcacaagacaatggactaagcagaaaaatttccaggaaaagggtctgttccagtgactcagacagtagtttacaggtggttaagaaatcatcaaaagccagaacaggtctcctgaggattactcgaagatgtgcagctacggctgccaataagatcaagctcatgagtgatgtagaagatgtcagtttagaaaatgtgcacactagaagcaaaaatggaaggaaaaaacctctccatcttgcttgtactacagctaagaagaaattgagtgattgtgaaggaagtgtacattgtgaagtaccaagtgaacagtatgcctgtgaaggcaagccacctgatcctgactccgaaggtagtacaaaagtgcttagtcaggctctaaatggagactcagactctgaagatatgttgaattcagaacacaagcacaggcataccaatattcacaaaatagatgcaccttctaaaagaaaaagttcctctgttacatcttcaggagaagattcaaaaagtcatattccagggagtgagactgataggacattttcttcagagtcaaccttggcacaaaaagctactgcagagaataattttgaagtggaactgaattatgggctgcgcaggtggaatggcagaagactcaggacctatggaaaggctccttttagtaagacaaaagtgattcatgattcacaggaaacagcagagaaggaagtaaaaaggaagagatcgcatcctgaattggaaaatgtgaaaatctctgaaacaactgggaattcaaagtttagacctgatactagttccaaatcatcagatttgggatctgtaactgaatcagatattgactgtactgataatacaaaaaccaaaaggaggaaaacgaaaggaaaagcaaaagtagttagaaaagaatttgttcctagagacagagaacccaatacaaaagtgagaacatgtatgcataatcagaaggatgcagtgcagatgcctagtgaaactctgaaagcaaaaatggtacctgagaaagttccccgcagatgtgctactgttgctgcaaataaaataaagataatgagtaatctaaaagaaacgatctcaggaccagaaaatgtctggattaggaagagtagcagaaaactgccccatcgaaatgcttctgctgcggctaagaaaaaattactgaatgtttataaagaggatgatacaaccataaattctgaaagtgaaaaagagctagaagatattaatagaaaaatgctttttttaagggggttcagatcctggaaagaaaatgcacaatagtgactatgagaatgtagaagtggcatctgaaaacaattggtacacaagtaaactggcagttacattctgctcccagctctaaaattactcccttattggcatctttggaggaattttctaaaagccataatccagtgggttcctcccagtcagctcttgtacagacatgtgctctggggaattctgaggaggaaataaattgcagagtctgtaggtggagaggtggaaagaaaagacaaatggcctgctataagactactattcctttccagaatgcaaggccttgaagacatgattccttagaggaagaatataatgggaagtgtacaggctaggaagaacttgaagtgaacaaatttcaaaatcttaacctgatgctaattttcagggttctccattacagtgtaaaaattcagaccacgacaactatggtgtcatgaggaaaaaaaatcaggcatttttccaaaggaagtgctaatgggcctatttgacttctgagtgaagcaaaaactacccagatccattccctacaattcacatccccaaaggtcaaaaacaaactaggaggacctgggaatttcagctggagatactgattattgagttctgaagtagagtgttggaaataggcaattagagaaagtccattgatgtcattttgtttataatattgcagttcatactgaatgaccacttgatatgactaattcagggaatatatatttttctatgaaagctatgaatgttactatcacggcttttccttatttttacttgtatgtagcagcatttacagaaatgccaaaaatgtgcctcattaagaggcaggtcttaatcagttagataaaaataaaatgtatagcttaagatcaaaacagtcata

SEQ ID NO: 23961 - DNA, 417 bp, Homo Sapiens
  misc_feature (380)..(380): n is a, c, g, or t
  misc_feature (384)..(384): n is a, c, g, or t
  misc_feature (397)..(397): n is a, c, g, or t
gcttaaacaaatgtgcaccacgatgtttcaacaagacaaatgccataaatgtgaaagctgcagtttgcaatataccacatttagaatccagcgaaggtgaatcagacagaggtggtagtcattctaattaaacaatcaggtaacttcacgacaagctgatttgcagcatcaaaagtgtccatttaagtttcttttttcttgatgatcagagggcccacattgtctccagtctcttcgttatgttttgtgtgagccccatcacagaatgggaacctgtaaatgaaagaaaatgagtctaaacatgtccagttgcatttcatttcaatttcagctcagctcctgatgttaactggtaagactttcctctctttcttcttagnctgnattctttcgctgnccttgtttgaactccccccg

SEQ ID NO: 23962 - DNA, 2272 bp, Homo Sapiens
gaggtcgcagtgacagcggcgggcgatcggacccaggctgccccgccgtacccgcctgcgtcccgcgctcccgccccagcatgacagccccggcgggtccgcgcggctcagagaccgagcggcttctgacccccaaccccgggtatgggacccaggcggggccttcaccggcccctccgacacccccagaagaggaagaccttcgccgtcgtctcaaatactttttcatgagtccctgcgacaagtttcgagccaagggccgcaagccctgcaagctgatgctgcaagtggtcaagatcctggtggtcacggtgcagctcatcctgtttgggctcagtaatcagctggctgtgacattccgggaagagaacaccatcgccttccgacacctcttcctgctgggctactcggacggagcggatgacaccttcgcagcctacacgcgggagcagctgtaccaggccatcttccatgctgtggaccagtacctggcgttgcctgacgtgtcactgggccggtatgcgtatgtccgtggtgggggtgacccttggaccaatggctcagggcttgctctctgccagcggtactaccaccgaggccacgtggacccggccaacgacacatttgacattgatccgatggtggttactgactgcatccaggtggatccccccgagcggcccccttcgccccccagcgacgatctcaccctcttggaaagcagctccagttacaagaacctcacgctcaaattccacaagtactgcctgctcactcgaggggggcccagggtgggggaggcagcacactaggcactctcaccccagcaactacttccctaaggtggggacagggcccccccgcccgcgctggtgcctgctgggtgagcacttcccctgccagctgcagagtcagcacgtggcaggggacgctggcacttggggccggaagggacccgaagacgcccctgaccctcacccgagcctcctgcctaggctggtcaatgtcaccatccacttccggctgaagaccattaacctccagagcctcatcaataatgagatcccggactgctataccttcagcgtcctgatcacgtttgacaacaaagcacacagtgggcggatccccatcagcctggagacccaggcccacatccaggagtgtaagcaccccagtgtcttccagcacggagacaacagcttccggctcctgtttgacgtggtggtcatcctcacctgctccctgtccttcctcctctgcgcccgctcactccttcgaggcttcctgctgcagaacgagtttgtggggttcatgtggcggcagcggggacgggtcatcagcctgtgggagcggctggaatttgtcaatggctggtacatcctgctcgtcaccagcgatgtgctcaccatctcgggcaccatcatgaagatcggcatcgaggccaagaacttggcgagctacgacgtctgcagcatcctcctgggcacctcgacgctgctggtgtgggtgggcgtgatccgctacctgaccttcttccacaactacaatatcctcatcgccacactgcgggtggccctgcccagcgtcatgcgcttctgctgctgcgtggctgtcatctacctgggctactgcttctgtggctggatcgtgctggggccctatcatgtgaagttccgctcactctccatggtgtctgagtgcctgttctcgctcatcaatggggacgacatgtttgtgacgttcgccgccatgcaggcgcagcagggccgcagcagcctggtgtggctcttctcccagctctacctttactccttcatcagcctcttcatctacatggtgctcagcctcttcatcgcgctcatcaccggcgcctacgacaccatcaagcatcccggcggcgcaggcgcagaggagagcgagctgcaggcctacatcgcacagtgccaggacagccccacctccggcaagttccgccgcgggagcggctcggcctgcagccttctctgctgctgcggaagggacccctcggaggagcattcgctgctggtgaattgattcgacctgactgccgttggaccgtaggccctggactgcagagacccccgcccccgaccccgcttatttatttgtagggtttgcttttaaggatcggctccctgtcgcgcccgaggagggcctggacctttcgtgtcggacccttgggggcggggagactgggtggggagggtgttgaataaaagggaaataaaaaaaaaaaaaaaaaaaaaaa

SEQ ID NO: 23963 - DNA, 5246 bp, Homo Sapiens
ggcgcttttcccggccggctctggtgctcggtgtccctccgccgccgctcccgtttccggcgggggagatggccaggatctgacccgggaggaggccgcacccgcgccgcgctctgcggctggctctaggcgatgccgagcagctcggacacggcgctggggggaggcgggggcctgagctgggcggagaagaggttggaggaacgccgcaagcggaggcgattcctgtcccctcagcagccgccgctgctgttgccgctcctgcagccgcagctcctgcaaccgccgccgcccccgccgcctctgctcttcctggctgctcccggcacggccgccgccgcagccgccgccgccgcggcctcctcctcttgcttcagcccgggcccccctctggaggtcaagcggctggcgagaggcaagaggcgcgcaggagggcggcagaagcggcgtcgcgggccccgcgccgggcaggaggcggagaagcgtcgggtcttctcgctgccccagccgcagcaggacggcggtggcggtgctagtagcggcgggggtgtgaccccgctggtggaatacgaggatgtgagctcccagtccgagcaggggctgctgctggggggggccagcgcggcaacggcggcgacggctgccgggggaacggggggcagcggcgggagtccggcctcctcctccggcacccagcggcgcggggaggggtcggagcgcaggccccgccgggaccgccgcagcagcagtggccgcagcaaagagcgccaccgcgagcaccggcggcgggatgggcagcgcggtggcagcgaggcctccaagtcccgcagccgccacagccacagcggcgaggaacgggccgaggtcgccaagagcggcagcagcagcagcagcggcggccgccggaaaagcgcttcggccacatccagcagcagtagcagccgcaaggaccgggactcgaaggcccaccgcagccggactaagtcgtccaaggagccgccttcggcctacaaggaaccgcccaaggcctaccgggaggacaagaccgagcctaaggcctacaggcggcggcggtccctcagcccactgggaggccgggacgacagcccggtgtcccacagggcctctcagagcctgaggagccgcaagtcccccagcccggcaggaggtggcagcagcccctattctcggcggctgccgcgctccccgagcccctacagtcgccgccgctcccccagctacagccgccacagctcctacgagcggggcggcgacgtgtcccctagtccctacagcagcagcagctggcgccgctctcgcagtccctacagccctgtgctcagacggtctggaaaatcccgaagcagaagcccgtattcatctaggcattcaagatctcgtagcaggcacagattgtctagatccagaagtcgtcattctagtatttctcctagcacactaactctgaagagtagcctggcagctgaattgaacaagaataaaaaagcacgagcagcagaggcagcaagagccgcagaagcagcgaaagctgcagaagcaactaaggctgctgaggctgctgccaaggctgcaaaagcttcaaacacttctacacctaccaaggggaacacggaaactagtgccagtgcatcacaaacaaaccatgtgaaggatgtgaagaaaattaaaattgaacatgcaccttctccctcaagtggtggaactttaaaaaatgacaaagcaaaaacaaagccacctcttcaggtaacgaaggtggaaaataatttgattgtagataaagccaccaagaaagcagtcatagttggaaaggagagtaaatctgctgctacaaaggaggaatcagtatctcttaaagagaaaaccaaaccacttacaccaagcataggagccaaggagaaggagcaacatgtagctttagtcacctctacattaccaccgttacctttgcctcccatgctgcctgaagataaagaagctgatagcttacgaggaaatatttcagtaaaagcagttaaaaaagaagtagaaaagaaactccgatgtcttcttgctgatttaccgctgccccctgagctaccaggaggagatgatctttcaaagagtccagaggaaaagaaaacaacaacacagttacatagtaaaaggaggcctaaaatatgtgggcctcgctatggtgaaaccaaagaaaaagatattgactggggaaaactctgcgtggataaatttgatatcatcggaattattggagaaggtacttacggacaagtttacaaagccagggataaagacactggagaaatggtagccttaaaaaaagtacgtctggataatgaaaaggaaggctttccaattacagcaattcgagaaattaaaattctccggcagcttacccatcagagtattatcaatatgaaggaaatagtgactgataaagaagatgctttggatttcaagaaggacaaaggtgcattttatctggtgtttgaatatatggaccatgatctgatgggactactggaatcaggcttggttcattttaatgaaaatcacataaagtcatttatgagacagctcatggagggtctggattattgtcataagaagaactttttgcatagagatattaaatgttccaatatccttctaaataatagagggcagataaaacttgcagactttggacttgctcgattgtatagctcagaagaaagtcggccgtatactaacaaggtaattactttatggtaccgtccacctgaactgctactgggagaagaacgatacacaccagccattgatgtatggagctgtggctgtatccttggcgaactcttcactaaaaaacctatatttcaagcaaatcaggaacttgcacaactagaattaataagccgaatatgtgggagtccatgtcctgcagtgtggcctgatgtaatcaaactaccatatttcaacaccatgaaaccaaagaagcaatatcgtcgaaagttaagagaagaatttgtttttattcctgcagctgcgctagacttatttgattacatgcttgccttggatcctagtaagcgctgcactgctgaacaggctcttcagtgcgagttcctccgagatgtggaaccctcaaaaatgcctccaccagatctccctttatggcaagattgtcatgagttatggagtaaaaagcgaagaagacagaagcagatgggcatgactgatgatgtttccacaattaaagcccccaggaaggacttgtctctgggcttggatgacagcagaaccaacacaccccagggtgtgctgccatcttcacagctgaaatctcagggcagctcaaatgtggcacctgtaaaaacaggccctggacagcacttaaaccacagtgaattggcaattctactaaacctactacaatctaaaacaagtgttaatatggctgattttgtccaagtgttgaacattaaggtaaactctgagactcaacagcagctaaataaaataaaccttcctgctggaattttggcaacaggtgaaaaacagacagatccatcaacaccacaacaggagtcttcgaaaccgttgggaggaattcagccttcttctcagaccatccagcctaaaatggagactgatgctgcccaggcggctgtgcagagtgcatttgcagttctgttgactcagttaataaaggctcagcagtcaaagcagaaagatgtgctactagaagagagggaaaatggatcgggacatgaagcgtcattacaactcaggccacctccagaacctagcactccggtgtcgggacaagatgacctcatccagcatcaagatatgaggatcttggagctaacgccagaaccagaccggcctcgaattctgcctcctgaccaacgacctcccgagcctcctgaaccaccaccagtcactgaggaagatctagattatcggacagaaaaccagcatgtacccaccaccagttcttcattaactgaccctcatgccggagtgaaggcagccctgttacagctgcttgctcagcatcagccccaggatgaccccaaaagagaaggtgggattgattatcaagcaggagacacttacgtgtccacttcagactacaaggacaactttggatcctcttctttctcttctgctccttatgttagcaatgatggtctaggaagcagttctgctccaccactagaacgacgtagtttcattggaaattcagatattcagtctttggataactacagtactgcttcatctcattctggtggtccacctcagccttctgccttttctgagtcatttcccagttcagtagctggatatggagacatttacctcaatgctggtcccatgttgtttagtggagacaaggaccatagatttgaatatagccatggtcctattgcagtcctggcaaacagcagtgacccttccacggggccagagagtactcatcctttgccagcaaagatgcacaactataactatggtggtaacttacaggaaaatccgagtggccccagcctcatgcatggacagacctggacttctcctgcccaaggacctggatattcacaaggatacaggggacatattagcacatcaactggcagaggcagaggcagagggttaccatactgagtatctgtttttcctcaggcacatcatttttatctggaaagacttttctagctgcaatttaaggcagcaatccaagagacttgaataataataattcaacaacagctttatttttatgtggagaagggtcttgcatacaatagtttaaaaaagacaaaaaaaacctttgcttaaattcatgctgttctaaaaactagatcgattgtacatcttcacaaattctagttaacaattttattttgtattcttgcagttttaagtggatgctaattttaggggcataagccttttatggccctcttgcagatcttctgaactatgcacatttgtgctttttttgtaagtttggaccaacttttatgtaacaaacagcccctccccacctccagttttacaacaatcagaaagggcactgatttatttggtatttttctttttacaaagctacctttagtcaaaggtcactgtcagtctttgcacctgctttcagtgttattgtgaaaggtgtactttgtgctcatttcagaaaataaaacacaacctttctcttgatgcaacagttttataaaaaaaaa

SEQ ID NO: 23964 - DNA, 1665 bp, Homo Sapiens
cgcgcgctcaggctcagcttcgctgcccgcccaggtagtgcccgctggagctcgcgcgctcatccggcaccactccagggctccaggctcctcgggcttccggagtcgagacgtggtggagttggctcgggctgaacttctttcggggggctgcctgtccttctttttgcagaagatgaatccggcctcggcgccccctccgctcccgccgcctgggcagcaagtgatccacgtcacgcaggacctagacacagacctcgaagccctcttcaactctgtcatgaatccgaagcctagctcgtggcggaagaagatcctgccggagtctttctttaaggagcctgattcgggctcgcactcgcgccagtccagcaccgactcgtcgggcggccacccggggcctcgactggctgggggtgcccagcatgtccgctcgcactcgtcgcccgcgtccctgcagctgggcaccggcgcgggtgctgcgggtagccccgcgcagcagcacgcgcacctccgccagcagtcctacgacgtgaccgacgagctgccactgcccccgggctgggagatgaccttcacggccactggccagaggtacttcctcaatcacatagaaaaaatcaccacatggcaagaccctaggaaggcgatgaatcagcctctgaatcatatgaacctccaccctgccgtcagttccacaccagtgcctcagaggtccatggcagtatcccagccaaatctcgtgatgaatcaccaacaccagcagcagatggcccccagtaccctgagccagcagaaccaccccactcagaacccacccgcagggctcatgagtatgcccaatgcgctgaccactcagcagcagcagcagcagaaactgcggcttcagagaatccagatggagagagaaaggattcgaatgcgccaagaggagctcatgaggcaggaagctgccctctgtcgacagctccccatggaagctgagactcttgccccagttcaggctgctgtcaacccacccacgatgaccccagacatgagatccatcactaataatagctcagatcctttcctcaatggagggccatatcattcgagggagcagagcactgacagtggcctggggttagggtgctacagtgtccccacaactccggaggacttcctcagcaatgtggatgagatggatacaggagaaaacgcaggacaaacacccatgaacatcaatccccaacagacccgtttccctgatttccttgactgtcttccaggaacaaacgttgacttaggaactttggaatctgaagacctgatccccctcttcaatgatgtagagtctgctctgaacaaaagtgagccctttctaacctggctgtaatcactaccattgtaacttggatgtagccatgaccttacatttcctgggcctcttggaaaaagtgatggagcagagcaagtctgcaggtgcaccacttcccgcctccatgactcgtgctccctcctttttatgttgccagtttaatcattgcctggttttgattgagagtaacttaagttaaacataaataaatattctattttcattttcaaaaaaaaaaaaaaaaaaaaaaaaaaaaaaaaaaaaaaaaaaaaaaaaaaaaaaaaaaaaaaaaaaaaaaaaaaaaa

SEQ ID NO: 23965 - DNA, 1519 bp, Homo Sapiens
atggcggcgaaatccgatggcggtggcgtgggggtgggcttcgctcagctgcacaacctggacgaggcggtgggcagcggcggcgaggaggacggggagcccgggggaggcggctgcggcggcggcggcgacggcagcgagcccggcgagagcagctcgatgcacatctgccactgctgcaacacctcctcgtgctactggggctgccgctccgcctgcctgcgctccctcctgggcaggaagccgcgccgcagcgccgccgccgacgggggggaccagccgctgcagcctcccgcggcccccggcgccggccgccaacccccgacgccctcggccgcgcggccggagccgccgccgccgcaggtggagcggccgtggctcgactgcctgtggatcgtgctggcgctgctggtgttcttcggggacgtgggcaccgacctgtggctggccctcgactactaccgcaagggggactacgtctacttcgggctgaccctcttcttcgtgctggtgccgtcgctgctggtgcagagcctgagcttccgctggttcgtgcaggactacacgggcggcgggctgggcgccgtggaggggctcaccagccggggcccccccatgatgggggccggctacgtccacggcgcggcccgcggtggcccaggcgtgagggtctcccccacgccgggggcgcagcgcctgtgtcgcctctccgtgtggatctggcagtcggtcatccacctgctgcagatggggcaggtgtggagtgggcaagaccctttggtaccatcaaggaaaagaaggagcagatttaaccacatgaagttgcctcacctggtttcttcccttctccctcctcccatctgaaaaatccagaaatacttgcttagctgtgagggtaagtgggttaaattgagacagagatacttcctccaggagaatgaataagaagagaacatctctaaagatttatttcttgtttttgagtgaacagtaaccctaaaaacttgacatttatggtaaattttcaagggaaggggatgaaaaaatggcatgctttggagcgaaattgcaactggggatgcagcatagtatttccagaaggatccagaaacaaagtgtcaaaatctgtattgtaagaaggctggtgctcctgaaatctagcaggcaggtgcttactagaagtcacaagttgttcatttctgtcttcaacatcatttgatactatagacttattcataaggtcaattgcctagtcaggcttatgcaatgcagtggatagattctgtaatgttggaaagattctgtgggatggaaagattctgtgggatgcaaaaagaaactgtgtctctgatgttgccattttcaccccaggatgatttgctttacaacgtgctgtctgcaaataagtttgtggttaaaattttagtttactccccatgatgtgctattcatctagtttcttctcatcaggaattctggatttcttatttgcctcttaaaaagtaaaacttttaaaaaa

SEQ ID NO: 23966 - DNA, 1868 bp, Homo Sapiens
taagacgccggaggaggtggcggcggctgggagaggcgagggttctggccgattttagcatcgaaactaggagaaataagaatggctgtagaggaacttcagtctataataaagagatgtcaaatcctagaagagcaagactttaaagaagaggattttggcctatttcagttagctgggcaaagatgcatagaagaagggcacacagaccagctattagaaattattcaaaatgaaaagaataaggtcatcatcaagaatatgggctggaatctcgttggtcctgttgttcgatgccttttgtgtaaagataaagaggatagtaaaagaaaagtttattttttgatctttgatttattggtaaagttatgcaatccaaaggaattattgttgggtttgcttgaactgattgaagagccctctggaaaacagatatcccaaagtattcttcttttgcttcagccattacaaacagtgattcagaaacttcataacaaggcatattcaattggattagcattgtctaccctttggaatcagctatctcttcttcctgttccatactcaaaagaacaaatacaaatggatgactatggcctttgtcagtgttgcaaggccttaatagagttcactaagccttttgtggaagaagtcattgataacaaagaaaactcactggaaaatgaaaagttaaaggatgaattactgaaattttgtttcaaaagcttgaaatgccctttgctgacagcacaattctttgaacagtctgaagaaggtggaaatgatcctttcaggtattttgcatcagaaataataggttttttatcagcaattggacaccctttccccaaaatgatttttaatcatggaaggaaaaagagaacttggaattaccttgaatttgaagaagaagaaaataaacagttagcagactcaatggcttctctggcatatctagtatttgtacagggcatccatattgatcagcttccaatggtcttaagcccattgtaccttttgcagtttaatatggggcacattgaagtctttttgcaaagaacagaagagtctgttatctccaaaggattggagctgctggagaatagtttattgagaatagaagacaatagtctactttaccagtacttagaaatcaagagttttcttactgtacctcagggcttagtgaaagtaatgacactttgccccattgagacactgaggaaaaagagtttagctatgcttcagctgtatattaacaagttggattcacaaggcaaatatacattatttaggtgcttattgaatacaagtaatcactcaggtgtggaggcttttattattcaaaatatcaaaaatcaaattgacatgtcattaaagagaacacgtaacaacaaatggtttacaggaccacagttgatttcccttcttgatttggtactttttctcccagagggtgcagaaacagatttactgcaaaactcagataggattatggcttcattaaatttattgaggtatttggttatcaaagataatgaaaatgacaatcaaactggattatggacagaacttggaaatattgagaataatttcttaaagccacttcatataggacttaatatgtcaaaagcacattatgaagcagaaattaaaaatagccaagaggcccagaaatctaaagatctttgttctataactgtaagtggagaagagatccctaatatgcctcctgaaatgcagcttaaggtcctgcattcagctcttttcacatttgatttgattgaaagtgttctagctcgagtggaagaactcattgaaataaaaacaaagtctacctctgaagaaaatattgggataaagtgaaa

SEQ ID NO: 23967 - DNA, 6836 bp, Homo Sapiens
tgagactgtagaagagagagcaattggccaatgaggactgcggggcgggaccctgtgccgcggcggagtccaagatggcggcgtgcggttccgctgtgtgaaacgagcgcggggcggcgggttactcagctccgcggagacgacctccgacgacccgcaacaatgaagggaaaagagcgctcgccagtgaaggccaaacgctcccgtggtggtgaggactcgacttcccgcggtgagcggagcaagaagttagggggctctggtggcagcaatgggagcagcagcggaaagaccgatagcggcggtgggtcgcggcggagtctccacctggacaagtccagcagtcgaggtggcagccgcgagtatgataccggtgggggcagctccagtagccgcttgcatagttatagctccccgagcaccaaaaattcttcgggcgggggcgagtcgcgcagcagctcccggggtggaggcggggagtcacgttcctctggggccgcctcctcagctcccggcggcggggacggcgcggaatacaagactctgaagataagcgagttggggtcccagcttagtgacgaagcggtggaggacggcctgtttcatgagttcaaacgcttcggtgatgtaagtgtgaaaatcagtcatctgtcgggttctggcagcggggatgagcgggtagcctttgtgaacttccggcggccagaggacgcgcgggcggccaagcatgccagaggccgcctggtgctctatgaccggcctctgaagatagaagctgtgtatgtgagccggcgccgcagccgctcccctttagacaaagatacttatcctccatcagccagtgtggtcggggcctctgtaggtggtcaccggcacccccctggaggtggtggaggccagagatcactttcccctggtggcgctgctttgggatacagagactaccggctgcagcagttggctcttggccgcctgccccctccacctccgccaccattgcctcgagacctggagagagaaagagactacccgttctatgagagagtgcgccctgcatacagtcttgagccaagggtgggagctggagcaggtgctgctcctttcagagaagtggatgagatttcacccgaggatgatcagcgagctaaccggacgctcttcttgggcaacctagacatcactgtaacggagagtgatttaagaagggcgtttgatcgctttggagtcatcacagaagtagatatcaagaggccttctcgcggccagactagtacttacggctttctcaaatttgagaacttagatatgtctcaccgggccaaattagcaatgtctggcaaaattataattcggaatcctatcaaaattggttatggtaaagctacacccaccacccgcctctgggtgggaggcctgggaccttgggttcctcttgctgccctggcacgagaatttgatcgatttggcaccatacgcaccatagactaccgaaaaggtgatagttgggcatatatccagtatgaaagcctggatgcagcgcatgctgcctggacccatatgcggggcttcccacttggtggcccagatcgacgccttagagtagactttgccgacaccgaacatcgttaccagcagcagtatctgcagcctctgcccttgactcattatgagctggtgacagatgcttttggacatcgggcaccagaccctttgaggggtgctcgggataggacaccacccttactatacagagatcgtgatagggacctttatcctgactctgattgggtgccacccccacccccagtccgagaacgcagcactcggactgcagctacttctgtgcctgcttacgagccactggatagcctagatcgcaggcgggatggttggtccttggaccgggacagaggtgatcgagatctgcccagcagcagagaccagcctaggaagcgaaggctgcctgaggagagtggaggacgtcatctggataggtctcctgagagtgaccgcccacgaaaacgtcactgcgctccttctcctgaccgcagtccagaattgagcagtagccgggatcgttacaacagcgacaatgatcgatcttcccgtcttctcttggaaaggccctctccaatcagagacagacgaggtagtttggagaagagccagggtgacaagcgagaccgtaaaaactctgcatcagctgaacgagataggaagcaccggacaactgctcccactgagggaaaaagccctctgaaaaaagaagaccgctctgatgggagtgcacctagcaccagcactgcttcctccaagctgaagtccccgtcccagaaacaggatggggggacagcccctgtggcatcagcctctcccaaactctgtttggcctggcagggcatgcttctactgaagaacagcaactttccttccaacatgcatctgttgcagggtgacctccaagtggctagtagtcttcttgtggagggttcaactggaggcaaagtggcccagctcaagatcactcagcgtctccgtttggaccagcccaagttggatgaagtaactcgacgcatcaaagtagcagggcccaatggttatgccattcttttggctgtgcctggaagttctgacagccggtcctcctcttcctcagctgcatcagacactgccacttctactcagaggccacttaggaaccttgtgtcctatttaaagcaaaagcaggcagccggggtgatcagcctccctgtggggggcaacaaagacaaggaaaacaccggggtccttcatgccttcccaccttgtgagttctcccagcagttcctggattcccctgccaaggcactggccaaatctgaagaagattacctggtcatgatcattgtccgtgtgctacagttgaaactccagcagcgccggacccgggaagaactggtgagccaagggatcatgccgcctttgaaaagtccagccgcatttcatgagcagagaaggagcttggagcgggccaggacagaggactatctcaaacggaagattcgttcccggccggagagatcggagctggtcaggatgcacattttggaagagacctcggctgagccatccctccaggccaagcagctgaagctgaagagagccagactagccgatgacctcaatgagaagattgcacagaggcctggccccatggagctggtggagaagaacatccttcctgttgagtccagcctgaaggaagccatcattgtgggccaggtgaactatcccaaagtagcagacagctcttccttcgatgaggacagcagcgatgccttatcccccgagcagcctgccagccatgagtcccagggttctgtgccgtcacccctggaggcccgagtcagcgaaccactgctcagtgccacctctgcatcccccacccaggttgtgtctcaacttccgatgggccgggattccagagaaatgcttttcctggcagagcagcctcctctgcctcccccacctctgctgcctcccagcctcaccaatggaaccactatccccactgccaagtccacccccacactcattaagcaaagccaacccaagtctgccagtgagaagtcacagcgcagcaagaaggccaaggagctgaagccaaaggtgaagaagctcaagtaccaccagtacatccccccggaccagaagcaggacaggggggcaccccccatggactcatcctacgccaagatcctgcagcagcagcagctcttcctccagctgcagatcctcaaccagcagcagcagcagcaccacaactaccaggccatcctgcctgccccgccaaagtcagcaggcgaggccctgggaagcagcgggacccccccagtacgcagcctctccactaccaatagcagctccagctcgggcgcccctgggccctgtgggctggcacgtcagaacagcacctcactgactggcaagccgggagccctgccggccaacctggacgacatgaaggtggcagagctgaagcaggagctgaagttgcgatcactgcctgtctcgggcaccaaaactgagctgattgagcgccttcgagcctatcaagaccaaatcagccctgtgccaggagcccccaaggcccctgccgccacctctatcctgcacaaggctggcgaggtggtggtagccttcccagcggcccggctgagcacggggccagccctggtggcagcaggcctggctccagctgaggtggtggtggccacggtggccagcagtggggtggtgaagtttggcagcacgggctccacgccccccgtgtctcccaccccctcggagcgctcactgctcagcacgggcgatgaaaactccacccccggggacacctttggtgagatggtgacatcacctctgacgcagctgaccctgcaggcctcgccactgcagatcctcgtgaaggaggagggcccccgggccgggtcctgttgcctgagccctggggggcgggcggagctagaggggcgcgacaaggaccagatgctgcaggagaaagacaagcagatcgaggcgctgacgcgcatgctccggcagaagcagcagctggtggagcggctcaagctgcagctggagcaggagaagcgagcccagcagcccgcccccgcccccgcccccctcggcacccccgtgaagcaggagaacagcttctccagctgccagctgagccagcagcccctgggccccgctcacccattcaaccccagcctggcggccccagccaccaaccacatagacccttgtgctgtggccccggggcccccgtccgtggtggtgaagcaggaagccttgcagcctgagcccgagccggtccccgccccccagttgcttctggggcctcagggccccagcctcatcaagggggttgcacctcccaccctcatcaccgactccacagggacccaccttgtcctcaccgtgaccaataagaatgcagacagccctggcctgtccagtgggagcccccagcagccctcgtcccagcctggctctccagcgcctgccccctctgcccagatggacctggagcacccactgcagcccctctttgggacccccacttctctgctgaagaaggaaccacctggctatgaggaagccatgagccagcagcccaaacagcaggaaaatggttcctcaagccagcagatggacgacctgtttgacattctcattcagagcggagaaatttcagcagatttcaaggagccgccatccctgccagggaaggagaagccatccccgaagacagtctgtgggtcccccctggcagcacagccatcaccttctgctgagctcccccaggctgccccacctcctccaggctcaccctccctccctggacgcctggaggacttcctggagagcagcacggggctgcccctgctgaccagtgggcatgacgggccagagcccctttccctcattgacgacctccatagccagatgctgagcagcactgccatcctggaccaccccccgtcacccatggacacctcggaattgcactttgttcctgagcccagcagcaccatgggcctggacctggctgatggccacctggacagcatggactggctggagctgtcgtcaggtggtcccgtgctgagcctagcccccctcagcaccacagcccccagcctcttctccacagacttcctcgatggccatgatttgcagctgcactgggattcctgcttgtagctctctggctcaagacggggtggggaaggggctgggagccagggtactccaatgcgtggctctcctgcgtgattcggcctctccacatggttgtgagtcttgacaatcacagcccctgctttttcccttccctgggaggctagaacagagaagcccttactcctggttcagtgccacgcagggcagaggagagcagctgtcaagaagcagccctggctctcacgctggggttttggacacacggtcagggtcagggccatttcagcttgacctccttttttgaggtcagggggcactgtctgtctggctacaatttggctaaggtaggtgaagcctggccaggcgggaggcttctcttctgacccagggctgagacaggttaaggggtgaatctccttcctttctctccctgctttgctgtgaagggagaaattagcctgggcctctaccccctattccctgtgtctgccaaccccaggatcccagggctccctgccattttagtgtcttggtgtagtgtaaccatttagtggttggtggcaacaattttatgtacaggtgtatatacctctatattatatatcgacatacatatatatttttgggggggggcggacaggagatgggtgcaactccctcccatcctactctcacagaagggcctggatgcaaggttacccttgagctgtgtgccacagtctggtgcccagtctggcatgcagctacccaggcccacccatcacgtgtgattgacatgtaggtaccctgccacggcctatgccccacctgccctgcttcctggctccttatcagtgccatgagggcagaggtgctacctggccttcctgccaggagctctccacccactcacattccgtccccgccgcctcactgcagccagcgtggccctaggacaggaggagcttcgggcccagcttcaccctgcggtggggctgaggggtggccatctcctgccctggggccactggcttcacattctgggctgactcataggggagtaggggtggagtcaccaaaaccagtgctgggacaaagatggggaaggtgtgtgaactttttaaaataaa

SEQ ID NO: 23968 - DNA, 163319 bp, Homo Sapiens
  misc_feature (92756)..(92756): n is a, c, g, or t
  misc_feature (141133)..(141133): n is a, c, g, or t
  misc_feature (141138)..(141138): n is a, c, g, or t
  misc_feature (141204)..(141204): n is a, c, g, or t
ggaatcctggatttagctttgaggaggctgtggattgcttctgggagctgtgggagtcagagcttttagttgcaagtaacggaaacccaacctgaattgctggaagcagcaaaggccgtttagtggcttctgtgaccgtcccatcggtaggaagggcgggttagggtgggcctgccccagggttcaccgaacagacactttttcgagtgcctgcgtggtaccaggcgctgtttgagggcaaaacagacccagagtcctgcccacaggcagcctccttctggagaaggctgggcctgaggctggtcccagtactggcctctgtctctgtgtgagctgcctccttgagtgagctgtctctgagaagctgccgatgagatgagatgcagccttggcaccagagaagagctcgtccccgtcagctcccgagggaggggtcccaggagagggttccaattggcttggctgcatccaggggacaggcctggtgggcagagccaggagccaccaccaggtgacctgtggctgtggtgggctcaggggtcttcaggggagtggctgaggactctgccctatattttggctcctttggaaagagatgccatttatctttggaagcagcatgttgaggcctgggttctgatgacccaggcaaggaggggcgggtctgttttcctctcctggggaggaggatgcccccagcctctcccatccctgggtccaggcctccaggagccctctcaaaaggctgcctgccatgccctctttccatctctctgccctttgatgaggattatttttgtatcactggcctgcatgttgtatagtgttgggatgggctgggtaatttcctagcactttcagcctgccgagcttgtaggcagagtgggctctggaggcccaggaaagccctgggggcctgggaatgagagggaggctgtgtgggcagagataacaggtccgcaggggagaggtatatgtgagagacatagaacttgaggcccagaaaatggacagccccggtcttcctcttgtttcctgggtatagccctagagaagagatctgcccattgatgggatgcgggctggaaccccagaaggtctgtgctccagggaactgtgagcatcatcttgtctggcctccctattctagagacgagggggccgaggcctggagggggctacctgactctgttgctttccatgaaaccttggacttgttacttaatctcccagcttttgttttcttttgtaaagtgggttattatctgcagttttactaaattgggttttaattacccaagtaatatactcatcagttaaacatgagaacacttctgataaggctggggtttatgaccccccccacaccctctgcctctgtctgccctcccctctctggaagtcaccgtggctgtcgtcttccgcatgttcacccacacggggacaatctcatggcatacatgggtttggtgctctcctctgtgtacaggtagcagcacagtctgcgtgtcttcctgtgagggctcctttgcctgtcctgtggtctggccctctgcccgggagatctgcaggtctgtcttgttctgttggcgtccctctcgtgtggcactcctctgcagagatccagcccacatgcctttgagggcatccagggtgttcctgactgcaggttaacaggaagtgcattgccctaaacatcactggattcgaatgtgcctcctggacacacatgtgagcatcgtcccagggtggacattgaggcactggctcgccaggcattaggatggaatgtgagaatgttcccgagcctgtgttgggaagaggagagaaactgatgttagtgcttccagcttcgcatcagacaccatcctaggcatgttgtctatgttttctcattgactgctctttgacatcaaaatcctcattttacagaaggggaaaatggaggccggagaaattaagtaatgtgtctgctgccactcggctgctgagggtgggactgggcccggagcctgggcgtcccgactgccaggtcgatctggacgctgaggagtggagcatccctgtcctgcctcccgagaggggacaagaggaaggcaagagcttgctctcagcaaggccttgagagcgcctggccaggctgcagcctcagtgtgctgggaagagagaactcgccaggaatttcctggggcagctccagggtaggctgctcggatctaagggttacagggtggcctaggccctgcccccctcctctttccccggcacatcccaaccctgtacattcttggaatctgtaagttgtgccgtgttctgtgggcaccgggagtttgctttgaaacccgtggcaccaacatctgttagctcttagagaacagaaagattgacaaagcactgctggggcaggcagtgggggaagatgttacattcagaagtaggaagtctcaaagacagaggaaaaaccccaaccaaactccagctcgctccccaaggctgctttgatgtggttttcccatccccggaggccttataaggtatcgtgcctggattctgggctctggactggtgctggctgcacaccctgtgcccggaggagctggcctctcttcctggggcccagtgtagagcaggggaggggctcccagggccagctgatggggcaccactgggacttaggaaggtagcacatctgggcatgtggcctgaggggccaccaatccaggccattagacaggagcagcccagccccaggtcaggtggagcagaggccctggagacccaggaaggtctttgatcagaacttgcagcagaggctaaggcccactgtcctggaggccagaggggaggggcctgggatcacagagtgacaactaagtagacaaaataagtggaggagggtcaccactgcagccaagccccacatgtgggtttcccaggtgcagtggtgaagggtatggactcaggctctggcacttactagctgtgtgaccttgggcaagtcacttaacctctctgtgcctcactcatctcatctgtaaaacagggtaatcatggcagtcctttggaatacctgaaaggattgacacaagggtgaaatgcagtcctctgaaaacaagtgttctgggcaggatggggcatgtttccaggtgtctgtgagggcacctggggtctggcgagtctctcggcttgtcccagcagtgttctggtcaccatacaataacaatagcaggagtaataaacagtaactactgacctaatgaaccccactcatgctttcagctgccctgctaagcgcttcacatgcaatgacttcctcactcctcacagccccaccccctccagatatccttattgctgtcgcccctgtttacgaatggggagactgaggtgcactagagataaagttccttccccaaggtggtgcagcatgtgtgaagcagagctgggatttgaaccaaggtctgacccctccagttccatgccctctgcacaggggcttccagtggcgccgtcgaagttctgaatatgtctcctggcaacacctgccttcccgaaggatggtgccaagggcctggccctggccctgacatgtggggctgccagccagggctcagcttgagggcagggccaagtccccaagttgtggggaggagcaggggagctttgagtcctgctaggcagatgggaacccttgaccacttacccactagagctgccagctgggctatttttcttgcactcctttaggtgtgatccttggtccctggtaggtgccaggactcctgaccacctctgctcccatgcccacaggagccctggttgcatgagtaggagcccgggctgaggcatctgaaggagctggctcaagtccccgctccgccccttgctggcaggtgatccaaagggggtctcacagcctcttggagcctcctagccacttagatgcagggctgtggggaggccattctccagagtctcccgtgaagatcccattggtcagcacctcgtacactgtgagcacttggtagatgacgggtgactgtcattagaactgtttctggtctcatacagtacttcagggttgaggccactttctttgtagaaaataacagtaatgattatacctctcgctttacaatttgcaaatcattttaataagcatctatttcttgaaagatggaaagaccagggctgttgtgatgattcagggggctaataaatacacgcttacacagttggccctccttatccatgggctatgtatttgttgattcagccaaccatagatagaaaatatttggaaacaaaaaagcatccgtactgaacacatacagacttttcttgtccttattccctaagcaatacagtttaacaaccatctccatagcatttacactgtgttaggtattgtaagtaatctagaggtgatttaaagtatagggcaggatgtttgtagtttatatgcaaatactacaccatttatataagggacttgagcatctacagattttgatagcctcagggagttttggaaccagtcgcccacaggtactgaggaatgactataaagtgcctagcatcgtgcctgacacatggaaaatgcacagtaagtgtcagctgtttgattattattatggttgatgactgtgcccattttacaaataagtaggctgaggtccaaaggcgaggcaggcggtacagccagcatgtgattctgtgtttggctcaacatcccgcgtggcttctggcctagagactcaaagctctaggaacatgcacgctgcacgccacagaccctgggccgtgtggctcagtgggggagatgaatttttttttttttttttgagacagagtctcacactgtcacctgggctggagtgcagtggcgcaatctcagctcaccacagcctccacctcccagtttcaagcgattcttctgcctcagccccccaagtagttgggattacagtcacctgccactacgcctggctaattttttgtatttttagcagagatggggtttcattatgttggccaggttgcctgacctcgtgatccacctgcctcggcctcccgaagtgctaggattacaggcgtgagccactgcgcctggctggggagatgaatttttgcaaagttgagcattggcacagtacagtgcgtccatgaaccatggctccggggagctttccagtgttctccagagcagggtactgttgagtggtgagaggcctatgccagaacttgccagaactctgctttctgagtgtgtcagagagcttggttctccgagcagggagtgctgaagctgtcattaggtggtgactggggtgccttgagcacatgcggtcattgtcatagggtcccacacggctgccttgttggtggcgatgtctggagtctttaaactcttccaagtgtgccagtaaaaagacacgagtactcagacgtctcattgatgctgtcacccggctgcagtgcagtcagggtggcaggcgcagagccccgctctgcagaagacctcagcatgaagaggtgcgcagattctcttgaagactgttgcctgttccctcggggaagctctgcctaccagcctttcagggggcggtggcacccgtctctcttctgcatgaaagatgggcttcaattggctgctggggcgtcccagccatctaatgatgccacctgtgtgcatccctttcctgtcatcgtctcccagctcccctgtcaactcgggctctgttaacacaaacagccagtttacaagcccaggatatgttcgatgattataataattggtggaggaggagaggaagccatcctgactcgaggaataaagtagcctggttttgaagtaaatgggacaccggagtctgaatggccacattttaacagcttttaagaaagagtgtgtaatgccctagaaagatttgaaagaagaaagagaacagccacaaaatgttagctgtttgtctttaaaacaaaaaacaaaaaaaagcaagaggcttacctccagctgtgtccagttgatgagatcagcaatacaaagccgtgttttttcttttgttcatcaagaagaggactggtttttttttaagcatcatctgaggtgtagaattttttttcccctaaggagagggttgggttttgtttttgtttttgttttttttctcttttattttcacaaagagaagttggtgacagctgctgagtttgggcttttttattgcttgtcattttgtgttttgagaaccgctaccatagcatcatcatcccccaaacccttgtctgtcctcccataacaggagtatttcctaaagtgggtttcttgggacacgcgtatcatgtgatacttttgaaaaacgaagctccatggtctaaataagtttggagaatgcaaaatatgccagcacttggagattcagtgtttagaaccataggaaaagtcctgataagtcctgctgtaagagatcttgtttaactttgtttaaaagaatcttctttgatcatagaactcttctggcagaataccaataaatacagaagacagtttgacaaggtatggtctagcttcttccatatttggagttatcctgctagggtgggtcagacagatggggcctttgttgacatcctagaaatttcccagcctgtggaccagcaacactcccctcgctaacttgacatctcctggtcaggttggttgggatgagatcccagatatccttaactcactggtggggaacaggcagggtgtgtgcaaggaatcaggctggtttccggaaggcatgtgtgttggtgaaatgtgggaggcatgatggaagacccagtggagccatagcctgtggtggcctgaatgttgtgctgatgcgtgtgggtttatgttaagggcaggagggacccaccttggcacttaacttttcaggtgcaataggatctgcctcagttgacctgaattccaatcagaagaatcagcccagggtcctcatggcactgcttttaacgtcccagcactgggctcccccaacccctgctcaatgcctctgctctgtcttcttctaggagctcgtgggcgacgtgttgagagacacgctcagcgaggaagaggaggacgactttcggctggaaggtattcggagtccattgctctcttcccagcagcagcgagtgggggaagcgggtgttcagctggccgtgtgccctgtgtactccagaaaatctgcagatggagggcacaacagggaccttgtgactctgggtgggggtggactagagggtgggatggaggagaggagtaagagacaggtgtggtacttcataggtccaagcccaggtgggggtccggtcacctaggtccatgtcctggccctgcaccggattagctgggggatctcggacaggttgttgaaactctgctgctcctctggggataataagagtagctgctcagagtgatgtgtgaagtgtgatcaggcagtgttgggcatggagtaagcattacacacagtgcctattctgtttcctccatcatgtcactctcttggtgcatgagtgtgcacacacacacacaggcagcctttcacctctcttctctgttgtccttcttcctttcttaagatggggtcttgctctggcacccaggctggagtgcagtaggtaattgtagctcactgcagcctcgacctgggctcaagtgatcctctcacctcagcctctcaagtagctaggactacagttgcatgccaccatgccaagctaatttttaaatttttctgtagagatggggtcttactatgttgtccagactggtcttgaacttctggcctcgagtgaccttcccaccttggcctcccaaagtgctggggttacaggcgtgagccactgcacctggccactgcttgctttcttcatggtgaagtgccgtgttgtagagagaatcaggacgcttaagcgtagagggtctgctggctgctggtgtgctggtttgactttgggcaggccaccctacctttctgagcctcagcttccacatctatagaatgggaacaagggcctttgccctgcttggctcccagagttggtgccaggaacggatgacagcgtgaagcagagtgtttcctgaatgggagattttaaattcagaaacagggaaagaaatcaccaaatggggggctgccttataagagtaaggaaggacctctctgctgagaccagggcagacagctggctggagagctggggggccatggtgcaagggtctgcggagggggatctagccctgcaggggtctgaagggccacaagaggagagcagacagttctgggaagttctcaaggggagcatcggccagacctgaggaccgtggccacatctggcctgagagctgttataaatatagaatctcagctccagcccaggcctgctgaatccgatctgcattttaacaagctccccaggtggcttgcatgaacactgcactcagagaagcactgtttgaagatactcactccgttgcctagaagttggaggcaggctggagagccaggtatctagcaaactttactcaaatgtaagcaggccccagatcaagggggaggagtcccatgaacagaaagctttgtgtgtgcatacagtctggtatcttttatgtgaaaaaaaggcaccagaccatcctcaggagtttcttagggtaccacatatgcatatgactgtgtggatagaggcctagacagatgataaccatagctctttccaaacatgggaggagacttaagtctgtgttatctgcatttcatggttaaacttttataagaacatagttgggcatggtggctcaaacctataatctcagcactttgggaagctgaggctggaggatcgcttgagctcatgagttcaagaccagcctgggcaacatagtgagaccctgtctctattatcaataattcaaaaactatattttttaaaaaatcaaaaaaccacaattatgtattccttatgaaattaaaaactaatgtcagtatttaaaggtgaaaaccgtaaataaggcagtaggagtggagctgctctggtttgagtcgggtgggcatctggacctgtccgtgtggcccttaagaccccatgagggaccctgggcccagtgaccatctgtggtcctctggcacccttggtcctgtggcccgaggcctcccaccccagggtgggggatatggtgtggatggtaggccaccgcgtggccaggtctggtgagagcaggtgctactgagttctggccacagaaaaccagctgcctgctctggacctgggactgaggggtccctctgtgctactgactaagggagaacaagccgagtcctgaatctcttctttgtcttcctgttggccaagttcattgcctcttggcgggctggagagctgtttaagagagaaaaaaggccatctgaggcgtgaagataaaaagaagtcttttagccatcccaggagaggatggctttagctcccgcgttgttatgtaaagccggccctaatccagcatcttaaccgccttaactggccagctgggagcgggagggatgggagattaaggctgggcttggtgggccagggctgcagagctccttttgaactggggaaagaacaaagtaaacatcaaaagtctcaagctctgagagctggctgggcgtggcagggctggtgaggtgaggctttcgtggggagaaggggagagggacccctcctcagctgacccagctgaggtctgaggaccagggaggggtgaccccatgctcaccttcagcgcacacccagcctccctgcccccacagctgggcaggactccaggtagtcgcagcctgcggcttgggccccacggggagaatgggtggccaggccacgttcccctgcatggcctccaggagtcactgtgtctgagggtgctgcagccactgcttcatccccctctcccatctccctctctccaggtcccccctgcctctcacctggtgaacgctgcccccgcccagcttcttggctatctctgtgtctcatctctgggcctttgctcgttgtctctccgcatcctcaagtgcctggtttctatttctccactctccggcatctttaggaaggctgctctgcagcttccctaaaggagatgctcagagccactgaagtcaggcagcccctcctcctcgggaccaggcccaggcctcccagcttccagggcaggccttgctttggccctgctgccctctccccactggcctggcgtgcgcatgtggcagcccgtggggtggtctctgcttcctcagcccaagggtggatgtgcctggagttggtggttctgcccagcagggagcagtgttaagactgaggcctggtgggggctgagcagcactcggggagctcggggcctgttcagctctgcaatggtccctaactttgccttcctcatctctcctcccttgattctgacttcctgtgaattcgcagctcagaccccattccagcctggcttacccacactcactgtgtgaccttgggtgagtcacttccctgtggctcaacttcctcactgggttccttgtagcacttctttgccagggttattgtgaagacaatgaggtgatggatgtaggtcgcaagggtggccctggtacagagtaagtgcccagcacacttgagctgccatgattcttgtttcctgggttcagttttcttgaagaggtgtcagcccgtgtttataatcatttacctagcccagatcaaagaggacctctttgcaaagcttctttaatcctgttagaatctccaaaggcctccccgtactcctggtgcctggagtagggtctggcatgctgtatgtgctcaataaataaacactcactgaagaaggaaagtcaataccctgtagtcactgaaagcaggtgacctctccctctgcctcactgaaagcaggtgacccctccctccggcctctcaggcaggacctgtgtacctgtgttggggcctgggccagtctgtccaggctcccaggggtcagatgttgggcaaaggaacttgggaggcctgtacttcctttcatctgtagttggaaaactgaagcccagagagggaagtgacctgtccagggtcacacagcagactgagaacagaatctggcccctcactcctcaccattcagtatgtgctgggcatttgctgcagctaggggctctgctgggccctgggttcacaggcacgagcaaggtaggcaggcccagcagtcacgacattcacaggagggaggcagggatgaatacataaatctgcgaaggagcatggaagtttctagtagtggttctctgctaagacgtaaaacccagggagaggtagagtgaggaggcttttctgagaaggtgatgtttcagctgagatgcagatgccaggaaggagccagccatggaagaatgtagggggagagcagctatgagtgagcagaaccccagagtggagggaacttggtgtttggggaagaacaaaaaggaggccgatgtggcatcaggaatgagagtggggtggtcggcaagtgtgggaccacgcccttaggttgcgtggttctgcccagatggttgggtgggtgactgctggattctgacctctgttttaagaagttaattctggcttctgggagggactgcccatgggcagggaggaagagggcaatgaaaccaggaggtgactgcagggtcgcaggcgagaggagatggtgctggcctagcctgggagcttggggctggggagaggtccatggggctggaggttggagctggtgagaagggggttgagggaacgagagagatcagggatgcatcttagacttttggtttcaggaactaaggatttggcggtgtcacttctgaggtggaggttttggcgggtgaccatcaagcctcccgtttttggaccagttgggttcaagatgcccatttaacatccaaggagaggtaccgaggaggccgtgggatacctggtgattggagcttggggttcaaggagcagttgggcaagaaacagagagagagagcgagtcaagacttctcaggaagtagccacggacattgcccgggactctcgggcaaggctcctcaatacacagggctggcggtggcttcccaggaaggctgggaggaagaggagttcatgggaaggcagcagggacccccagatggaggggcaggtgcccatgccccgccggctcctctccctcagttcagagcctgtcctgtcggggggtgtcagcggccctgactctccactcccctacagtccccccagaagctgagttgcagcggtgacagagaacaagcggactttgttaccttggcagtttctctcaagtctgctcctcataaaagctcagctggaacagtggaaattctgacttgtgtcagataccggagaggctttaatagtttcaagtagctcggggttagattgtaaaagccgaatttcatcacatgttttaacttgggtgggggcgggcgggggagagtggaagggacgtgatatttttagcccacagaaggctttttctcccctttccccttctctcccggggcttccccctccctccctgaacagatgtttcgtctcaatcctgttcagatgtcaaagccgagtggccaccagccttatgctctgatgaggaaaaaaaggccagaatgttatttgttgagaaggatttcctcccctacccgcttttcccccttttttgtttcccctcagttacaattggtccataagcaaaatctagtggcagtaaaatgcagctgggaggcaggatggtggagaagaagtccctggtggcatttctggtctcaggaaggggcagacacccacaggtgaaaaagctggaaatcaccctagagggactgccctgggtgagtgaattactgctgtggtgctggtgctggtggtttttcctaaaaagcaggatctcagagagacggatttgttaagtcaggattctttcggttcttttggaaactcacttaaacttttggctcatgaaattgaaaaatcctagggtagatcttgcctaaaaaggcctgtttggattctggagctaaaaccatgtcatggacacatgcacgcacacacacacactcacacacacacgtatactcacacattcacacacatgtctcgctcgctgcccctctctctccctctccatcatctctccctctgtcccctggtggcttctcccccacagggggcaagggtggcagttcccagctctgggcactcccatcctatgagcacagccctgtcaggtggaagaaagttcccaggtcacaggggttcttgcacatgttggactcactttattgaccactttactggtcacttgaccagggtagatctaggttttatgggacctgaagctttctggggccaaaccaaaataaatatctcaccaactcagtctctccttagctcatgtccagaaatgcctgtatttcccctagtatcacctcacacaggcaaaggatgtcagaatggttagatgacaatcttaatagattgaggataaaatgcctaatttggaaaatgttacaaatacaaacacatatgaccacataaacaccttgcaaagacccatcctgacttggaaagggcccgtgtaggtgagagggcccagaagcctagcttcattagcttcttcataaactcttctttcatactgacctaggaccagccacgtggccttcaggatgaaacaagctgggtcaggtaggggtactgagtgcagtgtgaccctggagtgggatcagtctccataaactagatagactgagagtgggggatgagtagctctggggaggaaagccagatgctatcatcagaaggaggagaaggattgctggacaggcaggaacaggtgtcagctattgtggtctgagagagtggacaggccagtggttgaggagttgggaaactgggatttagttctctttgttccacaacttctgggttcaaatcctggttctgctacttaccgttgtttcattttgatgatgctgctgatgatgcagcacctatagtgtgatagacactgcactatagacatatatatctcagggtatagatattgggctgatggaagattctgatgattaaatgagtgatataatgatggtgtaataaggctcactgagcagggaagcctaacctagccctgagggtgtgacagcatgctgctcagaggaagggaggcttaaactgaagacctgaaggatgagtgggaattgcagagctggaaagagtgttcttggcagggataacagcgtgagagcatggcaggctcagaaaagggaaagcagttccacagagagacgggactgagaggtggcagcagccgggtcgtggaagcctttggacccctccttaggggaaagggggccactggaggggtttaagcagggaaacggcataatcagttttggtttttaagctcagtttcctcttttgtacgatgccaacagtagcacaccctgcacagtgttaagaggacttaatggaataatgtgtggtactactaacttcaccagcctctccatgcagcccaccacagtatgtggctgtgtttacaaacagaggtgggatcgctaggaccctcattccctaaggagagcctgatacagatactgcaagaaaccatttggcctggaatgcacatatgatatctttctctttttactggcagcagatttacccgcctaattatatttggcagaggctaatattaaaattcatctgcattccctcgaacagctgctgtcagaaggttgtggactcaaacatcttggcaagcaaccctgagactaaaatatttgcagcagataatctgtacgtggacgattgagaaaggactgtggatatgtcagggcgagcatccagactctagcaaggaagttctggcttgtgttaaatcttacattgtattcactgagaagaacttgccaggtaactaggctaagagaggggtctgccatgcaattgaattgttagtaatttctggtctttagtggggctgatttagtcataactgtgtttcaaatttgtctcttctttccaagtttcatatgcaccaggcctttctggattgtgttaagataagctggcatttactggtatcatcccaggtttggatttttatgtaaatttcaactccccacctccccatggcacttcccagtctccatcaaggcagaaggtatggcatatttgttatgtagccaagcttccttatgcctacctgtagaatgtgctgtagttcagcaggcctggcggaatctctgccctgtgcacgtatgggaagtgctaggcattgggcaacccgggagcagaagcctagaaggcgccagatctcaagaaacttgctttctggctgtgcagatgtggaggctcctgtgaagcaatcagaaggtcccagataggactgtacagaataaagtgctagactgaatggcgggagacagcaccccactagctccggatgcattcatgcaaattagaaaaaagctgcccctcctcaagacacctttctgccatctgtccaaaggatgtcataagcaatacacatatctagggtattggtcatatgagtggcaccacctggggttgtacagtgcacagcctgcttcttggatccggtctcctagtgacctcaagtgaccccagaccaaggggaagagccccgaggagctcaccctgttgtactgttgaggaggacaggtctgttttatttcacaggccttcttctcttgctgtttgggtggcgccagctgtcagcagcttgggctgggtgggctgtgccatcctgctccctgggtcactgccatttgccagggtaaacagtcccgagtgactgtggctctcacagcatgcggtccccaaggagcctcccattgggcccatggggaggcgggaggggtgtctagacccacagtcaaagttgtcaccattcaggtatttcctcactcttcttctttcgctctctcttcctccccacccctcccttttttaaactgggggaggggagagggaagagactgtctttgatctcagcggaggaaaaaagtctgttcaggcttttggctaacacaacaaacagtgtttaaaatttaactttgcttaattaattagtaattctgtttaatgctgtctgatctccctccaaaaggtattttgaagcttgagaagggaacatcaaagggagccgggtgaagatggtcaagtaatgcctttaatctggcagttgctgagggtggagagctgccaggctgggagctaatggggagagaaccgtcatttggtaaacacagcaagctgactcctcgtggctgtggtgtgaggagggacagggagcagtttccaaagagagggaactccacaaaccattaccaaccccccagattcatatgggctgacaataggccttaagaaagcagagttgacattttctttcttccacagccactgtatggttgggcaggttgtgtactgcacaaggatttccagccaagcaggcaagtaataggtgaaactgtctgtgccctgctcatcaagcacatatcctggtggaagtagagggtggcacacatctaaagcagcaatcaatccacagactttttcatgaagggccggatagtatgtattttagactttgtgggctctgttgcaacagttcaactctgctgtcacagagtgaaagaagccatggacaatgcagatgagcatggctgtgtcccaataaaactttatttacaaaaacaggaggtgggccaggtttggctcagcaagtgtagtttgccacctcctgctctaagtcacccaaaagtgcttcttaggcaagtgaaaggccttttttccccacccggtctcctgctttccttttttcttccaaatgagcagtgtctcctatagttcctcagactttcaattgaagagtgatcagtatgatcagcaccccctgaaattaggcccccaaaagataatttctcaagcggaaaaatggctgggctaaacaggaatcagaggcagagaatggactcagactctggtgccaaagctgatctcaactatcatcattgcaatcccccttggtgtggcctgggtggcctgcagcgagcaccagtccgcctctcccgcctccagtgggcctgcactcactgatgggtggagggtggtttcttctgcacagggctggctgggggctgtggtggcttgacttagtttagtttcagagggctcatatgtggatgaggcctggcgcctgcccctggcattggggtctgcatggccagttctctgccacctcttctagctactggttaggggacaataagagggtgaacgaccttctttggtggggatagagagtgctgactgtccttgttcctgacccccacagccccagggcaggatggatcacaggccccatgctgggaggggcccctggcgggttcactgaccgtcggctgacctgtggatgtccgtgtggctttctgagctgggatgggatgagggagccactggtgaagagaggacaatccgggccacactggtctttggggaagacatatgaggggtcgagggggatgttttccagccccttcaggtgaggagaaaggaaggaaaggggaggtcctgagggaagacaggctgtccgtgcacggtggaggaagagtgctccagaggaggagagagcagggacagaggttccttttctttggattttatcaagtggaacatgaaaggcaacattgaacctgaaggtggttttctgataacttccctttgaacttgaagtttggtttcgacaagcctggccagcttgcatctccagccaggacctctgcagagagaggcagcagctttgaagatggagctgggctttgtttttctttcttctttttctttctcttctttccctctgcttgggaggggtgagtagaggatgctgcaggccgtgatattactctggtttctccggtggggcagtttggggtcaagcaggatcgttgggatctgggctgtcagctggcacacatccttggcaaagccagcatttgttgagcacttactgcgtgccggccactgtgctcagtaagcactttcctcattgccctttcccaacagccctgtgaaagtgaggccatcatattcccattttacagacaaggggactgaggtccagaggagtcaagggccttgtccaaagctgcccgcacaggctgtatgtatttaatataatgcttttgtgtccatttgcattcgtgaagcctcagttttgagaaaacttagctgctaactgagctgttcccaggagtcagtggggtggggccatcagtctcctgactgttactacttatggccagacctagtgcactgggggtcttagccccttatgatcagagtttgttggatccacataagaatcctctggggaaggggttggtagcttcctcattttacggttggggaaactgagacatctagagaaggtatgtgatccacccagggtcacacagtgccagagaacagaacccacgtggagatgaccactgccctggctggctggcctccatgagagagagagaggcaggctgagagaagcaccaagtctcccgaattgagccatgaaaggcatggaggggcagcctagtggactgactgtgagcattattcaggctacctgggttcaaatcccagttctgtcatttactagcgaggcacttatcctctccaagcctcagtttccccatctggaaaatggaggtaatcgtaataactgcctcacagggcttcatgaggatggacttggtaaacagcaagtgcttagtcattgctgcctcatctttatgtacagtggcgccaaggcgcaaggacaccaggggaagtgccttagttaattgcagaggagagagctcccagttcgcaggaccagagcagagcaggagagctggggcccaggcccactgggggcatctccactgtgcctggcccagggactgcccttgggtccttgcttgcaaagctggggtgtgtgagtgtggtgggagtgtgggatcggagagacacaaatcccccatctagtttcctggcccagcggcctcatttctccaggctgctgacttcccaagaaagtcctgccttgccttcctctctgactggggagtctcagcacctcacatgaccccctggccacccttgggtcagggtggaggggccagggtcccttcccggagtaggagccaggctgtttcttcacctttaaaacaggacaacaaatttactaccccagggcaacagaaggaatcagatgagaggagctgtgagtgtggcctggaaaagatgtctccggcaaaccccagcccctctatctgacagagacaaaatggcggaagggactaaaggaggcttatgggacattccaagaattgatggcactttgtagtcgggatcctaggtcaaggacaatgatgctacccggagctggcatcctcaggaaaatagtgtcagtaggtcctgggatttcacactcaccctcccacatttcctggcaggccacacacaggaccgtgacctttggcagagaggggaggacctggggtgagcagaggccaaatgcaaggttcaggatgagcgtgctccctgaagatgccttttgtgtatgtgtgagtgtgtgtgcatgtgtgagtgtgcatatgtgtgcaagcaggtgtgatgcatgagtgtacatatgtctgcatgtgcgtgtgtatgtgtgtccatgtgcgcttgtgcatacatgtatgtggacggtgcatgtgtgcacttctttgccaacccagttgaactctgtttctggcactcctcctggccatccaccaaggtgccgtaggctgtgctcaggtgggtggcacctttgaggaggccaaaatgtcaacacagaaggcagtgagactgcagaaaatggccatggtccctaagctccctcgctgggctccagaagcacccctccactctcatccatctgccctctggcctgacactgctctgggtggctgtgtgcctccatagggcagaagtcataggctggtgggggcctgagggggccccccacggtgcaagtgggtgcaccatgttgggggaaggtcttcccaggcagtaccaggtgccagagtagtgtgatgttgaccccagcaaatgggcagggcaggagcgggcccagccccctggcgagaatgtccaggccaggcatggaggacaaaggtgcagtgagcatggctgcccggcgtctggaccctgctcctaatgctccctcgcctgcctccccgacagtggccctgcctcctgagaagactgacgggctgggcagcggagatgagaagaagatggagagagtgagcgaaccctgcccaggctccaagaagcagctgaagtttgaagtaagtttccttttggtgctgggtcctgaggagatgagatgggttttctcagcttggggctttgggaggagggaagctgaggctcttccagacaggaaggcccctcccctgcatgaacagcaccctctgtgggaggttccttctgccacatctggggccgtcctggctcagggcagaccccagggactcaccgctgcccaccccctcagcccagccccagcccctccatgcgggctgtgcccagcagcttgggagagggcatgagagtagacgagggaggcaggactctggcccttctgttgctgtcacctctctgggcctcagtttcctcggtgaaaccttcccttccaactcttgaggctgttctgggggtgcctgtgggggatctcaggtgggatggatgaacaggaggtacgggcaggaccctgacgctctctgggcctgagtttccccatgtgggcaccaccaaggatgtgcctccgtgtggctctgtgcagtgcttagaggagggagtagcagctgtgggcagaggttggtgaggctctgagcgtaggggtaggagttgggagagggatgtacaagggagtctttgggaaaagaagggcctttggggtgagaaggggacagttgagtgccccagacccagtggctgcacagtctgttccccaccgcctgatagtgtagcacgctcctgtgcccccagcacagtggccagtgctgagagccaggcccaggcctgctgcatggagcttccccactgctctgccctccttgctccctccctccttccctctgtttgccttcctgagaccaccagggcatagctctagagtcagcaggcctgggttcaaatcctggctatacacttagtagctctgagactttggggcaagttccctaaagtctcagtggcctcacgtgcctcgcctgtaaggtggggataatggtgatgtctgtcgcattgggctgttgtcagcagcatgagttcgtgcgcctaaaggtctaaagtgcttaagagggtgcccctctttctcaccaatgctgattggcaccggctaattgccagggtacccagcttagactgggtgtggttcctgccgtcaaggagtgcacagtgtgaccaggggacagttgagcgccccaaacccagtggctgcacagtcagtgatgagatgagatctgggagcctggagtggggtcaggccgaggggtgtggggtaacggacacttggcatttccaggctctgtgcggtgcctggaggagggaacagcggctgtggatagagactggggaggtgggtgaggctctgagcataggggtaggagttgggagaggggtgcacaggggagcctttggggtgagaagggcctatcaggcagagggagctgcaggagcaaaggcctggaggctgaagtgccggcgtgctgtgtggagagagtgagtggcgtgatgtggcctgtgctggatggtgggacatgggggagacgccctgtgtgcagggtctctggtgaccgatcttaccccctttccagtgtcatctccctgccatgccccgaccatcctgacaggccacacaccacacagcttgttctccccacacagcacaggagcactccagcctccaagaggcttgaaggctcgcctgaggaggataggtagtatctagtaggagttagggctgccagcttcttcctggagcccagccccgccctaagcccacctgggtccttgtagggtcttttggggagcttggcaaagcccagggctgaactcagtggcagaaggaagaccaggcccaggcatcctgcctccctggaagcccaagtgcgcttgcttctggaggggcagacttgggactgagctgtggtccatgggcaggactcaactgagctgagaagcccaggtggggtgtgggagaggcctaggagacccgcatgtgacaggtgggacaagtggccagttactcaactcatgtttctgaagctcagacccaagctgtcttggaaacaggtaagtgctgtgtgtgtgtgtgtgtgtgtgtgtgtgtgtgtgtgtgtgtgtacacaggtatgtgagcgtaggatgtgcacgtataggggtatacctgtgtaggtatgcgtgtgtgtaggtacgtgtgtaggggtatgcgtgtgtgtgtgtgtgtaggggtatgtatgtaggcacgtgtgtcatgccacatgaacagtgcctcagagagcaatgagggcccttggcagttatcaaacgggtgtggctgaagcaaggttggctttgaactcagcgtgggcgcccgagaattgctggagggaaatggcttagagctgcagcagccagggtcaggacgccgtgctggggctcactccactagcatttgtaggcaggtgcctttccctctctggggagctgagccttcctcctgccaggccagccaggtgccaccttcctgatggtggaaggagaggtggagtttggcatgccatggaacagaatggtcttgtttccatagaatcttatggatctgaaaggccatttgtggagccctttcctgctgaacagcatgcttcctagaactgtctatctgacactcagccagcctctgcacacagccctccggtgaccagctcaccacttcgcgtctcacattccctggggtcagacacttcaggttgctgaaaatgataataatgaaatgattgtttcattgattattgattgaaataattatttcaatgactgttaatcattacagcaaaaataacagctactaccattgattgagcttttccatgtgccagacagtgctccaagcatgggtgtaaaggacaccagcatttaccctccacttcctgtttccaattcccataagcagacctgaccacatggcactgggagcaggcagtgtgtaggggaggcgatcctggggcgcaggtgcgaggaaggaggaaagccagtgaaggctgggttcatctgtgggctctgcctgctggagagcctcctaggagccatgtagcatgcgctcagatttgtcccagggaggggtgaggaggcctggcgtttccactgcctcctgtccctcccttgttccgttgcctctgggcattccttcccaggctcttcagggctgccctgagacagaaaagtgtacatgaggtgggaggtcgggaactgtccccaccacagctgcagggaaacagctgggctgagggcatgtgggtggggcatttaatcttcccagcaacctcgtgggagagaggctgtcattttccataatgtatacaaagagaaactgaggcacagcagagggcagtgacatgcccagggtcacacagctgtggaggggcctgcaggggctggatcccggggctgaccgacacccgaacccctcatgctcatgctgtcctaccctggcatcctcctggggctcccaaattgccgctcctttgccttctagttgcttcttgcccttggtccaagttcagcttttctgaggccacagtgcctcttctcagaaccccctgtgtttcctttgtctttgaagacccacagaccaccaggcacccctgcaggcatccctccccaggccaaacctcccctgcccgggctctggctgccctcctgggccagttctgtcttggccaaagtgctccctgtccactcaaggtctggggagggcagaggacaggtggccgccccttggcctggcctctaggcccaggcttccactacccagtcagtgttgccacagataggggaccagccccgcccatctctctgcatccaggagctccagtgcgacgtgtccatggaggaggacagccggcaggagtggaccttcaccctgtatgactttgacaacaacggcaaggtcacccgagaggtgagtgcacctgcctggcctcttgccgtgtatcatacccgcaggcacagggcctgggcacagcaccctgccactgccacttctctcccctgcatcggtcctgcccctcagggaaggccgtaacagccagggagttgctgggagctcctgcgagatctggaggggcatcccagagctgctggcaagtgggaagagaagacagggagggaaggcagctcccctgctctcagcccaggcactgtccctcccgggaaagaagttggggggggcaggtgcagagccctagggcctctctggagatggccccaaggccctaaccgagtcctgtcctgcttccctctctccacagtcccagagctctaggggtggggctggcaccaccacaggccacctcccttgctcagccatgctgcccaggagcttgggggtgggggcacaaagaggccacacagcgccttgttttgaggctacaggaatgagcacctccagtgctaagggccctgccagtggctctgcagtcacagctctggtcacagcctcgtcccaaacctcttcttccttatccctctgcaggccggtctctctcgctcagggccctcctcctgcagctctctccttcctgcctgtgtctttgcatattgagcaccaactgtatgcatctgttgggtgctaggtactaggcatgaggacacagcagggaacaaaacagacacgttcctcgccctggagctttgaccttctgacaagaggcagatccaaacaattgtaggataactgtgagcggtgatgtgttcagtgaaggaaataaacaggtgctgggacagagactggctggaaggtccaggggaggcctcctggagggtccaggggaggcctcctgaaggaggcggcaagggagctgagacatgcagcatgcacagccttgggggagtcctgggcaggcagacgccaggggctcagggtgtttaaggaactgaaggaggtggccgtggtggccaatcagcagaagagacacagatgtggctggggatccagcagggccagacttctggggccttggaggccctggcaggcaacctggatttgatttcaggtcctgagggcaccgctggagggttggtatccttccttacacttcctcattccttttcctcccctgtccctctctgatgacctgtccctccccgagaggaccccatcttcaggcacgagacctgttatagatctgaggttacatgcacctgcgcggcggtcgcaggttagcacgtctgggctccacttgcttcttgtccagcatgtgggggcctcatgttcccagagagacactaaagctttgctgactggtctcctcatcctgggtcaggacgagtgttttcttctctgtggatagggcaggagaagttcacctttatgctgccatatgtgaattctgggttaacaaggtcacctcctcctcaggctgtggttttcgggctgtttcaacaggttggaggaggaagttgtgacttttaagcacccaggactctgacatgtaagtgacagaatacatgctccaactgctgtattcgaaaaaaaaaagaaatagattggctcatgtaactgaaatttggtccggggtctgactttggggatggcttgacccagaggctcagtggcttcaggacaaggtgttcatcactgctctgtttcctcagtctatttcctctattcctcagctctatttcccttcttgtgaggcagactctccccttggcagtagcaagatgattgctgacagtttccacctgcgttgtccttcactgctttgataatgagaggaagggagagagggtttccaaggaaggtggcccagcccggccctggagaaagtgttcactgggtcatgtcttcctcccaccgaggagccagggagtggttttgagtggagggaggactggtctggtgtttccctggtctatttttagccctgacgccacccctcaaatttggctgtaaatacagttcccttccacgccttctgagtgccagggcagatgggctcccacctcacggcatctgcagcccagagctggggtgtgggccagctttccaatcagaaagaagacctgctcccccttcaggcgttcgttcatgcaggaaatactgagcacaccgattcctacgtgtctgccctgtgtagtcagtgaggttgattttcaagctagaattgccaaagcacataggctctgagaccctcggtctgctgggaccacccccatcctgatcacacaccagggctccaggtcctctaaggtatcagaagtttgggggatgaagtgagcggccatcagctgcctcatctgtataatgaaacctccttcatgggctgcccaagatagagagagtgagcaaatggggccttatggagaagccagagggaagaaaaggaggcacaaggagagtcctctgcgggcctcgtcgaaagaagtgggatccctccccgagatgagcaaggcagctagggagtgcctggagcctgggtctcaaacttatggcccccacaatttcaatctggcccccagatgttctggtctggtcccgcaaagggttttgttaaaaatcagttgccaagatcagcaattttgaagatttaacagaagatcctggatttctggcttttctgtgtgaccccctcccacctgcattgtcaaaggacaagtcaactgagctgagcggccgtgcctcccaggacagggtcagcgcctctgtcggcccccattactctggaccactcacccacatgcctgcctggctggggctgcgctggggttgcctcagctgcttcagcctgtgggacttacaggcaggaggtgaaggattgctgggcaggtaactgaccatggatggggttgcttcatagagaaaaaatgtcttctccagaggtttccaatgccatttaaagcaggacattgccctgcaccccaacaccagacaagtgaccacagcagatacccagatagaaagggcctagtgaggagaatcggtgccctccagtcccaatcagaagggtttgagacacctggaagacattgtatggacacccctgttctggttgaggggtacctgaggctcggagaggagatgagatttggtcaagttctcacaaattagttttatcttttagggacagtctcagccagctcaagctgccgtaataaaatactacagactgggtggcttagcagaaatttattcctcacggttctggaggctggaagtccaagaccaaggggacacctgcttcagttcctggtgagggctcgcttcctggcttgcagacggccaccttctcactgtgccctcatgtggtggagagacctcttctagtgtctcttccttttttttttttttttattttaaacaagagatgggatcttgcactgttgcccaggctggagtgcagtggtgtgctcacggctcactgcagcctcaaactcctaggctcaaatgatcctcccacctcagccttccaagtagctgggactacaggtgtgcaccaccacacatggctattttttattttttatttttgtagagaatgttatgttgcccaggctggtcttgaacttctgggctgaagtgatcctcccactttggcctcccaaagtgctgggattccaggtgtgagccatatccctagctctcctcttcttctaagggccctgatcctatcatggtcccgccttcatgacctcgtttaaccttagttatctccttactccgaatacaatcacattgggggttagggcttcaacctgtggatttgcaagtgagtggggagccacagtttagcccatagcagggacacatctccctttccatttttcatttcgaacccgaagcagatgctgttgatgcccccactccattttccctgggtccacctcaaagttcacctgctgccatggtggatggtgcccactgtaagagctttctcaggtacaaggagttggcttggcccctgcagggaagcccaaaagcacaagggagggttgggcacagtggctcatggctcacatctgtaatcccaacacttagggaggctgaggctggaggatcgcttgggactgggagttcaagtctgcagtgagccatgatcacacccctgcactccagcctgggtgacagagtgagacccccatctcaaacaaacaaacaaaaatccaaagtacagggaatgtagtagtatccttggggagctctcaggcagtgaggaatgagagtccatttctaaaccctccctctatctagaagaggctgttccaaggtgggctccacacactccctccagggccccagtgcgactgagccccagttgtccctggatgtaacctgcccttttccttttctcttatgggattttcctgttctctctccctgctccctcatttctgcttcctaggatctcctcccaaacgaacctcagacatccaggtttctgccttagatctgctttggggcagccagaggggttcaggcctgcagcgtccaccaggccctctggtttgtattttcaaggccctgtgactgaaaccctgcatgggtctccgcttccctcccattcaggacatcaccagcttgctgcacaccatctatgaggtggtggactcctctgtcaaccactccccaacatccagcaagatgctgcgggtaaagctcaccgtggcccccgatggcagccagagcaagaggagcgtccttgtcaatcaggctggtgagggctgcagggctgagcctgggaaacaatgtcctcccatctcaggaaggaacagagccttcctgggagggccggaagggaacctgtgggctttctggggcagctgctttgtggacaggtggggttcaaatgggtccttgaaagggtaggaggaagggtgggaaggggagggaagggattctgggtgagaggcctcatataggcagagccatgcagctggagtgaaggctggtgttacgggcagcatggcgtctgcaagccttgaggccagctggaaggaggtgaggctggagggggagtctgggggaggaggtgaggctagatggggatgtgtccagggcaggtagccttgagacccctttatttagccccagctcagggaaccctcccacagtggccttgcaaagcagctgcacgccaggcagccctggggagggtgggagcaggcagctcacctggtgtctcctgtgcttctcgggccggactcagacctgcagagcgcaaggccccgagcagagaccaagcccactgaggacctgcggagctgggagaagaagcagcgagccccgctcaggtatgtgggcatggtgcacatgagcatatgttgagcaccagctgtgtacctgcttctgaaggattcagagcaggaagttttgctctggtctgtgttctcttcagggagccaacacttttgatgcacagactcataaatcaaatgaaaatcttaacaaataactacatgtagtccacatccttttatggaacacatcttgggcagacaggactggaggtcagcattttttgggctttggaaaggtgctctcagcagtgcatcaggctctgacgtgttgctgtttctgctgggagatgactgaatattcacactaagtgagataaagaccgtaaacaccttcccatccctttagggtgggcctggctgccacgtgggttatgaaaactcttagttttcaggctttttggacttcagaatggtggataaggaattatgaggctgtagttacctttcacctgttacttcttcagctgcaagggaggaagggaggaaaggaaagagagattgtttaaagaaagggattgagtaaacaacagtaacacggcaggcataaggctgtgttaacctctagtgtgcaaatggtaagggaatgatcggagctggattagtactcgctaggggaaagaaaaaacagttcaagcagggtcacagccaggtgtggggacagggctgagaatcagagggacccaggctggctagagatcctgggggaaggtggtactgtgttgtgtgggaaggaagccaggagggagcagatcgaagaggtccttggaggagagggctagggagccccgagccctgcaggggaaaaagaaagcctctggcagcatctctccccacccctccatgcacactgtgtaagtcacacatgcatgtgcacacacacactcacacactggtgaggcccatcctgggccgtagggcaggtcatggggtctgcctggcccaaccccaacagtttaaggggattctgctgcccacaccccctgaggaaccaggccaggggttaggccgcctacctgcagtgggcacatatggcttgaagcctggcactggggcattcctagaagttgaccaataacctctcacgtttgctttgaacctgttcagagcaaaaccccgtccactcctcccagaagctgcggggaggtcgggctgtgggctgtggtctatggtctgtctctccatcggcaaggagggaaatggaggcacagttcgtatagaggactgttcctccccaccctctccaaaggccaagaaggaaatgaatgaagggtccagagttcattctgggggcttcctagtagcctatgcgcttgcccccacctggtggttggtgttatcccactcacttgcctcccctgccgtaggttccagggtgacagccgcctggagcagtctggctgctaccaccattgcgtagatgagaacatcgagaggagaaaccactacttagatctcgccgggatagaaaactacacgtcccaatttgggcctggtaagggactcaagcaccctgcaatgggcgatgagggcagggcgtggctggacgggccaggcgggccgtgcgggtggtgttcactgctaccccaggcttcggtaagacaactattatgggacaggtcaaagacttcttggagaaagtgacgttaaaaatggtttcaaaattaaagtaatacatgcacgaaatcgaacaaaatccaatagtatctaaaggcttagcacccaatgacaaacaacagttttgtgccccatcccagcccacccaagccctgttcccggggcaaccactttgacctctcctggctgtttcttccagcaagaacctcggtttccctaagtacagcactactgtgtctttatcagccttgacatatgttgacctcttgctcaatttcactcccacaactcccttctcccctttctcttcatatgtttaattcctctatgagttacttctgtatgtttttagcaatatacttagagttctttcttgccccagtgaccttagatagttttcggggtctctgctgccatctgtctttctcggctccctctcggagagtatttttgaagacctaccaaagaaccagttcttcccacttagcagatgggaaagttccatttcagagagttttcctgcaaggcagtgaggggcagtcagggcattggggggtagctctggttttggagaactgggggcgggggtgatgtctggggtatagcgcaagccccagcacacagtaggtgctcattaaatgtctgttgaattggttcctaggctccccttccgtggcccagaagtcagaactgcccccccgcacctccaatcccactcgatctcgctcccatgagccggaagccatccacatcccacaccgaaagccccaaggcgtggacccggcctccttccacttccttgacaccccaatcgccaaggtctcagagctccagcaacggctccggggcacccaggacgggagcaagcactttgtgaggtcccccaaggcccagggcaagagtgtgggtgtgggccacgtggccagaggggcaagaaacaagccccctctgggacccgccatccctgcggtgtccccctccgcccacctggctgccagcccggccctcctcccctccctagcccccctcgggcacaagaagcacaagcaccgagccaaggagagccagcagggctgccggggcctgcaggcaccactggcctcaggtggccctgtcctggggcgggagcacctgcgggagctgcccgccttggtggtgtatgagagccaggccgggcagccggtccagagacatgagcaccaccaccaccatgaacatcaccaccattaccaccacttctaccagacatagagcccctccccagggccccaccctgccatatgaaggaccccacccccgacaccacaaggcattattattctattaattattgttattatgatgattattgttattaataattattgttactccactaatatttagctagcctacatgtagaagatctatggaaacacagaactaaacttttatttatatgttgtggggactgcataactagcccaggaaatgactctggttttgagtggcctgtaatgggcagaggctccctcggggctcgggatctgcagcatctatgtggatcagcccacacccttcccagagccagggagcccttagcctcaactctgccccaccccagcctcttccaggagagcacccttacttggcccggcttccagagaccctcgaaatctccgagaagataaacagctgctacctcttagtattattctgattttattttgcccttaactgattgttatatgctacaagggatttcagtggactgcagagtgcgaacgtcttgctgttgtgtttttatgtcccaacctagaaaccttagctgtcttttctggagttgtctttcatgcttttccagtgggatcaagcccttttccccaagagtcccatctcttctgccatgcacgacatgaaaatccacttctcttccttctccttcttctctctctactttacagtgatacacacacgtatttaaggactatccctgagaccatccttctcattttggaaactgctagggagggaaccaaccacttaaacaagcgtggttttccaagatccaggcaattgtgtgctgttggttgtggtggaggatgtggcacatatatacgtacctacacggttctctaacagagctttctgtatctatagatagatgccatctgtccatttctatgtatctttctataaatatacactctcaggtatcttttctggtgtgtataaatcagtggtttgcttccctggatgcttctggaacccagatgtgaccctgcttgtctccttttggggctggacggctctcagatgctttcatcagaggtccattctcgggttttggggtctgatggattttggagagaactgctggggtacagaaacttggtgggaaaaggggactgtggccagagttgggaccctggagcagcatcctctgcagagaaggattttgtctggccagagcctggagaaacctgaaaaagaaccagtcagctagccagggtctcagagaaaagcagattacacactcaaattgggtaatttgagcagagcttaataaaggcagtatttacaaagtgtgggctaagcctcccatgagagtgcagaaccctggggctagcagtgtggggcgctattcccacccctgggcctgagtggggaaggagttatctttagcagacagaggattgctggaggagtgagaggggcacctgaaggagctgtgacctttgcttaaaggatgcagccagtcatggggaccctccagggaaattaatatcctgacctgctttcctgccccccagccccctcaatccattggctgaggccgctggaagccaccgggccaagggagcttgttgatgtgggtcacacgggcatgttcccaggtcagagaggagagtggagagtgaatctagggagactcaagagggagaagtgactccagctaccttcctttctgccgttttgtctcccagctggcattctcttttccagagcctcgagtttgggtttaatgtagttagtaaggagttacttccaaaggtagtgggcttagttgtcaccgtattcttaattttattaatgactgatgtgcctgggattggattaatacattaatccttaggacagccccatgaggcagcttggtggcagctcaggaagcatgtctaaggctcagaagttcataactcccttgaggccgcacagagggcggagctggaattctggtctcccactcgatcccttcgccactggtgcagagcttaatcacggccatgggctgcccttgttttgggttgtgggtttctgttcagtgagaacgcaactcaatccaaagtgaatgaaaccaagttggaaggcagggagggaactggctttgagatgacagggtccaggatgtgaatgcagctgagactggttcttgtccctccctcttgtccctcggattgataacttgtactcaactacatgcttttgtcagggaaccctggctgctggccttctgggtcccctaaccataagaaaaaggaccttccgttagtgtaaagcccaaggcaggattctgcttggctgggcttcgatctggtacccatagctggaccaatcatgacatcccagatggggtcacgtggccaacctgccgcaagggggtggggtctgtaccggaagacaggaggggaggggtgcagatcggacaggaagtaatggcatcccaggccccgaattgctgcaaccctggaggccagcccggagttgagactactggttttagagcagttcctctgcctccctaagctccacacctgtcaggattctgttacttcttggtaactgggacttgcccaactttaaaaacattatttaaaaaaatagtaatgtgcacatgtaaaagattcaaatagtatatatacaaggtgtacagtaaaaagtaaacttccctccatcccaggcctgccagcatccctgatgccgactttctgggtgtggcctagggcccctcagtgtaatgtaggggttgtgagcacagactttggtgccagtttgctaggttcgaatcctgactccctctttgtagctctgtgcttcaattgaaatactgtgcctcagtttctcctttataaaggcagggatcatgagagtgcctgtcccttgtgagcactatgaaagtgttagctgttctttaccagaataaatgcatttctatatcttcccatatgcattttgttaatttttaaagtatttcaaacacaaagtttgaaacagaaaattgtgtaacattaactatgaacttaccacccagaatttacaaatgctgacattttgcaatatttatttcggatctatttttaagggggggaaccctgcagttactgcttaatcctcttcccaccccacccttttatttttacacaaggagcatagtgttcatacttatgctatttttttcagtaactgaatatatttggagatctccctccctaggtcatagagctctgcccccttctctctaacagctgctcagccttctgtgactagaggtgctgtcaccagcttgccccatcccctcctggtggtcataagggtcatctctcatcccaggctctggcgaacactgtgctgagagtccttgcatacagctctcccggtgcccacaggcaggaacacaggcgacagaaagtttccacgtggaactgcagagttcaagagcaagtgtgatttcaattttgatgagattgtacatgacctctaaaagaggttatactggccgggcacggtggctcacgcctgtaatctcaacactttgggagaccgaggtgggtggatcacctgaggtcaggagttcgagaccaacctgggcaacatggtgaaaccccgtttctactaaaaatacaaaaaattagctgggcatggtggtgcgtgcctgtaatctcagctactcgggaggccaaggcacgagaatcgcttgaacctgggaggcagagattgcagtgagctaagattgcaccactgtactccagcctgggcgacagagtgagactccatctcaaataaataaagaggttatactgaataatgaggaatcaaaggaagaagaagaaagagagaggaaggaaggttggaaggaaggaaggagggaaaattagaaggggaaaccatgattgctggtgaggttttgagcacattttcctgcaggctggtatgggtgagaggtttggtcttgtttgcaaatcttctgaaggccattccagaggagcagttgccactgccccatcccctgagctctgagcgtgggggttcccctggggagactcctggtgagaggatgccgatttctgctgatctgtcactgggtaccgaggactgggtgtgtttaaggcagacagccaggtgaggatcccagctactggggcctgctgtcatctcctgggagtacccgggggtcaggagcctaggggactcttgcacttcacatccagccatgctaattacactttttggcaaaggaaacagctaggagcagtttctttcactcctacagccccgttttctcagtgtttagacctcgaattattactgggctagagggaaggcagcctctgaagtgtggcaggaggaggggaagtctgcctgcatcttggtgtgtctgtcagatgccagcactaataacctggcttctgtgaggcctgtcagtgctctcaggaatgaaaggggacccctgagaggtgctcagtaccagcaggctgtgaatgctctctacccaccaccctcacctcctcgttaaagatggtgctacctgccacacagcagacatctggtcgctgcacacccgaaagaccccaaggcagtctgccccttgtccagccacacgccagcacccaccctcctggcccctgcctcggcctccccagaccagctgcacccagcccccaacacgcaccccttctccagatgtgtgcagggcctcattttgcagagcaaagacagatgtttcagccacacgctttattaacttctaaaacctgtgctcaggacactcttcaacagtcatgaaaagtttgatcacttgccacagtcaggacctttgtgtggggctctgatctgatgttcggtctcatcatctcccaaaccagcagtcgtttgtaccccaaccctctgctcaggggctcatacccccaaatgattttcctgatttatgtatttccctacaaagggctttctatacctagcatctgcctccagcatgagaagggggaataggtgagacccatttgccagtagcagacggggaccctggggagaaaatggcagagcctgttggagactccctgtctccagctgaccagccaatgggattcctcttccctccactgtctcccacaaagtagaagaatcctggtacatttagcccatgagcctggcacagatccctatctagacatgaggccctttagacatgactttggcattgaccagcctgttggcaatgggtcggggaggcagaggggatgctcacaccagtaattctcatcccctgaatgcttgggatcacctggggagagttcacaaaatactggtgcaggggtcccacctctgatgatgctgagtggtgggtctggggtgtggcccaggcatcatgatgtttcaggcccccaggtgacttcttaggcagcccagctaagcccctagagccttgcaatttcccccaaatgacctcagagggcccgatttgagggaaatgcctaacttcaggggccgtaagaatcccccagggagcatgtgaaatgcagataccaggcccacccccagagatgagctgaggtgggtcaggggtgaagtgcagggatcagtgtttttcacaagctccatacctccaggaaatggtgttgtggttgggcccgtagaaaacattctgagagtcctgttgcctgtgccttggtgcacgtggggtggaatcccagtggccctgccttgaggaggatgtgcattaacgtggtaggggagacagagacagctccacctgccccctgccccaccggggacctccaaaaacttcatggatgttagagcaagcagccatgctgcagcagaggatgaggctggcggatttagtaagagccctctgtgtttgggctgagttctttctctagttgccctgtcatctggcctctggataacccacctctcctccctcatcctaaaattacagatggcgaaagatggccacatttagtgagacccctaaggtcctccaactagggtgggtccacagtggcccctggtgcatggaccacacactctcttccctcctctggctcaggactacggtctgaaattagggagatatgaatgtctttcttgaaaacttctcttcccagtcttcccactttgcttgggggtccttggtcaaggccagctttggggactagggcttgttgcgactaccagctgtctcattttgctgtactgcaaactcaggcttggttccaagcttatgggggccctgtccttcccctagtagggtttgttttggggtcacatctggtcatacccttcagagagctcttccccagcctctacatcagggagagaggtaggtagggaggagcattcaaggattagaagaaggactaaagtacaacagccttggaggaactgccaggaactaagggcgagcactggagaaggcaacctgggaccccctgcgcttctgagcaggaagaccaagaccttcaggggccctaagcactgaaaacatcattcctcatccccaagccctggcatccccctgttcttctaaaataattcttttctaggtatttctgattgcaaaattctggatgggttcatccaagctgacctttgctgttttttcccttcccaacaaggcctcactttttggagccaccttagctggtgcctaggcagaggggcagtcagcagtggttatcaggatcctggctctatgggttgccttcctcctggtctgtaaagcccctgcaggcagggacttcttagatagctgcttccttagggcatggcatgtagtgggtggttaatgaatggaagagagggaatgagtgatcaagggagggaggagggagtggagtggagatttctcatcctttcctgttaatttatgacatcctcctgcctatgagtccttgactctggagttttacaaagcagtcacatttcaaataaaagtctgggaaagcaacacatcatcgccaacttttaattttgctaaataaggatattagaaaaagaatagaaaattgcagtcccttactgtttaaagaaaaaccaaaagaagttaaaaagaaaaaaaaaacaacctcattatgttgtctttgtttttgttttgttttctttccttggaaatcagtgaaagtttggtcagccacacattgtagtagggctagaatttttcttcccattttagagacgggagacctgagactccaggtgggggtgtggagtccaaatggacagttcttcccaaagctgagcgcagaccggcttgcaggtcctttttccagtcatggcctcagctgtctgcaaaggacttgggggaggctgacagctctgatgtctggagagggggcttctgcaacctccaacactggtcagtaactccacagaggccattggcgggggtggtctgcttgtatcagcaggcctgtcatggccagttcaatggtcggggctgaactatgtctcttggtgcctggtagaggggttggagtgggcctgaggccaacttgctcagagccacactccccaggaagctgtggagtctggaactctgccctgccttcctgtcccctgcccactctaagcctccagaagtcaatcctctgctcaccgggaccgtacctagcctggcccatcgatgtgtcatgtttgacccatcaagggtttcaaaaatttttaattaatttccaaaatctgagggtttcacctaaaaacctggatgtttggcttttctcataaaaatcagaaagtgggtttaccccaggctcctgttcccacatggctgcaatccgcccgcctcttccaatggtgcacatgccttttttcctgcgcccggagcccctctcagcctgattttgaggcctggctttgatgcgattcagctcatgacccctgcgcagcctcaagcacctaagttttggaggtcagtgatgccacttaaaaacctgttcagggcagagcgttagacaggaggatggctaagggagcagcttcaggcatgggaggactttcatggggaagtctttggggcagtcctggagaccctcacaatgtggccccactcctcctttagatggggcaaggtgggctggaacccccagcaaagggtcccaggctgtgtgagaccccgcccagcactccttaaacagccaagacaggtggaaagccccaactcaaaagactggctggattgtacccggctcagtgacttcccctctttgagactcagtttgcttttctgtaaagtggacctaatgaggcccgcttggcttcagctccagggactttggagatttaagcaaagcaagaaatgggaaaggagtttgttacatatcaggcttcctggaggaatgccccccagctctcttggagggggaagcaaaaagactgctgatcaggcaggggacgggaactccccgagtggccacatgggcagtctcagtaggagtctcaggccaggctctgtctgtggattcccacttctctgggctgcatctcactgttcaggctagagtctggtccttgcccatctgcaggtccaggaagatgtggccccaaattctctggacctgatgtcctagatcctgtgcacttggcttcatggatagagtctgagaaggttgcaggatccagtagctggaccacagaatgcagcctgggggtttggctaagatgagcagactggcccatggttgagactttggacctgagctgagtcctggttctactacttcctagatgtgtgacctgggacaagtgactcacctctgtgccttggtgtttttctctaacatggggctaattggggtaactaccttactgagctgttatgagtaaatgatccagtgggcgtgaagcgttcagcgcagagcctggcacgtaataggccctcgataagtaaaacagcaacagtagctgcagttaggagaatgtgaccccagaaggctcatgggaaaggaggtgcagtcctgatggatgaagggtacctgtcctccaccccggctgcagagcccccagtgagacagctgctgtggcatgctgcctctgctacacactcaaaaaacacttgaggacatgacttttccctctcaagtttgatgggatcactctgttccttccagacccgacttgtggtgtgaacttggacaagcccctgctgtctctggccttcagtaccatatttgtattatgaaactgcccttggcttgaagctagactatgggggtggcagctctaagtcctacaaacagtaggggtagtggtggggatgggcagcctgaaagccatgccagcagtgccttccttggggaaagaggtggcctctggagcaatgcttcgctaccctacatctgggtctgtccttgcccaactcctaagctgcaggatcgctgaggagtccacattgccatatctgccacttacagagtgcctactgtgcacccagcccacattcactagtgtcctcaaaacagccttgagaggaaaccaacgaggaaacagagttacagttcagttaagcaacttacctaacttgtagctaatgcatggtaggattaaacataagcctgacatatgctagccacatgaccctccctttccaggagcctgctggcattgatacaggttgacaaagaccagtcctactccgttgtctgccattactccagccaagtccagggacacgtgaggcaaggggagctggggctgctggtgtggccgagacctcagcctcagcaagatggtgccccaagctctcagggtgccctgtggtccccttcattcataacattgatcatgtttgtaactgtagttgattctcactcatcgcagtagttacatcttataaagtcacctctgacactgagttagcgcatactgaactactgatcctaggggaaatacagggttaggttcctgccagcttctggtcacaacattttcattaccaatcagtgcataaccttgttttatgtgtgcttctgtttaaagatgcctaatttactatatattcttgattcgttaacattgaactcagccaacagctctataactcatgactgaatgaagcttatctagcacacatattttctctgcaaggcatatcagagccttctgtgcttaagagcacaagatggcacttcagcgtcatgcctggggagcattttaagcagccaaatcaccaacacaaagcacaaacatgcacaaagcatgatgctaaacagactgtgagaaggatgtttgtgtataggatgagaactgaaccacgaaagcagagcatcatcttgttcgacctcagttgagaacatgttgtcgggccactcagacttttcactgctctgcgcatatcacgaatgaagtgaatgcaccatgagtattgattttgggtgatagacaaattttagtgaataggcaatttcgtaaatacagaatccacggagggtgaggatccaccgtatgtacttatctatgcctctaattatttggtttccaccaaagcacttgttcaccagattatcttataatcccaaaggcccagcaaagacaggtgcttgttcaatgtctgttgagcgactgaaggacaacacattcctggcctccccacccgcccccagcgggacctagcacatggcctgctgttgacactccatgtgtctttgttgatagaattcataaagacagatgggaaaaggggcacccctcttgcgggttcctgatgctgagagttgttggaatgttgatgctgcccccagagaagggtgacagcatgcagacagactggaaacccagaacctcctggggatattcagatggtgtcactgggctcggcctgtgggctctcagcacatctaggtactggggcccagggtgactctgagtggctcaagtcccctggccagatcctctccagatgggcccctggccatcttagccaacatcacctgattctgtttcctctgactctgtcctcaaaaggcagcatctgattgtgatttggtccagaaattcctggccagaatatttccagtgtggtgcatgtgaacttcccgccttcccttccttccctcctccctcctttcttcactggggagaaagaatttggcattcgagtatctcaccccgtcttgctaagcagtttagttagactgcaggccagtctctgtggtgtgaccaccccccagtggcaaggagctgccaaaactgagcttctgggcaagacgtgggcagagcaaagagagacccacacttggcacttcctgcccagaaaggacctgctcaggcctggctggcctttaccaccgtcatctccaggctttctgttcatccgtactttcaaagatttagtgatcaagtactatgtgtcaggaaccatgctcagcactcgataaaacagacatcatctctacctacctttgtggagctttaatctagtgtgggggacggggggactgcttccacccagaaacgacatttttatccactgcgataacttctggggagacatgggagggaataacagaggggacatgatggagatgggggactgcagagggactctccaggaagccacatttagggggtgacctcaagggtgaggaagaattagccaggtggaaagttagagggagcagctggtacaagggcctcaagggtggatggagggtgaacgcttgatgaactggtgcaggcctgtatggccgggtacagctggcaacgaggaggcccggtatgggcagaatctgggggcctgaatggtggagagtctgcttgtcaccccaagagacacatcaggaagctaggtggtcagtcgggagagagaggatgtgacactctagccaccaccacgcagagaagggattggaaacagtagcccggagaggaggctctcttggtaggatcccacggcaaccgaatggatgcacgttgtttatgacgttcttacccatgaaagcgctcaaggatccgcttgcttgcttacatgtgggatcagcactaccttccgtgctgccgaacatcttcttaagcgagggaaagaacaaaaagaaaagttggcaagaaagaaagggcaaagacagagagactgggagagaaagaggccccaatttcctctctctggtagttgctgaattggctctcgtgaaggcagaaagggaagggctgacttatgtccctctgccaggagaggggaaaggagggaggcatgatattgacttaaacgtgggggatttaaaaggcccctatgttcccactttgtgctttgcttctaacagacagcctgggacctttgaagtcggtctggcccagtggggagcgggcttctgtggagacaagatgctaacgggggcgggggaagggggccagggggcggccgaaactctattaggcatgctctagcaaaaagaaaggcaaatccaatgataatgtacatctgtttcagggaatttataagctttgaacattttttatgggcagataagtgggtccttttcttaccataacttagaacttcaaagctgagtgtgtggataatgcaaattgctgaaatatgagattttccctacaaagaggtttccaaaaaagacgaggaagaaaaagaggggggggggagagagaacgaaggctaactgatgccacagtcttttatgtacatggcaaaaacgggacagaaattgatttttatgaaagaagaaattgatgggagacatggcgtggggaggaggcggccttgtggcaggtgctgggaggcagggactggggccgggcgggtccacccaggctgtgggtcagccctgcagggttgagctgcctggctgtggctcaggccctggggacacagtgccctccctctaggagccttaatggggaaaacaagaacactgtcactcgtaatgggcatgaaaggacacttcagagccagccaaggcagtgtcagcccagaacaacaccctggaacacccaagggggctccaaggcaggatgggaccccctggtttgggaaaatcagaaaaggcctcctggaggagaggggctctagggggcaggtatgatcctgaagggaagacagtggggtgggacatttcagatggcaaaacagctgggtcaggatatccccagggtcatgcctctgccacccagaccccaccacattcagccctctgtgcttttcttgtctcccacatccccagccccagtaactagcagggacacagtcaacattcaatatgtgcatgttgaatgaatgaatgaatgaatgtgagatcgtgagaacacacagctggttggcaagcagcatcaaccagctctttcttttcactatattacatatctacagtggtagagtcatactagaagacatgatgggatggtggtgtggtctctgtagttgaccccatcatcctttctgtccataggtgattcgtctaagccagacatggcaaagtcctcacctttgccagtgactgattcaggaaagatcatgtgtgaccttattctgggcaatgagatctgaagggaagtctgttgaggaacttgtaacatgtcatggtagtggccatcttgctacagcctgaggaccacagagcacacacagagagtgctgggtccttgggaatgatgttgagcaagcacttatacatgacctggcagccacccagcatctgtactttagttatttggtttttctcaggaggagatcctgagatgaagactcaggagcaggttgttgattttgaggtggtcctgggaaagacagggaggagagtggggaagtgaggcagaaaaggaagggaagttccactccaggagcccacgtggaacatacctcagagttatcccacctgcacagggagggagctgaggtatttacccacccatccttgtcagtcattggtcaagggctatttctgtgcataggcataggcttcagcagaattgcaggtactggcagtcggaaattggaccagcaaacagaaatgattcctacaggggatacaagccaggcacaggcagtgtctgttacttggggttcctgttgcttagagttgaaagcatcataacccatcccaggtgatcatagaaggacctcaaaggaaaaggtgaggggtttggacatttcctgagaatccatgggggaaccattcagggtttggggcaggtgtcaaccacaagaacattaaacaggctcttttggcagcaaagttgggagtggtgttgaagtaactgggaaaactccacagaggctcagcgtccacctctacctgacaccctgccagcaacctgggtgatttccgcaggtgtctgaaccccgatctctcagtgttatggcccccaccaccaggaaggcctccttttctctcttctatagccactcactcctgggccccactgtgaacccagaaatgccacaccatggaagccacacactctgctgtctccttctgtcctcattcctgtccttctcacagtcagtccctcttggctcttcctagagtccctttcattccctcatttccacttcctgccgctgtactgtcacctgtggcctggatttgcactcttggtccaacaccctcaactccaacacctctgtctttctgccccatccactagacaaaagctgactctggaaaacattaggcactcagaatcaagggttctggggtcagatggataattgccatcatcctcaccaagttgccactggactttcttgcccctaaatccactgggcatttcattgctacctttcttgacttcttgattgtttttgtgatactgacacatcccccctttcagaacaccctctgcccttggattctgtgcacaggaagctagttgctcccctgaatacactctttcttccttgtaatacagcctctgattttgagcccaagaataaagactacagttctcagactccttcgcaaataaattttgtgactaaactctagtcaacagtaagtgtcatgtagcagctcctgggaatctcctttaaaaagagagcttgtttatacctattgtcatctctgttcttctgtgccccttcttccattttgctgcctggaaagcagatgtgatggctggaattccagtcaccattttggaccatgaggacaacaccctagagatgtggagtggctaaaagaagcctgtgttcctgagaacttagaggaccaggacctctattccaggcttggacacctacatttagactattatatgaggaagcaatcaacttctcacttgtttcaaccactttcacttgcagtcaaacctgaattgtaagtgaaattgctttcctgatagcaaacctgttggattttctccagaatccctgggccacttttagcagtcagattcgtctaatcctcctttaaagatggtggcagtgaaactggtacatgggacctgactgggctttgtttgcaactttctgataatttataattatttcaaaataaaaaaattttaaaaatagtggcgttgctcagatctcagtgctggctgcctggccttctccgtggactcacttcttgggatctcgtccactgccatgactgtctctaggttgctgccaacgagtcccaactacatgcctcaaaacaaactcatcatcttaccccaaaacctgctcctagctcagcagatggcaagacaatccaacaagtaacccagaccagaagcttgggtgccatccttgactcctctttccctcatcactccagttactgagaccttttccactctacccatcccctccataccctagcagagagtcctgtcggctctccccagcctggggacggttcctccactggccatgctgtctcccatcagtccccgcactgcagacaaaaagcacttttaaaaatgccaatctgggccgggtgcagtggctcatgcctgtaatcccagcactttggggggccgaggtgggtggatcacttgaggtcaggattcgagaccagcttgggcaacgtggtgaaatcctgtctctactagaatacaacaaatcactaggcgtggttgcacatccctgtaatcccagctactaaggaggctgaggcaggagaatcgcttgaaccaggaggtggagtttgcagtgagcagagatcacaccactgcactccaacctgggagacagggcaagactctgttaaaaaaaaaacaaaaaacaaaaaaccagcctggtgcagtggctcacacctataatcccagcactttgaaaggccgagacgggtggatcacctgaggtcaggagttcaagacgagcttggccaacatggtgaaaccccgtctctactaaaaatacaaaaaattagctgggcatggtggcaggtgcctgtaatcccagctactcggggggctgaggcagaagagtctcttgaacctgggaggcggaggttgcagtgagctgagatcacgccattgcattccagcctgggcaacaagagcaaaactccgtctcaaaacaaaacaaaaaacaaaaacaaaaacgccaatctgaccatggcacttcctactgcaaacccatctcattgccctcaggacaagggctcagctcccagcccagcagaccaggccctcaggagccactagctccctgtctcctgtctcctccatgactttctgcctttcccctctgacccactgccctgtgctccctgacaacccttaaacaatggaggactttcctttctcttccagcccagaatatgctgctccttctccctgcagtgcttgtcctcacctctcacctagctgctcctggcctgagcctgggttccccaaggcctggcctaagacagagacttgggggtaggtttttggtagggtgatgctcaagagaggagtgatggggcaggaggacaagagggcaggtgacaaagtgacatgagggtgccttgctgaggtcaccattagagaaagtggccctctaggatgaggacagagtgaccctggggtgtctggctgcagggcgaaaggctggagcatgtgtccactggccccagcctgagtcttgggggtgtctctgggggtgttgatgccccttcacttcctgcaggactggagaaggccccagggaatgggcaggaaggccaggtacagttctgctgggatgaggtgagtctgtgcttgctagactgtcctcaatagctgcagctgaaatgacaggtggccgtgggtctctagtacaactgcccccttccttcttcaagaccccgctcctccaggaagccctccctgacccccaagccttgggtagatgcccctcctgggcctcctgcagaggcctcagatcacagctgcctgtctgctgtccccacttagccataaatttctataaggcataaatgagatgaggtgatgggcttaaaataaggtaatggaaacaaagttggagccaaggggagagaactataaagacgatctgcatttatagaaggctgtaatagggtttgaacagtccagggcttgccgacccatggagctggggttggggtacagccacttccttgctctgggccctctgaggtgcgaggtgccatggtgccagaatcccaccaggcaaagccactctccagccttccaggcaaagcactgcccatttcatcctcacagcaaccttaggaggcagcctttctttttttttttttttttttttgagacggagtctcgctctgtcgcccaggccggattgcggactgcagtggggcaatctcggctcactgcaagctccgcttcccgggttcacgccattctcctgcctcagcctcccgagtagctgggactacaggcgcccgccaccgcgcccggctaattttttgtatttttagtagagacggggtttcaccttgttagccaggatggtctctcggctcactgcaagctccgcttcccgggttcacgccattctcctgcctcagcctcccgagtagctgggactacaggcgcccgccaccgcgcccggctaattttttgtatttttagtagagacggggtttcaccttgttagccaggatggtctcgatctcctgacctcatgatccacccgcctcggcctcccaaagtgctgggattacaggcgtgagccaccgcgcccggccaggaggcagcctttctatcacgtccattttattccagaggacggtaaagctgggaagttgtgtaagttgtctaaggcatttgacccaattaggtccaaagactctctcacctgctctctctctttctctctctccacccctcttctctgcacatctcctgatcacccaagaagaaggggctatggtggacatcatacccactcctgttccattggccaaaggaagtcatgtggccaagcccatggtatctgctgccatcccattggtcaaagcaagtcacatggcccaggctcatcatattaacttccatcccattggccaaagcaagtcacatggccaagctcatcctatctactcccatcctattggccaaactaagtcacgtggctaagttcatcatatccactcccatcccactggccaaagcaggccgcaccaccaagctcgttgcattcattcctctcccactggtgaaagcaagttacatggttgagctcatggcattcactcccatcccattggccaaagcaagtcacatggccaagcccaaaagccatggggtaggggagcactcttcatgccaaggggagagaagaagatgaaagtccactgaaaaacagtgacctccattatatatgcaaactcagggtgaggccctatcttgggcattagatgagctgagttgaaggctcagcatggccaacaatttgctctgcagtcctgaggaaaccgtttcccctctgtgagtctcagtttgcccgtgtctgcaatggggttaattacatcataagacaccggctgttgtgagcagcgagataatccccaaggctgctgacagtgagaaggagggctgcctagggtccaaagagatgcaagaggcagtggccagtttcctgtccacatcatccccccaacacatactggttcagattcagttccatctgagctgggctccagcttgaccaggtaccatgatggcagctgccgcctcacttccaacaccatctcccggaccacatgcctgctcacaaaccctttggaatacttcggaggccctcagtggcttcacgtctcatggccgagggtggattaggcggggtgcctagatgcggggaggacaggcaggccttcccttaaacagtcagccaagcatcacatgccgcctgtcaaaggggggtttcagatgcggggattatgaacaccaagagtacaatttcctgataaaatagaagaggcgattaagttaatgaaggctcattttgctgatttgaaaactataattaatagacattaattgtatatttagaagtttagtgtggcgtgggctcaggagccgttgtcaaacacaatgacgttgtaagtactgcataatagaccgagcccagatgttccccgaagcccctcacgagagctttgcaaggggcttctctaatgataaaagctgcctcttgctgttctgctcttcctttaatgacatcctttctgagacgatgcttatcactcgtgctttcatctttggttaaatagcatatggcctcagctgattaaaaacccctcctggttttaatcagcaactcgggatcaggtttctaatggtggccgtggtggccttaccagtcccatggtaaggtttttgaccacatctacatgtggagaaagggtggtgggagtgaggggcttggagctggccctgtctgggtcctgggttgaaggacagctgctgtggccctcctggaatgacctgagccagggccagttccagggatgccttggggatcaggctgggctagttcaggcagtcttcaggggaccaagttggctcaaggccaggcccggctcaccttggctgtggctggaaagttggactctcagatcccctccttcttagcaaaagcttcaatgtttgaggcaaactctgcagggtccacccagctaaggaggaagaggaagggccacagaagagactcgagcgatggaatcagatgatggagcttgaatcctggtcccactgcctggtggctgtttaggctgcaccaattggagacttgctttctcatgatcatcagatgacctctgttaagtctctttttatccccattgtacagatgagaaaactgaggctcattccagggttgagagctgactaagcttggtctgtgagtcaggaaggatggtgatgctcacaaaaaagggacacagaaatgggggccaggaactttgaggagggactgttcaatcccctcccttctccgatatgagccccttaaggaatgggatgggaccatgtctgtcctggtcattatgggagagccagtgctgagcacagtgccaggtctatgtcaggtcagtccccaacaggtgttttgagaggtagtgatcccatgggaggtagcagagtggaccgcagctggtggcatccagcaggcaggtgacagatttctattgatcgctggctctgcacacactccccctgcgctctagctcctcctgcctgcatgggatcataaggctcattctggcctatggctgggagtggaagtgcctggatgaaagtatttaagagccagttcgtgtctctttagttctctctgcccctaaagcctcatgttgacatggcacagctgcaagagaggaggagcctggtttgctgagctgtggcatggaagaaaagcgtcttggttacagaaatcagctgggtgtcagtcccaactattcaggaggctgagacgggaggatcacttgagtccaggaggtcgaggctgcagtgagccgtgattgtgccactgctctcaggctggcaacagagtgagaccctgtctcaaaaagaaaagaaaagaaattatcctggagagtcgcctgcattgccctggactttgtgagcatgagaagtaccctgtgatatgtgaagccatggagagttaaggttattgtctgtatgcagacttacattcctgccacagaacccagcccattctgactacaaggcagagtttctgaactggagttagagagggagggagggctggattcagggatctggctggtgtgatcctagtttgacaggctcagggtcatctggtcaacccctgcctggcacccacagcccctgggccatcccctcctctctgtgtgccagacaaggtaggctgtcgtatggggtctccttggtggaggagggtcctcaggaggaggcccaggagaatgggcctggagggacttggaggtggtggcccttccttgctttgccaccttgcttgatacaggcctgtggggagaagtgcgggggtccttatccaagcccagcctctgtagctgtgaagggtcccctagacacttgtgaacagtatattctgggccccccacatctgttctcaatactaaataatttgttttcttctctgagcatatttaattcatttaatgtctgaggcagtggcgctcaagcagcagttaacattggagtcacccagaggccttgttaaaacccacctttctggccccacacccagagctgctaattcagtgggtctgaggcagggcctgagaatgtgcatctccaacaaattcccagatgatgctgatgctgctgatctaaggaccatatttggagaaccattggtctgaggcttctatgcccccagttcttggaaaaccagcccctctcccagagcaccttgccctggcattggtgccccaccctgctcattctgatcctcactgcatccccacgctgccagcctttcctcaaccccaactgctaccagggcctgtaacccactgggataactgtgagggggtgggggtggtccagggcagcctgatctccctgtgtcaggccttcctgactttcaggactgctgtctttgtcccagacacacagccccacagagacttgaaggcagctacataatcatgactcttttggttgcaagtaacagaatccaaattcaatgtggtttatgcctaaaagagaattgattggctctggaaagatccaagagctagctctagggccttcaggcatggctggatccagaagcataatcagtgttgtcagtctccctctctcctagctgaaaagtgaaggaggaagcactgagtgggtgccaggataaggaggtgagagtaggcatgccaaagttccttgtccctgctggctcagttcccgaacctgtatagtgggactgtcaggttcaaggagagggacattggttgcaggactcacagggttgcaaggacttttgatcattttttcaggctgtctgctgggtgggaagacacccaggctgagatcacagcaaaggcgtgacctacgacaggaattctttctgtggtatcccatttgaatgggcctgataaggtttggatgtgtgtcccatccaaatctcatgctgaaatatgatccccagtgtcggcggtgggacctggtgggaggcatttgggtcctggaggcagatccctgatgaatggcttggtgccttcccatggtaatgaataggttctctgtaggttcataggagagctggttgtttagaagagcctggcatctctctctgtctctatcttgccctctctctcaccatgggatgcccgctccccttcaccttccactgcaagtgaaagcttcctgaggtcctcactagaagcagaggccaggactatgcttcctgaacagcctgcagaacgctgagccaaatacatcttttttctttatgaattacccagcctcaggtattcccttatagtgatgcaaaatggaccaacacagggcctcagtttcccagtctgtacttgcggcctctaatagagactcttccagtgttggcctgtgatgaggctggaaggggctgaaattgtgcctagaaatgtggctagaggtagaaaaaactgtatttgccaagtccttagggattgttgcagggggtgaggtgcctgaagatacatgttcaagtgataaaagatcatcagaaatgactgtcttttgtcacaaatgaaaagaagtaacaggttaatcaaaaaagacagttcaggcccggcaccgtggctcatatctgtaatctcagcactttgggaagccgaaacaaacagattgcctgaactcaggagtttgagaccagcctgggcaacatggtgaaaccccgtctctacaaaaaatacaaaaatttgccaggcgtggtgactactgcggaggctgaggcaggggaattgctggaacccgggaggcagaggttgctgtgatccaagattgcgccattgcactccagcccgggtgacaacagtgagactccgtctcaaaaaaaaaaaaaaaaaaaaaaagccaggtgtgggggcacatgcctgtagtcccagctaccagctacttggaggctgaagtaggaggatcatttgagccgggatgcagaggttgcagtgagctgagatggtgctactgcactccagcctgggtggcagattgagaccctgtctcaaaaaaaaaaaagagagtttacatagtcagatgcagcttgatctaggagtttgagatcatcaggacaggactcagcatctgtccatttcccaccctatcttttggctccatttccgaagttcctcttggccaaactccctgcagctccaggctcacagccctaccccaagcccagcaggaaggggcgtcttctccctctctgagcagtcaatctcaaaaagcccaagattgctcctgtttggttctgattaggtcacatgcccagtttgaagtccatcgctgtggccaggtctgagtcatacacacagccccagctctggggatggagtcagtgcctcctgaagggtgggtaccctaaagcaaaattaggaagctctgcccgggagaaggggaaatgcaggctgagcagcccacccaactgatgtcaactactggcgccaaattatcagcctgcctgaggacccctcctctgcccttgcctgcagcctcctcccttatctctgcacccccactctactcaatgctaaaagccacccagcccaagatgccttgcgattctccttcctccaggcgaaggaaagggggctgcaaccacattctctcattcgtttctctgacatcttttgtcacctatcaggggaacaagtaattcctttgatcatagcaaaaggaggaagagtatttaaaacacggcctgtgaagatttgctaagcagaaattgggaaaggcagtcagtggcaggtttcaaagcagaaacatgatttctaggcaccagacttgcttgtctgagtattgttaaaaaggatgtactccacacactcacctgcagcctgggtttttaaatgggccaagggaccccgaggtggggagagggtccccaagggacttgatgggaggggtttctgggaggaaagcggcagctcagaattccattcattatgcattggagcccagcacagctgaacgctcagaggaaggagtgctgggctgcgagcttgagaattggtgttgcccctggcactctgtgtgactccagacccgtcctttccctctctgggcctcagcatccattccggatcaggggccggatcagaattcagaatctaccttctttccctcaggcctccttcacattttctgccatatccaccatcacctgaccctgctttccatttaatatggaacatttctgtcaccaccataaatgaaagaaatggtatcagcccataataagaaaaaccaccacaaaaatacatgcagtgaaaaacaacgtggccatcgattctagctggacaactgtggcctgccctaagcagcaggagggggcttccctcttgttaaaaatggagatatggccgagtgcagtggctcacgcctgtcatcccagcaccttgggaggctgaggtgggtggatcacttgaggtcaggagttcgagaccagtctggccaacatggcaaaaccccgtctctactaaaattacaaaaattagccaggcgtggtggtgcacgcctataatcccagctactcgggaggctgaagcaggagaatcacttgaacctgggaggtgggggttgcagtgagctgagatcctgctactgcactccagcctgggtgacagagtgagatcctgtctcaaaaaaaaaaaaaaaaaaaaaaagtttgaaaagttttggggaaggcctaagggggcccccccactttgggggccaacgggggcaaaaccccccccaaaagggggcagggttttttagggaaaaaaggggcaaccccaattgggggggggggctccccccccaaatttcccccgttttggggggggggccccaaggattcctttaggccccgggttttaaacccccctggggaaaaagggaaacccttttttcccccaaaaaattttttaaaattttttaaaaattacccaatttgcccaaaaaggggggggaaaatttggggcccagcccccttggggggtaagggggggggggccctttgacccggggaatttggggccccattaccggggtttgcccccctccccccccccccgggggaaaaaaaggggcctttttcccaaaaaaaaaaaaaaaaaaaaaaagatggcagacacaagtgggagaggtcatctgggccagatgaggccagatatggaggctgagtggagaagcttggactttatgctaagaatgaggggaatcccgtgaaagctttgagccagggagtgagatgatccatttatcattttgaaagggctgtctgacagctgtgtggagagtggattggaggaggcaaggcaggaaggaaacggtgaaggagatgttagatttgggggcagtggcgcctgggcggggtggaactggggagggggggatggggtgagttgggccatattggaaggtaggactgaaaaaactgggaggtggattcaaggcctggtgtttgctccgccacccccagatgtgggtccaggggccaatggataaggagtgaaacagacccatcccgccctctaatagaggaaaggaagtagaaagggagctgtactttaagagtggcccagacagggtgctgtggggccctctgggaaagggtgagagctttgacactgcagataaggctggatcaactaccatttggttcagtccctgaaacatcacttatttcagaaaatccggggatgtcaggtgagcatgctcctaggacaaccctttcgtttctgttgtgggttgaattatgttccctgtaaatatatgttcaaaccctaacccttgctacatgtgatatgaccttattaggaaatagggtcttcgaagatgtcaccaagttcaaatgaggtcatactggcttggagtgggtcctaatccagtgactggtatttttattagaagggaggaatttgctaggcgtggaatttgctaggcatggtggctcatgcctgtaatcccagctactcagggggatcgcttgagccaggagttcaagactagctttggcaacatagccagacacttatctctaaaaaaaaaaaaaaaaaaaaatcaaagggcgattcgggcccaaaaccccccagaaaaaaaaaggccttttaaaaacagaggccaaaacgggagtgaaccagttccagagcgaggaacgccaagttttgctggaagctgccaaaggccaggtgaaaggcgtggaacagatttttccctaaaacatcagagggagcatggccccaccaacacctagatttcagacacctagtctccagaccttgcttacacctctcagtttgtgtttgttaccacagccccaggaaacatacaatctacaagtagagaaatggagcccccaataagtggagggactggcccaagtgcagccagtgctccagttcatctaaaccctgtggaatgaaatcagggagggatgtcctcctgaagaagaataaccagctgctatttccagtaagagccaggcaggaaaaacccagagacacctaatgcatgactcgcggttcagtgctccctcccgggcgcctctggctcctccccacctggggaatgctctggagcatctcatcacacctgtagaccaacccctgcagcctgcccatagccccggagtaaagaggctgcaaagacacaggggaaaatctgtcttggcgagggctgctctgccgaaagcctgctacacaagggctgtgcagtgaggtgcagggagaggagtcatgagagatgacccccaaggaaaacagccaagggtctcagtggaccctcctgctaaacatggtgatgctgtatagaagtggggtcctgaaatctcatgactggatgatttcatcccaatgactccaagactttttttttttgagacagggtcttgctttgtcacccaggctgcagtgcagtggcacaatcatagctcactgcagcctcgaactcctgggctcaagtgatcctcccacctcagcctcccaattatctgggactataggcatgcatcaccatgcccagctaattttttaattttttgtagagatggcatctcactatgttgcccaggctggtcttgaattcctgacctccagggatcctcccacctcagcttcccaaagtgctggaaattacagacatgagccatggtacctggcctccacatgcgtcattttgaaaaattcatgtttaaaaaagaaatcaggtttacacctttcttttggggtgcatgcttttgtttctaaacacttggaataggaaaacaaccctagaggcaagaggtaggagagctgagttcaagtctttgctcttctactcattccttctgtggctctgaggctctttttccatcagcaaaaccatcccagtggctcccaaatggtgctccatcaaagcctaggggtgccctcgataggcctaaggcagagctcccttgcttcccagctagaaaaacttggctttggcctcttttacatgttgagtttctgtatcaaattccatttgaagaaaagactctgtggcttaaaaaaaagtctgtaccttgcactgcagcagctctgtaatcccttccaacccaaatatcccaagattctccatcagaatgacaaatgttcttccaacagccttcgtcctgtttagaggttgtcattaagtgttctttctgctgactgcttcctggagagtggcctcatgtttatccacaggagccttcatcttctggggcatgatgctgctgagcacgatcttcatgctggggccctgggggaccctgggagagaggagaaagcaagcatggggacgaggtggcgctcttttgagagcccagaggcttggcatcccaaggctggggaagaggcttcaaggagagcaggctgggatgggtgggcagggtggcacagtgggtaaagcacaggctctgaagtcagatcccagctctgtctcttacaagccatgtgactgtgggctaagctcttgttttcagtcctttcaccttaaaatgggggcagtaataaggcctacctcatagggccactgtaagggttaagtgggccaagttcataaggtactaagccagggcctggcatgagtgccctccacatacaaggcatgggtaattggtggctatatttatgtggaggctgcttggagtctcagagcgaatccagggaaggcaggagcattggatggactggtgctgatcacttcctatcccagacaggtcctttcaggaaccctgtgccaacacatccccagatctcactactgtctacagacaatgtatcagctagctattcctacataacaaacagccccaaaacaacaataacatctgatttgagttcacaaaacacatggctgagaattggctgatcttggctgagttcacccacatgtcggagtgggctggcgtcaacggatctcagctgcccttggctcagatccatgtgtcacctcatcctgtgtctccagccggataccctgggcattttcttctcatgacaacaacagaagctcaagggggcaagtgaaatgcacgaggtctcttgaggccaaggcttggagctggcacactgtcccttctgccacatgacatgggccgaagccagtgtccaggacagcccggactcaaaggggagggaaattaaccgtgcttgtttagtgacaagaactgcaaatgtgtgtggcaaatggcatggagacgagggatgaagacccaggccatccctgcaattcaccacacactagtatgttaaggaggtgcctgtgaggaacttttggccccctagctggttgctattcctgattctttccttagggaatctggggctttggggtcagaacactgtgctcgcctcaggctcaaactctagctctgtctgactgctatcatacttggtgcctaataaatattgactttatatttgctgccccaatttattcttttattaacatatttatatttttaaattttaacattttgtttttgttttctgttgttttttggtttgttttttgtttttttgagacagaatctcactctgttgcccaggctgcagggccttggcacgatctcgactcactgcaacctctgcctcctgagttcaagaaattctcctgcttcagcctctcaggtagctgggattacaggctcccaccactacacccagctaatttttgtatttttagtagaggcagggtttcaccatgttggcctggctggtctcaaactcctgactttaggtgatccgtccgcctcggcctcccaaagtgctgggattacaggcatgagcctccgcactcggccaattttaacatttttaaattttaatttctttttgtagagacagggtctcactatgttggccaggctggtctcaaactcctggcctcaagtgatcctctcacctcagccacccaaagtgccgggattacaggtgtgagttgctgcacccagcctattaagatattcttattgtgaaatagaacacacggagaaaagtgcataaaagtgtacagcttaacaaattattactaagcaaatacttttacaaccatcaccctagagtaagaactgagactcctcactgtccccatcccagtcaaaacctcctcaccccctcgaagtgataaccaccatctcaacttttatagtaaccctttctgctttttttaatttcaggagttgtgatggttaattttatgtcagcttaaccgggccatgggatgcccggatgtctgcttaaacattatttctgggtatgtctgctaggatagattagcattggagttgatgccctgagtgtgacagacggtcttcccccatgtgaacgggcatcttccaactcactgaaggcctgttcggaacaaaaaaggcagaggaccgttggatttgcctcctctctgatcgccaagctggagcctggatctcctgctcttagcattcttggttcccaggcctgcagacctggactagagtctacactgtcagctcgctggctctcaggccttcaaactgcaccaccggccttcctgggtctccagcttgcagatggcagatgctgggacttctcagccgccataattctaggagctcatcgcttatactaaatctcattatatgcaaatatatagacatatactatatgtccatatccatatctatctctgctcttggttctttttctccggagaaccctagtacaggagttttgccatctaagcaagcatgcttcagccctctggttgagtccgacctgcccttggccttcaggaaatggaaccacacaggctgcatccgtctgtgtctggcttctttcatgcagtctcttgtgaggttcatccacttccttgtgtccaagcatagcttgtttcataactgcctcatgttccacataagaataccccaagtcccttctctgttttatggttcgcagacacttgggttgtttccagctgggggacagtatcaggagctgttcctgctgtgcagttgtggtacatgtcttttggtgagcatgcttgcctatctgtctatagggtatattcctaagggcggcattgctgggtacttacaggacagtttacgttcagctttgaggaatggtgccaaatggttttcttaagtggttgtaccatttatactctaacaagcagggaacgtcatttctcttttcttttcctcccagcctccttccattttcctttcttatacttatttatccaacccacattactcacagtctctatagccttgtgtgtctactggtgaattaaaaggtcactagtggtgtcctctgggagtcctcttctcactcccccagttcagtaggcagatgggtggggagtcccccacgccatctgggtcctgaaaaggtgggagatgggatctgggaggagcaggttattcaatctctccccctggaaagcgacgtggcgcgggccttactggggaagggcctctccccccagaccgagagaggcgcagttaggcccgttctcggaagccatggccgatcctgctcctgggggcgctgatactggctatttgcagcgccctctcttgtgaaaccctgcggattccgcttgcgggaagtggagggcggtggcctccgccttttggggcttctgggctgagggaagaggatggaggggcagaaagggagtgaggtcccaaaccccaagtggaggtcgcccggggaccccccatcaaaacacttgctggggagaggttatagaggcagcaaagctctttccagcatgatttcaaatcccgtctaagggctttcagaagcctggagaaagtttcggtttcccagctgtttcagctttttccgcccgcaccgcggcgatgcgttcggagccgccgaggcggcagcgccatctgctgtctactttttaaattgcaggatcagatcctctcggtctctccagacctgccccgtggaaagggaataagattaaaccagtaaaaatagcttagatcacctgaggtcaggaattcgagaccagcctggccaacatggcgaaaccccgtctctactaaaaaaagtacaaaaattagccgggcgtggtggcgggcgcctgtaatcccagctactcaggaggctgagacaggagaatcgcttgaacccaggaggcggagtttgcagtgagcctatatcacgccactgcactccaggctgggagacaagaacgagactctgtctcaaaaagaaaaaaatagtttaaaggccaggaacggtggctcatagctgtaatcccatcactttgggaggccgaggtgagtggatcacaatgtcaggagttcgagaccagcctggccaacatggtaaaacccctgtctctactaaaaatacaaaaattagccaggcgtggtggcgggcgcctgtaatttcagctgcttgggaggctgaggcaggagaatcagttgaacccaggaggcagaagttgcagtgagccaagatcgtgccaccgcactccagcctggccacagagcaagactccatctaaaaaaaaaaaaatttaaaatgccgacagccactgttatgcaaagttcaagggcctctctcacacttagctgggggaggagtgaatacagcctttctgaagaaagaaaaattaagtaatagcaaaatcattaagtgtttatgattcataaatacagtttttgtcaactaaaaaaataaaatatgtagaagtcaaaaaagtgtctatgattcagaaatgccaccgttagaagttgccataagagtgcacacaaaaaggacatatgggtcaaagtgtttgcagcagtgttgtcccaaataaggacattttgcaacattgtggggtggttaaaataactatagaatatgcattagaatacaatgaaaccattaaacataatgtggaagaatattgtatattatagggaaatgctcataatatatagtgacaatttaaaaagcagattacaaaacaatatgccaagacatgatttctgcccaagtctgccctgatgggtgagctaaccaaggttgctgcactgtgagggcataggggctgcccctcagcccccaccccagccactgggctcctcaggaaaggacacgtgagtgtttactgcacatcctacagatgaggagctcacaaggaccctggatgggggagtcctctgaggttgctggagctgctgcagccatcttgtcactgccaggggagagctctctctgagagcgaaggcacagtggaggaaagcagaactaagaagagacagagaaagcgaaagtgggagagagagagagatatgaggtgacaaagtgtgggtccttggatcctgcttggtgtaaagctagcctgctcctggactttacagataataaattccttcctcatcagattaacctgggtttttgtggcttgtaaccaaaagggtctgcacggcccacacacaggctcccagctcatttcctttgcaatgagtggtaactggaggcgggcggtgcatggacctgccttgcaaggcttctctgttagtggtgcctggagcccactctctcagctggcacagccagtgtgacacatcagtccgggtgtgtcctggacctaccccctttctgggtgcaaaccagaactgaggatgccgagggtggtgggggggtagtttcctgcctcagggctgtgctcctgctacctctttgcctaaaattctcccctctctgtgctcccagggccagctcctttgtatgctctgtgattctttgaacagcgccccctctgagaagccttccctgaccacctggctgaggacatcattctgtcccagcttccatttgctttgggagtggcctcctgacacttcacttccgtgaggcagggaccagttctgtcctggtcactgctgtatccccagctctagataaggcctgagacatcgtaggagtgccagggatctttggttactgagaaaacgagcagctagatcaaggttcccaacaccaacacgctggggacatgttgggagtcaacttagccctaccagcaggtggaactagttttgctgctccaaaacagagttctagctatggggacagccactagagagcagagctaagtccatgctatgctgaggggccacagtctgccctgaactgtgcctcccagcctggagctagtgagggggccgagcctgggagctgacagatgagggctcggcgtggggacttttggaggggagggcattttcttgatcttaccatgggggcaacagctagatgggtagggggggacccactcaaggacatactgcggcttcaggcttcgaccagcccagaacgctcgctccatctgagggtcttgatatcagggtgtggcgtcaggagccggagcctacgggttgaaagccaagagtgggcaatcaaagctgaaaccaggcccacgacttaggagctggagagcacacagggctgaacactcgagttggtgaccaggaaaccagggagcaaagtctccagggtgcttgggcaagaccccagatggtctgcagcaacgcacgggcaacacgggatgatcagcgctacgtggtgagaaacttacctccttttgcaggacaacattttccagtccttctgagtaaatcaaagagaagtctcagcttggtgattgcaggtctctaatgcttatttctctgtctctgtctctctctcttttaacaaaagtctaccagcggcctcaggctcagggcctgtctcaggtaaaagcgggttagggtgtaataacagtgatcggtttcattgtgtttatttttgtagctactttctaattatagcaagtgattctgagtttccatttaggatagtaataggaagtttctttttcaagtaaatgtgcataagtaaaaggagactgctcaaaggaaaacagctggtgattgatagaacaggctgtggcattgttgggccccagagggaagggctgtgtgagcatgcaggaaattctgggaaggcagctaaatgcagttgctgcatgggggccaggaagcatttggagacgtggctgggcacagcttggcttttgagcccaagagaggcctgctggggatgtgttgggagccaacctacccctaccagcaggtggaactggttttgccactccaaaacagagttccagctatggggacagccactagagagcagagctaagggcattctaggccaaggggtcacagtccaccctgaactgtgcctcccagcctgaagccagaaagctcagggaggctagcggccctgcccaggcctcagcactgaccctgcacccctaggcccagctggatgacccctaagagcttcctggaatttggatgcagggttattctgtgtgtgctgcctctcagagcatgtcactttgacgtggacatctcgggtctggttctggtgctgtccctgtctcgccacgtgaccctggataagtcatctctccaggccttgatttccccatctgtaaacagaggtgagtgaaatgatctttaaaggcgtgtcagtccattttgcattgctataaaggaatacctgaggttgggtagcttataaagaaaagagggttatttggctcacagttgtgcaggttgtacagaagcatggcaccagcattgcttcttgtgaagcttcaggaagcttccacttatggtggaaggggaagggggagttcgtgacttacatggcaagagagggagcaagagccatgtcaggctcttctaaacaaccagctctcatgtaaactaacagagtgagaactcattcattaccacggggagggcaccaagccatccatgagggacctgcccccatgagccaaacatctcccaccaggccacaccttcaacactgggagtcacattcagcatgagatttggaggtgaccaccatgcatccaaaccatatcaaggacccatttcggtgaggggaccaggaacatatcccttcccctctcctccacatcctttaatgtggagttcagcaaggaaagtagggcttgggtcaaattaaagcctggtcttaatttcctggtccagttattagctgtgtaaccctgggcaagtcacttaaccccctcaggttacaatgttacaaatgatcacattttcctcaactgaaaaatgggataggaacatgtcccaagcagagctggagtgacggtgctatcaatggcccggcagtgcctggtcacacagtaggcctggggagccctgacttttaccgcacagggagctgcttgcagagcttgttttcaattgtgggcttggcagggaactgccggcatcccaggggacagggtctcatgaggatgcctaatcccagctcaaagtggagaccccaggactccatcacagccagtgggggggagtggctgctgcagcagggagggcttcattggaatgaacccctttaagctccagtccaaatgcccagagtggttttgcaggtatggttgtgaggctggcatggtagtcccatctgcagtcccctgggatgaggcacctgtatggtagagggcccgggtggagagaagagaaggatggggatgaacccaggaccacagatggcccagttccatggatgattttcattgaggtgccttcaagtcagttcaacactgggcttctcaacctttgaggtatgcaggtaagagtcacctgcggcagtgggggatgctcttgttaaagtgcagactccgattaagcaggtctagggtggggcctgaaattctgtgttcctaacaaggctccatcctgggtatggaggtcaggtaccccctcacctctcctgtggacccagcttttgaggggtcaggagaagaatgttcagtcccagctgccaccactctaaagtcccctagaaacaaggactaatacaggtggcgtgggagagggcccaggcaaacagggaggtggggtaccccggtggggctgcagtgggccccgcggaaagcttgctggaggtgggggcctaaggaattcaaggacttgttccaggaacccaaggaacgagtgggctctaactgctgcagcatatgggagatgccaggaggagctggctgtggcaggccatcccagtccatcagacaacttgtagtggatgaagatgcagtgtccatggccagaagaaactcccgtggatgctcaggccaaggctgccagaagcacgaggaggggcagcattgagtgtcatcgggaaaaggcaaagtgatggtcctgaagctgccccatgtggccagtccctttttgggaagcctgaataaatccatttcctgtgcactgtgtgggaagccaacccctcttcagaggtacttatggggaaccccccatgtgattctataggctcctttactcccatataagtattttctctctgtgtgcaccccccgccccacccccccaacaccccacacatatcatctatctgtgattttgagatgacttttttttttcacatttcagcacctctgaactcaacaggatcctacacttcttataggcctggcttgatgctgacatccttcagccccagggaagacctaaagatctccaggtcttgaggcacctggaacacctccacctgagaccactttaacatgatttctctgcttgagggattttggaccatgctgtgtgtattcagccctaaaacatgggcgagtgcccgcttgcagttcaaattctcagaggaagttccctgtactccacccagtgccaagtttagtttgtgcaaatttccttaatgtcccctcctgtacaacaggcttatttggtgttaaccctcatatcgggggtctaactctttggttttccagcttttgtgctggaatatcccattaaactgtccatgttgggtattttttctttgttagtaaacatttgttgcatattgttgatagcattttagatttgaagaaataactgacaaaatcaatatcatctgtttcatcattacaaatagactcatagctctttaatttttccatttaacactttaattttccataggcctagattttcaagaagtccaatatctctcacttgaagtgtcttttccctggagtagattgggagatttgagggatatctgtccaaagatgagacagtctgtttctagtttcccatccagcctgatggggcgtctacagtttttaccacaaggtgtcgctgttgaacagattctggtgcagtctagtgcatagctgtccacttctagagtgatcacttgctgggccaagttcctctccttaagtggtgtctcacattaaggttcccaaattacagactcattaattcaccctaataagctcatccaggcagtttaggtcttcaggggcttccagcctccaacacacattgggccaaaaccagcctgtaccaccagctccaagccctgtgttgaatctaggtcattggtccagatgccccttcattctgggcctgtggtgtcctttccagacagcagacctcagttaagggcatcccagtccatcagagaagttccaggatcacagaccctcaaaaggggcagtgttgaggattcagtctgttttctgcccagaggccccattaagtatgttgtatcacctcctccccaggctgtttctacataacccagggaagccattcagggaacagctgccttatgaatgaaaatccacccctagacaatgtgctatgccatcccagccagaaaaattgttggcaacttcccttgccaaaaatgcctggtatcacagaatcttatgccattattgctttctggtccagggtcctcccacccttcaaaaggatggcatacaactcccaccgtgtgtgtgtgtgtgtgtgtgtgtgtgtgtgtgtgtgtgtgtgtagaggctgttcttgagggcaataggtgagcttttgttttgctttgtcaggtctacatggtaagggggaagggctagaatactaagatagtattaggataatggatggaaatattttaaagcaattccaaggtggaaggaacagagagaaaagccttggagcagctggagagaactgtcttcaaggaaatggactaagttttgtctagaatgtgtgaggtaaacttcttctccagcttcccacaaagacactggtggggtggacactgctctggacggttttggcagttggttttgtgttttggagatgaagtggccctggcatcaagaggacgtgggacacaagcagaggcttccaaggggtcccaggagcacctctgtccaatacagatggagaaattgaggaccagaggaggggcttgtccaaagtcacccagcgagttagagcccccagtggcttttcccattaaaaatgaaccccaggccaggggtggtggctcacacttgtaaccccagtgttttgggaagctgaggcaggaagatcatttaaggtcagaagttagagaccagcctgggcaacagagagaccctgtctctactaaaaaattaaaaattagcctggtgtggtggtgtgcacctgtaatcccagctacttgggaggctgaggtgggaggattgcttgtgcccaggagtttgaggctgcagtgagacataattgagccactgcacttcagtctgggtgacagagcaagactgtctcaaataacaaaaaagaaaaggaaaaataaaaaaaaagaaccccaaacagcccactgtgagccatggtgaccccaaatctccagcgtccctgcggggtcccaggccggctcagtgcaggtattctcgcacagtgagctccttcagggtgatgcctcggggcgtgggcctccggagctggctctcctccagcctctcctgcagagtcacgaagtccttgcccagcgcgtaggccaggcggaccatggcgtccagcagaggcgcatagtagcgatggccctcccgggcctgcaggcgctgcagggccctctctccggccgcgaaggcctcggcggggcggtcgaggtcgcggtggcacagcagcacggcgcacagggccgggacggcggccgcagggcagtgggcggtgagcttctcctgcagcggcagcacgcgcagcagcagctccagggcgcgcgggtactggccggcccgcaggcagccgaaagcctcgcgcagctccggccgcgtgaggaagtccaggaactcccgggagcggcgcacgcagcggatggcgtagagcaggcccaggtactcctgcagggcgcgccgacgctcacagatcatctcctcagcgaagttcccagtcaggtgcttcctgggaaactccacgtcttcgatctcctccctgaacgtcttcagcagcgctttctggagcttcgcgaagtcggaatagcgccgttccaggacggccttgttgttgtcaaagctcccagtctggatgacgatgatttggtacacctagggcgcaaccagagagagctgtggccacctcccggcgggggctgcggcggacggagcacacccagagtaaagttaaccaggccggtgtaaagcatgccctgaaaacgggcgatccttatatgcaattgattgtttgtttgtttgtttgtttgtttatttatttatttatttatttatttatttatttttagagacagggtctcgcactgttacccaggctggagtacagtgatgcgatcatacctcactgcaaccttgaacttatgggctcaattgacctgcccacctgagcctcctgagtagctgggactacaggcacacccactacctggcagattttttgattctttttaaaagatggggtctggctgtgttgcccaggctggtctccaactcctgggctcaagcgatcctcctacctgggcctcccaaagtgctgggattacaggcatgagccactgcacctggcccaattctgttttaaattgctattggcatcagctgagtcaaccctggaacaacaacacagcaaggtggggacatctgggaggagaaagggcagagggtcctgccctgcaggctgctggggtccctcttggctttacttgctaaaactgggcctctgttttctgaactgagatgctgtgttttccaaatgtttcacacttgggaattagttttacgtacaatataacatcatttaggtacactggtgatgccgttatatggtaagaaaatcaatccttttcaatcatctttcaagagaatcctgattacgggcaattatatattaagggcaattataacccatgcatctgactccagagccagattgcatgggttgtaattatagccctaccatggtctagctgtgtggttttagatgagtaatttaacctctccgagtctcacttttctcattcataaaacaaggataggcatagtgcctacctcacccagtgaggattaaatgagttaatgcactgaaaccacatggagctgtgcccggcatgccattggcattcagtggtagctatgttatttatcccggtcccaggtaagtgaaggagaaggatgaagtgtggctcttaggcagtctttaacatcccttaacacaagctaaaattccattctaacagggagaggagcagctcccaggcacagggctttcccgaagccacagtaaccagctagaatttaataacagcacatagctttccttgtattgactttccttgtatcgacttttctagtatgttacttttgctttgtgccatgtgatattggttttccatttaaggtatttctctttgaaataaatgtgcttcatgtttttaaaaagtgatccaatttaaagaaaaaaataagtaataataattagaacagatacagtgatatggcaaaattggtgaagaaaggacacaggtgactgacacctgataagatgggattaaactgggctatttccttcttgggaccaagaaatatgacttatatggttcgaatcctcacagaccctagcaggtgctgagcctgaaatcttgctctttggccattttctccagaagaaagctgtgagttagtgtgttgacccatttcatagttgggaaacctgaggctctacaagacttattcagggccaggaaggaagcagagtgaaagaggctccaccatttcccaatctctgcttaccacaaacttagagacttttctctcctcgatgcgagctgaagcaatctcaaagagcagtttgacgtgcttccagcggcatttctggttctgccagtactgctgaagctcccgcgtggtcatgctggagttggagctcaggccactgtgtgtgtctggaaggacaacacccttaaggatctgcaccctgtcagtgcacttccgaggcatgggcttggggagatggctgggtctatctgagatggcatatcagaactcctgaagagtattgaatatccctctctcccaccccgccatttataggcccaattggggcatcagacagacctctgtgcccagcctggcagaatccaccctaccaccgacaatcccaaatagcccatcacccccaagtggtttcacagctttggaatgcggtgcgggcactttgcatcgtccacttctggtctgtagattggccatggtgaaatccctgctctggacaagcagagacggtggcttgtgtgtttctgtgctccctgcagccctgacttcgtgactgttgccacgactccttgagcacacatcagtgggcaggggaggcagtgaggaggatgttatgttccagcctcagcgggctggcccttcctaaccttctcatctaactgcccacatgccgggctcttctcggacgtgcactgctctgccttgcatccaaccctctatttccacgcctggaaaacgaacacagtgtttcttaaaccccacttgagccctgcgccactctgaggttcttaagaagcacaaataattgtgcattttattgcaaagggcatgggtcccagcccttttccagtctacccttcaagacccagcccccacatcactgcaaatgccccttggcattagagtaagagcttcccaccttgttcctacaggtttttcattttatttatttatttctcgtggcacgtgtaactgtttctcactgatctgtttctctaccaaacctcaggactagtgcagtgtttgatttcttcctgtttctgtttctccagtgccctgcatagggccaggaacagagcaggtattgaatagggcatctcgaaggactgtaagaaaagatctgttccaggagatggcactacagcagatgctgtccatgccccaggctggaccgtgccctcttggcacccacttttccagaacatgccactggcttccctgagggctttctagggccatagcagcaggcccaggagcgtcccttctcctatgcagggcaggactggtagataacagcccggcttcctcacccctaggataggacaacccagagatatgttccagggtctcccagaagacccccgctggggttgagcttcagccacctaccgtgcctatctgttcactgatgtcctgccctggcctcttgccctttccttccattcccactcccctgccatgactcctaggaccgtctcccggataaacagcttgcactagatctgtgtctcagtgtctgttttgggataacccaagttacaagagctgcccgggcctcttgctgcatcccccaaagtgacccacatttgtactttgaatgtcttcagacctctcccccagaccgagtctcaagcctcaagcccacctaagtgcccgtcaggtcctgggtgcgggaggtcggggccagtggctggtgcttcctgctgggtccttgccgtgcactgggttatgggtcccatgcagccagggctcccagggtgctctggacttgccatgctccaaggctgccagaggaaaaagagaacagtgaggacccactccagttggggttcccggtggctcctggggtgcctaggagctgtgtcatgccccctcctggcaggcagagggaatgacaagggccccacggctcaaccttccccactctcccagctgccagatcccaaatctgggtctgcccctttgctgggcaggttactccaaggcagagaagacccttcacctattgcgatgatccatatgttattgaggtgatccttacgtattgctcagagttttaaatgagatgatttcaagtaaaagtattggctttagtgattacttgaaagaaagatgctggcttgtctagatactcagttttatgttacacatgcgaatgaagtctcagtgttcaagttgaacatggccactcatgcctgtaatcccagcgctttgggaggctgggttagaaggatcacttgagcccaggaatttgagaccagcctggccaatgtagtgagaccccgtctctagaaaaaataaaaaaaaattatccaggatgcacgcctgtggtcccagctacttgggaggctgagacaggaggatcccttaagcccaagagactgaggctgcagtgagctatgatgatgccactgcactccagtctgggtgacagaacaagaccatctcaaaaagaaaaaaagaaaggtcagtgttcagagcaggtagatactggtatgaatcttctatcgatcaatcaatcaataatctatctatcagcaaaattaactgatagcttattatacccacttcatacccatctaggttctccatagcccctaatctagtttaatgctcacaaaagtctatcattaccaccacataacagatgagaaaactgaggtctaaagtcacgcagctggtgagtgtgcgcaacaagcaaagctgaatttgtctccagtgcttgtgacgtgctggctgtgcacttcacacccagcacacactcttgcactaacctgaacactgtctgcactcaggactgtttacatctcccttttatgataagggaactgagacttagagttgccaaagatgaggagctggtgagtggtgggcaggatacagacccaggctgggctgacttcagaattctctccaccttactcagggagggagaacaggcagctgggatctggtttacataataactctgtctgtgacccggataagtggaagggatgacctggtagctggcaagtgactcaacttctctgtgcttctgtttcctataaattggggataataacagaacccacgttcacaaggctggggtgaggattcagtcaggcagactctgaagcctcagctcagggccctgtccatcccagggactgtgtagtacccccgcttttagtgtctgttaagtgctagatgtttccagaaatatttgtgaaataaatgactaaattaaggtggattggaatagaattacaaatgtttgagacaacttagagaaagggacaattaaaacattagatcggctggagggagtagctggtatactggttaggcatggaaattcaagacaaggaaggtgcaaatgacctgaggaagctgccagtggaacatagaggtagagctgggacttgaactctgatctgttggattctgggctcttggtctgaacccctgggctgactacggcctagagaaagatagagccagtgcctccctggcaccccctgagcacagatgggggcgggagtcatgcatgtccctgagcacagccagcgcctgtcccttgctccaggggtgagagccgctggcctgggagaggggaggtcagctggggcctggagcctgcacttcagggggaagtgcttgctgtgtcgggtgaaaggaaccctggggccttctccgtttggctctgcacagccatccagtgggcggccctcagggaccctcgatccaacctcaccttttacagatgggcaaacagaggcacggagcaggggcctggctggcccagggctgcacgttcttgagcatgccgtcacgggcacctctcgcttgtctcttgtgcctgtcagggagtcaggagacatcgccttccatcctgaccaaccgtgtgtccttaagcaagtgctttaatatctctaggcttcagtttccctacctgataaatgtggctacaagccccgtcctgttgataagatgatggatgactaggggtgggttccctacattctgactggtgcctaagtgagacagtggatggtttacgtgattcttggtggctgggattcttgggggcccagggcactcctatgctcagcacttctgtaaaatgggtgatggcgagtggccttggcctcaggggccccagcctttgcagatctgctttcatgaccaggcagctggctccaggtcagaagcagggcactattggcccagagaccctgtaagaccctagaaatgatgcctcggcttgacactccagtaaagactgagaaagctgattataaaaccaggccttagaataaaatcaaattcagcagccacagtcagctcccttatggttgtctcttacaggtttcattgggaatcacccatttaaagaggagggggaaggaaagagttgtgcactggtgtatccatggggccttgggtagcttcccatccctctccaggcctcagtttcctcatctgtgaaatgggaaagcaatcctgtcactctaaaagctctctggggatagccacatagacggttccatggccctttccttccctctcctcaccctctgtagcaaagatttcttgactttataacaaaatactaaaagtgttgttgctgttggcctgggggcctgtagttggcccaggggacagagcagcttcccagcctcctgtaccttccagccgtgtgtgcacagacagtcattctcctcctcctgtccccaggtgtcctaaccaccccctctccaagagctgactgccaagtccagtccttcttctgctgggcacacagaggccacactatctttctgagggcctgcggaggacttttcatgggggatgagcctctagggggtgaaataaagcacatggcccacgctgggagacagagatcccaggatgttggatgtgtggctgcctctcttggggaaagggtgggtaccctccaacaactggacgctcacctgagaagccttgccaaagccaggggctcccaacccagtgtgtgtaagaatcccctggtggggtgggggtgggatcccaggggcttgtccaagagcaggtttcctggctgctaacataggaaggtgccattgaacaggcctggattctgcattttccatgagtcctctaaggctgtgctgaggcaggggttccctgacactgttcttttgagaaacacaggtgtggtgacttattctccaggcccaagatgggttgtacaagcgcctagcatttcaaaaggaatggaggtgatggaaggtccaggagctgtcccttcctctgcctcagtgtgctaaggagagctccagacacagcggctgtcactaactcttccccctcccaccctgcccccagcaggtgccaggcagggccccaggagaaggggactcaggccacagcaggcagaggacagctgagcttgggatcaaatactgacctccagtctccagggctgtgtgtgtccaggggtccgggaggagtgtcatatggccccttcgagctcttggttctcagctccggcgacaagccgaggggctgccactttctaagttccccgtttgaaaacaggaaacaggctgtgtgacctgcttctgatcgccccagcccattggctggtgaaacatggtatattgaactcaactgccagcctgccagctgtacccacctcttcttccgggtagcgcagggaagggcaaggcggtgtggggccagccctgtgggatttagctcagcctcactttccctgccgccttgcagaggtctggctgtccttcgagtccccgttgatctctggaattcaggcattagctcccagagccctttaacattcattattctactctatgagctaggcatgatgggggccgtcatgccccttgaacagatgggaaaaccgaggcttggatcacagagctggtgggacacagagccagtgactgacatagaagagcagtggggtagaattacagttccatctggtgccttttctctgagcaaagctgtatccatcaccaccaacagaaagtcccagggaagcgaaaccccagggcagtgtggtgtgattcatgcccacccatctttgtggccttgaaggcaagaaacagaaatcagacaaaaaaaaaaaaatagaactttgctggctcgcccagaagtttgccatgtgtttttttttgagccatgattcccttcctccctattagaggcagtcacagtcctgattcagatgggggttacttcttggcttttccttagaaatttaccacctatgagatccccaaacaattcagtttcattttactcatctgtgaatcttatataaattgaaccatgcatactgtgtgtattctccagtgccttgcttctttcatgcaacatttatgggtgtaagattcactgatgcatttctgtgtagatactttttttcatttccattgttgtgttgctacattattattattatttattttactttaagttctgggataccagtgtagaacctgcaggtttgttacataggtatatatgtgccgtggtggtttgctgtacctatcaacccatcatctaggttttaagccctgcatgcattaggtatttgtcttaatgctctccttccccctggcccccacccctgacaggccccagtgtgtgatgttcccctccctgtgtccatgtgttctcactgttcaactcccacttatgagtgagaacatgctgtgtttggttttctgttgctgcattatttaaatacatcaccatttgtcattttttgttttgtcttttgatgcacacttgggttgttcctagggtggccatcatgatcaatgccactgatgatattcttacacatttatccaagtccatgtacttatctgaggtgaaattgctgggtctcagagtatagatagcttcaactgtgctagattacgccaaatattttccacagtggctgtgccattttgtattcccaccagcagtatatgagaattccaggtgctccaccttcttacctgcacttgatatggtcattattataattattttaaagatggggtcttgctctatcacccaggctggagtgcaatggtaccatcatagctgactgcaacctagaactcctgggctcaaatgatcctcccacctcagcctcctgagtggctaagactacagttacgtcaccatgcttggctaataaattttttttgtttctggagggatagaccatcatggccactatgttgcccaggctggtcttgaactcctggccccaagcaatcctcctgccttgggctcccaaagtactgagattaccaatgtgagccactgtgtctggtttggtcagtgtttttcagtgtaccactgcattaatgtgcagtggtctctcatcaaggttttaagttgcatttccctaaggactaatgatgttgagcatcttttcatgggcttatttgccatccttataccttctccaatgaagtgtctgttcaaggtcattgctcattattgacttgattatttttaatggtttgtaggtgttctttatgtattcatttgggtttatgtgcttctcaatatccttttccatcctgcagtttgcattttgtactctcttaatggagttttgtgacgaatagaagttgtcaactttaaagaaccatattagtcctttgatatggttgaatttcaactttcctaattgcaacatgaaatttaatgaagtcctcctagtgccaaaacattccgccttgagccagtgtcatccttggagggcatgaaggtttctcctgtatttgcttctgcaacaagctcataggcttgtgaacctcaagaggagttcagatgagccaaacacttagaacaacactgttccgagctgtacaagtgctggcagttcttactattctaaaaccgttgctgcttgtctttttcattggaggctctataatgtccctgtttacctattgaccttgcttattgacatggccctgcaattccacctctctgcagtgccgtcactgtcattaagaacctccacatctgcaaaggtctgtctctgggcagagctcacgaggagtgccatgagtggtgtgcctctggcctgctagctggggcaccccgtaagtgcaggggccataggtcggtcatctccgcctccccctgcccagcagagggcctggtggtgtggctccctgcatacagtgaggctggaatgccctctcctccctgggttgtgtcccgtaactttccagttttctcgcctactctctgcccaggcctggaatctgcaagacaccagggtggactctaagcctttctctgcagccctgtgagcctctcatgctgcagaaggcaaccacaggggaaaaatgtgtggttgccaccacttcctcttatggggaaaggagacgtttcttggaaaccccctgatggagaggggcctggcctatgtcggtaggacccagctgagccagagtgaccggaagatgccacgcatggccacctgttggatgttgctttttctctgcagccagagttctctgtggtggaggcagaaggcataggtagtgtcttagcttgggctgctgtagcaacacaccgcagactgggcggcctaaacaacagacatctctttcccacagttttggaggctgggaaggccaagatcaacgtgttaacagattcagtgtatggggagggtttgattcctggtttgcagatggctgccttcttgttctatcctcgcatggcagaatgagggctagagagtgctcagggatctctaacctcatggcctaattacctcttaaaggcctcacctttttcattaggaattcaatatatgaactatatgaacttggaggccacatactcagttcataacaggcagacaaggtcccatcgtcatgcgggggacacaggagtgggcatcctccattgcagcgctgaagccagatggcgaggagggtcaccacgaggcaccaggagtgagaaaggggaaatactagtagtgtctcagaatctgatgcctctcctagaattcaaaatcagagcacctctccatcttatttggacccttcagtggcctcccaccacattcagagtaaatccgaactctctgctgaggcttccatgatctgccgcttaccgtttgtcactcggtccactcccagtgtcacctaccacacaccagccaacccagactgctctctgttgctcaaacgtgcctttgttttcgcagttccttcagctggaaataccctccgcttggtttttccatctctggcttatctcatctcatctcatctcatctcatctcatctcatctcatctcatctcatctcatctcatctcatctcatcatctcatctcatctcatgaagcagcagcttcactttcgctcctccatgcagccttcttctgacccctctgtcgagatctgtccttgttttgcttattcgtatacttgtgcagttcctgtctcaaatgccacaatggcagggactttgtctgtatcattatctgtgtctctagcacccagcacagtgcctgccacatagtgggtgctcagtaagtcattgtgtgcatgaatgaatggcggggtgaatgcagagaagtggtcaccgaggctgtggctgcagctcagccctgactcattgtgtgattctgggcaggccaccaccctgtctgatttttggcttccctaattgcaacatgaaattaaatgatgtccttttaccaccaaagcattctacattgagcaaacaattgagtactagaagctacccctcactaccgctctggatgcctgacatgcttggaactgcaacactggtacgccttctttgagaaattcaacaagagtgtatcggtcccaggtgtgcctctcagcgctggtagagcaaaccacaactggccaggtgtttttcgcaggtgacacaaaatttgatcttgtcaatcttgtttttctgcagctggatgtgcctgtatagctttttattaaatttcaaaggttcttaatattgcaggacttaaaaactggggttgcagacagaatgcactgtggggcaccgctgtggttatattgagacatggcagggtggggctgggtacaggcccatttatttctacattgcaggccgcgggagcttcagtcaccattactgaacttcctggtctttgtcaacctcaggactgtcagaactgctgattgtgtaaagattcatggctaagattaggagaaaatccaacttttctgatcaggagaacatacacctcccattcttgggacatctgtttgggcaaaggtgctgatgagcagtttgggtggggttaagggccatcaggtccattgtaaatcattttaaggtatgtgccttgcacagaggacctaaaaaagggcagcagtgggccgggcacggtggcggatcacgaggtcaggtgatcgagaccatcctggccaacatggtgaaacccggtctctactaaaaatgcaaaaattagctgggcatgatgatgcatgcctgtagtcccagctgctcaggaggctgagacaggagaattgcttgaacccaggaggtagaggttgcagtgagctgagatcataccactgcactccagcctgggcgacagagtgagactctacctcaaaaaaaaaaaaaaaaaaaaggcagcagtaatgctaaaaatccagccctggctcttctgttccaacccggcacttctgaccatgcagatgaagttggcacttgtgtccacacattggaaaagaagaatgatatggtcttctgtgagttaattaataatggaggagtgagaaactgattttgcaaagacaacaccctcagccaatggaacattttattttgctgaagtggggtttgtaagcttggggctagaatggcagggtttgagaacagaggggtgattctagaaacaataaggcggaagggaaggagagagaggaggcacagcacggggtctcaggaggaggcttaggcaggggagctggattgtgttttcaggtgtctgatcttcctgcccaatgtactgatgagcttggaattgggttaggacctgaggtggggaagtgacagaatgctgggtctggtcttgaggtaggaatggggcaacctcagaggctgcccaagagatgcaggcacgtcaggttcccaggctggaggctgctctgtggagagctgcctgctccaatgtgtccttctttcaagcattgtccctctgtcagtaagtcacccatggatagggcgcagtggcttacacctgtaatcctagcctgggaggctaaggcaggcagatcacctgaggtcaagggtttgagaccaacctggctaacatgctgaaaccttgtctctactaaaaatacaaaaattagctgggcatgatggcatatgcctgtagtcccagctacctgggaggctgagacaggacaatcgcttgagcccagggggcggaggttgcagtgagctgagatggcgccactgcactccagcctaggcaacagagtgagactccacctcggaaaaaaaaaaaaagtcactctgaaaacagacttggccaagcactgggccagaggctgaggtccagcaacaaggaagggacaaggaagggataccttgaaccctcagagactggtgatacacaggacggacacatggaacttgggccaacagtgttggaccgtctcggctgatggccaacaggagaacaggcaggctgatctttgcagctgagaggactgggagagcccacagggactgtggggtctggagagcttccttgcaggaggtgggcatggaaggtccagataaaagcaggtagagaaggacgtggacttgactcatagtcccaccattccatagctgggtcatcttaggaaattcatgatcctcttgaaacctccgtttcttcctgtcaaagatggggatgaggaatggaacctattccatagaggtgttgtgagagtacacggcgtggcatatggcaagtgttcaataacatattcacactgtggtgtgctcactgtttaccaggcaccgagtcctagtgtatgcatccctcatgacaagatctaagtggactgtcatcctcacttaactgtgagggagactgaggtcaagagaaatgaaatgactggtcaagagcatacagccgctaaggagcagggctggaattcaaatccaagttcgctggggccagagtccttgcagttgccacctgttgcctctgcctggggcacagagtgagcagaagctcacaggtgggagtactgagagctgcgggaagttggtgaagctaggggtgcagagatgtggggagggaaagccattcctgtcttcatccatttgggccagcttgtggaagtgtttggactttggtgagtgggtgggctgcttggagcagaggaccaccagcgtggagactgcagcccactatgaggccgggttaccaccactgtcagcagcagcagccgccgtcggtcctgggctgagctcctactatccaggcctgctgatgggggcagtcctcgctcctgggggaagtgctcaggcacaggcagcttcccggcctggaagaattttgaatgacacaatccaaggatttctctcctctgaggcccgggggattctggaagcattttccctccgcctcttctgagcacttcctgcacggtgcccatgtcagagcactcaaggacagaaatgtctccagggcatcccaattgcctgtctcggcagagggccctgcacacagggagtttttaatcaatatcccttaactcattggaaagttttaaaaaattattattaaacaagtaaattatgcttattaggaaatacaggttaacacagaagaattttaaaagtccagttaaaatccgatcctaacttgtcttttagatgtttcaatgcatatattcacacatatctattacagaatttttgtataaagtatgaggtagtagtccaaattcatttcttttgcacgtggatatctagttttcccagcaccatgtgttaaagagatcatttttcccctttgaattatcttggcatccttgttaaaaaacaacctactctttaaatttagccttatattctttctacacaaagcatttggcagcccaactgtttttcattgagatataattcacataccataaaactcacccttttaaggtgtgtaattcactggtttttagtccattcacaaggttgtgtaaccatcaccatgatctaattccggaatattttcatcatgcaaaaacaaaacaaaacaaaacaaaacaaaacaaaaaccaaacctcatgcccactagcagtcactcctcattcctccctcctctcagttcctggcaaccaacaaatctactttctgtcttcatgggtttgcctattccggacattgcatgtaaacggacttatacaatagatgtcattttgtgactggcttctttcacttagcataatgttttcaaggttcatttatgttgtagcatttatcagtactttgtttttttcacagctgaataatattccattgcacagatagatcacattttctttatccattcatcagctgagggacatttagtttgcttccactttttcctcttatgaataatgttgctatgaacatttgtgtacaagcatttgtgtgcatatatgcttcaattctgttgagtatacctaggagtagaattgctggatcatatggtaactccatgtttaactttatgaagaacccacaaactattttccacagtggcttcaccactttacgctctaaccaccaatgtatgaggcttccagtttctccacattatttccagcacttgttttctgtcctttggactaagggcacctttgtgagtgtaaagtggtatcttatggtggctttgattcacatttccctaacaattaatgatgttgagcgtcttttcatgtgcttgttggctacttacatacgttctctgaacattttcaaatcctttgctcatttaaaaagttgtttgttattgagtttcaggagtcctttatatattctggatatgagtcgtgactattttctcccattccgttggttgtctttttactttcttgatcatgtctttcaaagcacaaaagcttggaattttgataaagtccaacttatctatttttttctttggttgtttgtgctttaggtgtcaaatctgagaaatcattgcttcatccaaggtcacaaagattttcacctatgttttcttctaagatttttatattttaaatcttgcatttgggactttgatccattttgggttaatttttgtataaggcctgaaggaggaatccaaattcagttcttttgcatgtggacatctagttttcccagcaccatttgttaaaaagaccacttttttccccctgaatcatcttggcatcctcgttcaaaaaacagtctactttataaatttagccttatatattctaggcagctttctatctgataaacatacttatagcatctttaaaaaataaatatctattgaaatatgacaagcataaaggaaaatataaatatcatgtgtttaacttggtcagtttcacaatgtatttgcatcaatgcaaccactattcagagtaaaaataggagattactggcaccccagaagtccccttcactcctcccctagtcactacctccaactttctccccagtggtagcctctatcttggctcctacctgtaatgcagttttgcctgcttttgaactttatagaaaggataccattccgtatgcacgctcttgcactcagcctgtttcacccaacattatgtctgtgaggctgcagttctcgtgggggtacagtgattcatttattttcattggttattagaaccacagcattatttttagtatattcactcaacaaagatttattgcatgccaggtcctgttctaggccttgggagaaggcaaggaacaaagcaaaaattccctgttccccttggagctcatgctgtcttgggtgagagaccaacaacaaagacaataaataagtagaatacataatgtgttgtgtgcagataagcgctatggagaaaaatacaaaataaagcaggagagaagggattggagggtgttgcagctgtacaccaaatagttagggaaggccttgccgagaaagtcatatggaagcaaagacccaaaggagaggaaggagggagccatgtagatttctaaagaaagagcattccaggcacagcaaaggcaaaggcctgagtgtaactgcaggtttggcatatttgaggaacagccaggaggccagtgtagctggagcagagtgagtaagatgagagtgtaagaggtgggcagagagggtgccagaggccaaacagcaattgtaaggaccttggcttttactttgggatgggagccatcaacagaagagtttcagcagaggagtgatagaatttgacttaaaacagcaacaacgacaacaacagcaaaaccaacagactcactctggctgctggattgaagaagggctgtagatggaggcgtggagaatggccaggaactcctgctatcacccaggtgagagatgatggagatgtggacccaggtggtaatggtgcatatggcaaaaatgggctgcagcttggaaatatttgaaggccaagctgaaaaatttgctcccagattggatagtggggctgagagaagatgggtcgggttaagtgttctaggttcagatgttctgtcagttttcttaattaattttctgttactgggcattagggaggtttctagcttctcactgctgtaggcaagatggtggtgaacatccttgtagatggttctgtgcgctgcccagaatgaattttctagggtagattcagtccttctaatgcagcattttccaaccttggctgactgtgcaccacctgcacaggtatttacttgaaagcggtatggggtagtggttagagcattcatctgtgccagaggcctggggcaaatccccatctctggtgccagaggaaagggggcatctcgaggctggggaggcccctggcaggagtgagaagtcctgaggagcccgggcttcaggtctcagagggggccactgttttttgagtaccttcctctctgtgggactcagtttccccatcttcaccatgccagtgagtgggtgggtgtaagtgagcgagtctgcctggaggatcctactgctgctctctgcacctcttaggggaatctcctgcctcctccttctcccttggtgggcgtgagatcaaagttcaaatgtgtacctcagtttctgcatctataagttagaggcaataatagtcaataccctagaggtggaagtaactgagttactgtctgtaaagactagcacatggtaaacactttctagatgccagttattttcgttatttttaaaaattgacttcacattttttaaaacaaccaaatatgagtttcaaaaggaacatttacattaacatgttaaatggaaaaccggtgtcatttgctccggagaacagaagaatgtaaaataaaatatatttaatggaaacaaaaacaatgctattaaagctaattagatagtttcagagccaagtaatctaggcagtgctagaaaggtactcaaaccctattagtactaaactgagaaataaactccattcaacataaacggaaaaactgaaaggaaaatgaaaaaaaagaaccttaaatgaccagtccactcttacctaacatgtaacctgtcacactctggaaaagttttcctagttttggctgtgtgtgcgtgtgtgtgtgtgtgtgtgttgggaagtgaggcgtgtgtgtgttgggaagcgatgtgtgtgtgttgggaagcgatgtgtgtgtgttgggaagtggggtgtgtgtatattgggaagcatgtttgtgtgtgttgggaagcggtgtgtgtgttgggaagtggtgtgtgtggggtgtggtgtgtgtgtgttgggaagtggtgtgtgtgtggggtgtgtgtatgtgcacgtgtgtgttgggaagcagtgtgtgtggggtgtgtgtgtgttgggaaagcagggtgtgtagtgtgtgtttgtgttggaaagtggtgtgtgtgtggggtgtgtgtgtgtgtgcacgtgtgtgttgggaagcggtgtgtgtggggtgtatgtgttgggaaagcagggtgtgtgtgtgttgggaagtggtgtgtgtgtgagtgttgggaagcagggtgtgtgtgttggaagtagggggtgtatgtgtatcgggaagcatgtttgtggtggggggaagcagggcgtgtgtgtgtgtgtatgtgagtgttgggaagcaaggtatgtgtgttgggggaagcgagggctgtgtgtgtattgggaagcatgtttgtgtgtggggggaagcgagggctgtgtgtgtgtattgggaagcatgtttgcgtgtgggggggaagcagggcgtgtgtgtgtgttgcgaagcggtgtgtgtgtggtgtgtgtgtgtgcgcgtgtgtgctgggaagcggtgtgtgtggtgtgtggtgtgtgtgtgtgtgtatgtgtatgtgttgggaagcgggttgttccgaggactccccgattccctcctggttgaaacgtggcccagaaagagaggcacactggctagggcacacagccagggccgtccagccccgcaggaagccccggtcctgccctgtcccaggtaagcctggccagccctggagccggcgctgcggggctgcggggctgcggggctgcggggccacgggacaggagcgggtgctgcggtcccggcagagcaggggcggggtccgggcgggggcggagccgagcgcccgcgcacccggagccgcagcccgagccggagccggagccgggagtcgtggcccggagtgggccttggagtcggcgcgcaggcggctcgcggtgagtgctgtgcccagcgcctgggggtgggctggggggagactgtgggcgccgagggtcccacccccgggacttgaacacttggcttctgagccgtcctggccgcagggcttgggcaagggttgcctcggtttctcctggnggagtcccagaatgtagatgggaagtgagacggaaagggggcatctcgaggttggggaggcccctgggccactcttttgatttccttcctctctgtgggactcagtttccccagcttcaccatgccagtgagtgggtgggtataagtgagagagtctgcctggaggatcctgctgctgctctctgtacctcttatgggaatctcctgcctcctccttctcccttgttgggtgtgagatctaagttcaaatccatcccttcccagacagcccacaccaggacctgcgaggccacatcccccagctgtttgctctcctatgcttctcaggttgatggagcagccatctggtcctgctttcattccaacaaactgaaaagccctccaccccaatccccctggggaggacctcctgaagctgcatgagggctgggggctggacccctgcttctgagtttgctctttctgagcctctcctgccatggccttggtttccccatgggctgtgacctagcctcctccagggtccttgttctacagaggggaaacacctgccctgtcaccctcccctgaccccttagtgaaaaagaccagagtgacatccccaccacctgtacttgcctgtcccgatcactcagccatggggctgctggggcccctgagtttgttggctgctcaaggcccctttgcctcgctgcaccctgggatctgaggctggaagcatcctcatccagcccacctccctcctacccagtgcagagcccctctgtgacacatgcccagtggtggggagcttattactgatgaggtggctttttagtgccttgcagctcttgtttcctttagctaaaatctgtggcttacagattctacaccttggttccatgtctgtctcccggagccatgcagagcaagtcagttctttcattctttccagcagtcatcattcatgcactggatgagacacgagacagagcagtaggaaaatcagacaaaaccccctgccctcatggagtgcacactctagaaaggaatggacagcaatgaaataagtaaatacatggcgtagcaggtggcgggaagtactacgagtaaaacaaagctgggaagcaggatggggtgctggggctgggtattgcattgtatatagcacaaccagggaaggcttccccaagaccacgatagctgggcaaagtcataaggaattgaggggtgagccacatgagtatctggggggctgggaggctttggttttcactctgagcatgatgggagcacgggtttggaacagaggagtcacctgctttgacttggggtctggcaggcccatctagctgtggggtggagaatggatcatggggggggtggggtaagggcagaaggagagcccgttgagcggatcattgctgtcattctcgggagagaccatggtgtcttgcccatggcccagaggtggttaaaaaaaagaaaaccagacattcagatttgggatatatttcaaaggccgtgtcgatagggtttggggtgcaagagaaaggtagagtcaaagatgattctgagtgtttggctcgagcttctggaggtttgaagctgccatgaactgaaatgggagttgcttagcggagagatcaagagtttggttttgtgcttgtggagtttgagctgcccattaggcatcaatgatgagtaagcagttgggaaaagttaagggcggaggttggagttgaaaataaaactttgggcatcatcaccatataactggtatttaaagccacaagagcaggtgggctcatctagggatggagtgatatggagaagagaaggggtctaaccattgagtgctggggcccccagtgttaggaaccagccaagaagacagaaagagtgaaaatcagagagttggggtgtcctggaggaaatgaagaaaatgccccaaagaggaaggagggaacaaatatgaccaatgcccctggcagagcaagcaggctgagggctgaggattgagcaatgggaggtcactggtgacagtttcactggagctggatggggaactagagggaatgggaggggatgggaggacttggggacagcagtacaggcaacagacaagggggcctgctgtaaagggagcagataaatgggattggagccaaatgaagaaggggagtgtcaagagagtgctttacttttacaatggagaattagagtgcattgtgcactggtggggggatttgatctcttagggagagaacagtgttagggagggagaatgcaggatagctgggggagggtggggggcttggccccagcagagactcaggacacttgggaagttgagcttccctgggcttcccctcctctcctgtctgcaaggggtcagtgggctgagatttcagcacttaagcaaagcatttgctcttggccccagagaaaccgggctggctgtggtctcaggaaggaaggaggtgtccaggctcaggcctgggcctgggtttcagggagggcccacgtgggtcaccccttgaccctctctttcagcaaggaagtgatcctttctctacatgggcctcaccttggggaggacaatggtgtctttgaagttgtagtaactgaagtagagatcaaaaggcaatgcagatagactgacagatttcgcctgaagaggggaagcccgaccaggtaataaaggagtaagaggaaggatgttaaggacaattttaggaaacagataatgagtgaatattttttctctctctttcccaatttaaactgaagcaggagaaactgaagctagacataatgattaacttcccaagctggtgagcttcctgagctggttagtgagaacagcactaaggccaggttctcctccccagatgtttaagatgagacaggacaatgcctgctcagagacagggcctggctgaattggccctcaggattctctctgctctgaggtttctggaagaaggccagggcagaggtgtggtgatgtagctgctgggaggacagagctccgagtcacgtggcttgggcgggcctccccttcctggtgtccacagaagcccaacgtcactagctggggtgtgtatggctcacacgtaggccaggctgccctaggcttggtgtgcaagggaggggcccctacttacttgtggcctgtcccctcgtgaatgtgtctcatgtccccagtggggtttttcagtgagggtcatggtctccaggatgcacaaggctttgtgccagaattgcttggaattgcctagttctggaaggctggttggccaactctggcctccggcttttcctttgggaatttcccttgaaggtggggttggtagacagatccaggctcaccagtcctgtgccactgggcttttggcattctgcacaaggcctacccgcagatgccatgcctgctcccccagcctaatgggctttgatgggggaagagggtggttcagcctctcacgatgaggaggaaagagcaagtgtcctcctcggacattctccgggtaagaggagcaggcattgtcccgtcccagcttgatcctcagccttctttcatccttggccgcgacatgctcccaggcctggggtcagatggggagtgctgactctgtttctgggctgttttctggggagaatgggtcggcgggtttttttccccaggacctgggcagggtcaatggtgggggccgctgtcgcatccttggctggtgtttccacagctgagaaccactccagggccaagcccagagcttattctacccttttttgtcctctcttcccctgtcctcggccaccccaccctcttggctcctctgcttagatgtgggcacaaggaggagaactccttggcctgagagaactaccttagatcctggcttccagtggcctctgcaggggggtacaccctctctcccaagcagccagacacacaagtaacctcattgcctcagtttccccatctgaccagcacagggccccctgtgccccagcagcgttctgagagattggagctttctccttttgcttaccttggctaccgtatgaggacggatacagagtgttccccccacccccagcccaggggatatttgattcatgaacattccctcagtgtctttgtgggggacaatgctgtgccaggctcagggatgccaggacgagtaagacccaggctcccacgtggcccaggcagggagagagacacataaacaaccatcaggaaagaggtaaaatccccaggccacttggcatctgctcccttgagtgtctgggaatgtccctgatttataaaaagaagctgacggccctctttgttgtccatgcctacaccctttcactttcgtttcttcggggcactgcagcagcccttgtccacagaccccatgacaatcgcagaactgaccatgctgagagattttcttggctgctcagggaccctgccagggcttgaagctcctggagggtcacttgccctcaaattcccagaacgcacagcaggtcactgatgatagcagtggcagcagtctgtgcacggtggtttcgagggcgtgggagggaggtgagggccctagggcaagtgtgtgtgggaagtgttgatgggggacaaggcaccagaacgctcggaaacaacttagtttgcaccgtaatttttcacttcgcctaggacaggacctttagagcaatattctgagtctaccccttggagtagcagtgtgcaaaacacacagcacgggcttggggcccccgtggggaacccaaatgtaagagttagagacatgcattccggagtcatacatggctcgtgttgaaatcctgactctgcctgtctagctgtgacacatcgtacaaatcacttagcttcttggtgcctcagtgtcttcctctgtagaatgggtagatcataggcactacttcagagtggctgggagggttcagtgaattcctgcaggagagcacttagaatggcacttggtgtgtagtttatgcttaattaatattagccgttactgaaactgctgtagcctgaatccagccagcatgaaagagcccctctcaccctgcttcgaagagaatgaattccctgattgtttggaagatctctctctctctctctgtcttttttttttttttttgagaaacggtcttgctctcttgcccaggctggagcgcaatggtgccatcttggctcactgcaacctctgcctcccgggttcaagtgattctcctgtctcagcctcctgagtagctgggattacaggcgctcgccaccacgcctggctaatttttgtatttttagtagagacagcgtttcaccgtgttggccgggctggtctagcgctcctgatctcaagtgaccttgggagatctcttgctcctaatattacctcaagcctttttaaacgttttaagccggagaccaagcatggatatgggagttaggggtcttgatttaattcttggttgcttcaaactctgtggaaccttgaggtgtttcttgccttctctgggtctcaattttcacatctatatggtggggagcttggattgggtaatgtctgaggctagaaccatggccaactcgggttctgctggggctgacttgccctggccttccctgaccaccctgcatctggcttctggagaagtccctcactgaccttgttctcctccccaggttgtgaaatgtgctcgcaggaggcttttcaggcacagaggagccagctggtcgagctgctggtctcagggtccctggaaggcttcgagagtgtcctggactggctgctgtcctgggaggtcctctcctgggaggactacgagggcttccacctcctgggccagcctctctcccacttggccaggcgccttctggacaccgtctggaataagggtacttgggcctgtcagaagctcatcgcggctgcccaagaagcccaggccgacagccagtcccccaagctgcatggctgctgggacccccactcgctccacccagcccgagacctgcagagtcaccggccagccattgtcaggaggctccacagccatgtggagaacatgctggacctggcatgggagcggggtttcgtcagccagtatgaatgtgatgaaatcaggttgccgatcttcacaccgtcccagagggtgaggcactcctggtgtgcatcacagagttctcaggaaaggggtgcttagtcaccaagactgatttgtcctcatgaagtcagcctgtggggtaacttggtccgtgggatttcccctaaaaaggtagccaggcaggtaaaatttgctcttgactcttggcaggaaacatacaactctttctttcttcttttcttttctttttctcactctgttaccctggctagaatgcagtggcacaatcatagctcactgtagccttgaattcctgcgctcaagtgatcttctggccttagagtagctgggactacggctgctgtaccaccatgaacagctaattttttttttttcttttagagatggggtgttgctatgttgcccaggctggtctccagctcctggctttaagcaatcctcccgccttggcctcccaaactgttgggattgcaggcatgagccactttgcctggccaacagaacacttctgccgagaggaagtgtgtggtggccaggaactcagattctggagccagaatggtgcaggctcaaggtcaaccctgtgtgatctcaggcttccctatggagcctctccagcctcagtctcccttgtttcagtttcctcatctacaaaacaatgttaatagtcaaatggtgcctatcctataaggctcttgggaggattcagtgagttaatttgagtaatgcttaggatagtgtctattaccactggctgctatttattatttctgttatgagtgatactctgtacttgtacacttttatttctgtctgttttaaattaacagcacaacagaccataacactgcagtatattgaatttattttataattaacatagcatattataaactaatatagcttaaatgtttatgtaggatttctgacatgaaattgcattagatcatagatgttcagagttggtatataacagcccctgagaatgtagtaactcagcagagaccagaaggtcagagaaatgaccactgagtatttttgaaactcttttgttttcttccaaatagtgattcttagggctcctgagaggcagatggaacaatcattaacattccactttataaatcgggaagttgagaccaaggaaagtagtttgaataagctcacagtagttaatgagggggccagtgctggaccaattggccagcactggtcattgacttattcatccatcattcatttattcagccagaatctattaggtgcttcatacatatttgcttaaagtttgttgtgttcatagagctttgcacacggtaggtactccataaacatttgttgatgaaataagtgagttactgaatgaatgattgaattagaatgacactgcagtgttaaaatgggctgggttggggaacattttagtttttgtttttgtctgttttccaaaaatgtatgtgttgttcacatgagtctggataaccctagattgagattgatgacataaataaatttgtcttcaaggctgcactaaagctggctcacatggctaggtatttacagagcagaagtggtgcagtcctctctgattagttgcacgtacagaagacatattcgttattggactgaccttagtttctcttataatttgttaggggaattgaatcagcccatctgagaagttacaagattgtgtcttgtcatctttaaaagttcagcaatgtgatgtggtacagatggtctgaggggtttggagaaggtagcctagatccctagggcccagagaagacaggatgtgaacagaggaagtacatggattggtgaagaaaagaaatgggataactcatgggtcaaagaagaaatcatgatggaaatcagaaaatattcagaaccatacaataatgagaatattatttatcaaaatctattggatgcagctaaagcaggacatagggggaaatttacaaccttaggtgcctagattaggaaagaaggaaggcatttgtttatttatttgtttatttatttatttgagatgggggtctcactgtgtcacccaggctgctggagtgcagtagcacgatcataaatcactgaagtctcgaacttctgggctgaagtgatcctcccgcctcagccttccaagtaggtgggacacaggctagcaccaccataccaggctaattttttttttgtagacacagggtcttgctatgttgaggtctcaaactcctgggctcaagtaatcctcctccctcggcttcccaaagtgctgggattacaggcatgagccactgcgcccatctaaggctgaattttaatgagctaagaattcatcttaagaaagggctaaatagacagcaaaagcaaacattgaaggttgggactgagctgagtgggtagcagggatgggagacaacagatctgaggagagcaggagattttgaaaggattgcactgcctgaggtttaagcctttagaatccagctctctctgagctccctttgagctctgacattctgtgactctgatttggtggccttcccttagtggccttactgatttcatttggatggtgcttgtggtatatccaaccaacatgtcttcccaaatggccttttaatttcctataaagaagtagttgtcattgattgcaggttagggacagaaaatgctgtggaatgaaacaaaatgcaagttaaagaactaaattccaaaaatacccattgctactattgactgagtgaattcctactgtgtgccagacactgtacccagtccattccctgtattgttttatttaagcctcacaagggtatagtgtgactacactgtttcttaacaatgaagaaactgcccaaatcgcccatctgggaagcggcccagctagaatttgaatccaggcctgttttcctccagagcttgtgctattctctgtctgtcataaaatgtgggggctttgtgtggtaaacttgctcagttgggcatagcagttgttaggaaacctgaggctggtaacaccagctgtaataccagctgtccgtctgactcatgcaactgttaaagttgatagggctgaggtgtcagactgagctctgaattgcctgattcctataacaatattaacttaaacattttttaaattgggaaatgcaccatgcatacagaagagtgtgtatatttcatatgtatagtgtaaactgttcccatcacccaggttaaaaaacaggatgttgccagtacctggggccttctttaactgcaactgctagaggtaaacactggcttgacttttgtgtaaatcatctctttgcctttctttaatgttttagcatcttttaaaataaatccccaaataatgtattgttctattttgaaaaactgagtagcaagccaaaaatagctgtgtaaagaaaggtcacttaaattaggctgggtgcagtggctcaagcctttaatcccagtactttgggaggctgaggcaggtggatcacaaggtcaggagatcgagaccatcctggccaacatggagaaaccccgtctctactaaaaatacaaaaaattagccaagaatagtggcatgtgcctgtagtcccagctactcgggaggctgaggcaggagaatcgcttgaacccgggaggcagatgttgcagtgagctgagatcgcactgcttgaacccgggaggcagaggttgcagtgagccaagatcgcaccactgcactctagcctgggtcacagagcaagactctgtctcaaaaaaaaaaaaaaaaaaaagaaaggttactattgccttttcttagatgaaggttcccaaggcagggaaagctaagtggagtctcagggacttggtctggcttttccttccctgggaatttataaggacctcttctgggaagtcagtcggcaatgccatgaatgagtctggggaaatattgggctcattgcaactggagggtctggtaggactgatgtgaattaggtgctgtgtccggaggaaaatggccagaggaagtgggctgctttgtacagtcagtggtaaagttgccaaaggctattatagctcacaggaatgggccaaggctaaacactcctgtggagtgaaatgaatgtcctcagctgactgaggcagcgggagttgagaagaaacgatattagttcatggtgaagacaagtcaaatatagataaaggttagggtcaggcttgcctggacatctaggagataactgccctcaacttgtttgaatcttgagtcactgctccattttgtttgaactggtggccatctacttatagtatacagccatcaacctgagatttccctacatggtcttcctgccttggtctcctgtatcctgaatcctatggcctcttcttccctggtttactacattttgctagaccgtatcctccagtcaattccttagaatgaatgtatgaaagttaaaatttctgaggtctcacatgtcttaaagttccctcatactggattgatagtttggctgggtataaaattctgggctggccatcattttccttcagaattttgattgcattattccattatcctctcttttcaatattgcttctaagaattccaaaacctttttttttttttctttttgagacagtgtctcactctgtcacccaggctggaatgcagtagtgtgatctcagctcactgcaacctccacctcctgggtttaagcgattcttcttcctcagcctcctgagcagctgggattacaggcacccaccaccacaccctttagtagagatggggttttgctatgttggccaggctggtcttgaacttctgactttaggtgatctgcctacttcggcctcccaaagtgctgggattaaaggcgtgagccaccacacccagcctccaaaaccattttaaaactctttctggaagcttttaaaattttcttttagtccccagaattttaaaatttcaattatgtgccttggtgttcttccattatattagtcacccaagaggtactttcaatctggaaacttctctatgttttgggaaatgttcttgattagtttacaggtgatttcttcctctccattttatctcttctcttttcatgaaactactattaattcaatgttagaattccttgactgatcatttaattttcttctattttccatctctgtgtctttttgctctacttttctatgatagtcacagctctatctttaaactcttgagtttttcatttttgatgtcatgattttaatttgcaagaggtaggtttgactgattcttttttgtagtatcttactcttgttttatggatgcaacatcttctttgacttaaggatcataagataggtgggttctttgtttgtttgtttgactgtttttcaccctatgtaaactttttctacaagtttctttccccttcccccctttttggcttctatctcccacattagatgctttctctgggctcatgatactctttggttttctttctcaagattgacaggtaggactttaaaacttgttgagcatgcgggtgaaacttgtctaccatgaatttcactgtagatattttggagattgacagtgtttatatctttagatctcacctcctgggttgatcaagttatctgagtacaccacagaccttttgcctggggataaaccagaaatctgtttcagaaaccactttgattcagtcttccttgttttagtcatttccttcagttccggaggtccgtcatgctgatcattccagagccctttacagatcctagggtacacactgcatggttttcaactttcttgttttggggttaagatttggctttcaggagtctcctcagtccgttactattcattcaatcagcaagtccttgagcacctgatttgtgccagacattcttctaggtgttagggatacctcagtgaacaaaacagacaaaaatctttgtcttggaaatacacacactccagtcaggggagagggacaataagccaaaggaaggaaattacagcgtgtgctagaaggtgataagtgctgtagaaagtaagtaaagtgggtttgggagttgagagtttgggaaggggataaatgatggcaattgtaaatagagtagtcagagttctcacttagaaggtgaaattcaagtaaagacttgaaggaggacagggaattagccacatggatggctaggggaaggcttccaagctgagaggacagccagagccaaggcccagaggcaggagcatacctggtagttttaggaaacaggaggccaggatgctgagtggagtaagagggggcatgaaaggagaaacttgggtccacgtggttctagacaggtatttttgtctgttttgggccctgaaggttactattggacttggactcttactctgaggaaatagggacgctattgggacgtttgtacaggagcaatgtgacctgagttttgtttgtaaaggattagactctggctgtggcattaaggctaggctgtgggggcaggaacagaagcagggggaccagttttgcagcctgtgcagctttccagataagcagggattgtggcttggaggaggatggtatagaggaggtgacaagaaatgactctatgtctggtatgtagatattggccacagatggcatttgagcactagagacctggctggtccacatggagtttccataagcacataatacacatcagatttcaaagacttaatatgaaaaaaaaaatttaacgggccccgggaatttttttctttttttttttttttgagacccagtcttgctctgtcacccaggctggagtgcagtggtgtgatctcggctcactgcaacctccgcctcccaggttcaagtgattctcctgcctcagcctcctgagtacctgggactacaggcacctgccaccacgcctggctaattttttgtatttttagtagtgatggggtttcaccatgttgtccaggctggtctggaactccggaccttaggggatctacccgccttggcctcccaaattgctgggattacaggcatgagccaccatgctcagccatatcttgctattttctacatggattacatgttgaaatggtaatgttttggctattgtggattaaatagaatatatgattaaagttgatttcatctatttcttttaactttaaaaaatatgtctgttagaggatttgaaattccacatgcggcttgcatttgtgacctgcatttcatttctgtggaacagtgccctttttgggacatgctttgaaggtggagtcaacaggatttggcagattacagacgagaggcttcaagggtgactccaagacttcggggcagagcacctggaagaaaggggttaatattagccaagatgaggaaggctgtcggtttggcaggtgcatgggcaggttaggagtttagttttgaatatgttggaggtgtttatgaaacttttaagtggagatggaaaataggcagttggatgtgcaagtccagggttcagggagacagttcaggctggagatgaagatgtgggagtctgaggagagattgtattcaaatattcaatccatgagacttgatgaaatcacttctcttccaaatgatttacagcctgcagaatcattttccctatctttgtaggtttatgtcttcattttgtttcatttatttttcagttattcactgttttagtgagttttgagtaggagccagattggatgcatgcgttcaattcaccatccaacactgtattaactacttgaaactcatgtggttgttcggttgtttttttgaccttttattctggatggaagagagatgcttatgaagttgcagtaatcagtaagccttcccacattgctccatcagccttcctggaagaataatgtcttctgcctttcctgtaggcaagaaggctgcttgatcttgccacggtgaaagcgaatggattggctgccttccttctacaacatgttcaggaattaccagtcccattggccctgcctttggaaggtaggtgtatgttctcagttaatcagaaagggaagggcagtcagtgcagatccatggttaagagcagaacacacctcggttaacatcccatatgctggcagtatagcctccctatgactcaatttccttgttttaaggctagcaccaccccgtctcattgggattttgggagcattaaaaggacaaaagcgtgtaatgttagctattagctttcattatctcccacacagtatactgacaattgggctaccatatattgagggctaactaaaggtgttacttaccatccaaactctcattatctgtaccgaaaagatatggacacatgttttgagttagggctggtatctcttgatctctgaaatttagcagctcacaatgggaaactcaagaaccaagtggatctagagactctggtatccctcagtgcccagggtcaccacccaaactcaggaacaggaggggcttggaccgcaccacttgaacataccaggcatcctgccaggtgctttatggacaatgtctaccctttgcaacaaccctgagaagtaggtggtgtttttttccaccttatagatgtggaaactgggcagggaggttaagtgacgagggaggggaagatgggtctgattgtaaattgtccccacctacactttctcttttcttgggagaagaaatgtcagttgtaaagagagagtgcaagcctggcactctttagggcttgttcctacaccactgtagggaaagctcattggcactgaagccccctgagctgtgtgtggtgctggcagatgggtctatcaccctggactgtgtcctctgggcagcaagcaagcctgtgggcggggtggctggaagtctgtgcctggcactcgcgagtgcaccgtctcattgaagaacaggatctaaacatcagtgcgccacagcagggtgcgcggcacggagtgcaggccctggtttggcccttggttgaggtttgctgttgacatcatcaagcacagctagtcactgtaagaccaggccagggtgcaagattccccacacttctaaaggtgacaattggtgtatttatttctctataaaatgacattttttttttctggagaattttagtatcattggtgatgactggaaaacctgcatcagaaatcaggtcggaagaggaagatatatatctgatatgtactggagaggaagatatctatcttatggtctaagttcagggatcctggtatattcagagggcagaaagctcagcaataatcatcaactctgggaacagaggtgacataaacacagggcgtcccctttgtgtgactgcagatagtcatcagtgagctcagagctctatgaaaattacttgctagtttttgggttgaaaatagtgggccagtgtttggttgggggcagtgaggctgtgatggcgggggaccatgccaagctcctaccagcctgggacgctaaaccagcacttccccatttcctgaaaggggaactaaactctgacacaggaaatggtttgcttgcattactttcaggatgagaaaggaagagcactggccttccaaacacaccccgtgcatgaaaactctccctgcatggggtgcatggggaggatggggaagtggaggcaggatcacagactcttgttcgagtgctcagctggggcaccccggtgaccccgaggccttcccttgctaggtccacccagatcaatcaggatcatctccccatctcgaagtttaactttatcacatctcagagttccttttgccacgtaaggtaacatattcacaggttctgagaatccggacatggacatctttgagggtctattgttgtgcctactatatccatgaataataatgataataagcaccattttttgagagtttgccatgtcagatattcttttaaactgtattttatctcgctgcctcctgaaaaaatccttccaggtgtatattgtccccatttttacagatgagagaactgaggcccagaaaggctaaatggcttgcccaagtgtatggtggacccaggttttcaaactcaggtgtgtctggcttcagagactgggctcctgagcccttaagccctttgttcccctttagaaaaagtcacctgaggctgagtggtgaagggatttatccaaagccacccggccactatggcaggacagatatcagaatacaggtcttccgatcccagcccagagccccttcccgtcatctagaactcctcctggtgtcagtaatgataacggcagtcactgatgtcttttgagcacttactttgtgttgagcacttacactgtgctaagcacttgacataggtcatcttagttgatccgtgtaaaactctgtgaggtagtgaccaacatttctcccaccttacagaggtggaaactgagggttaggaagtttccttgactgtcctcaaagtgcacagcttgtgaatggaggagccaggatgggcgcccgctggctctcctatcccttcagttatgtcagcgtcccccgcagcagcccattgtctggttaggtcccgtcttcaccatggtgccaccttcatctgcctcttcttctgccttccagctgccacatgcaagaagtatatggccaagctgaggaccacggtgtctgctcagtctcgcttcctcagtacctatgatggagcagagacgctctgcctggaggacatatacacagagaatgtcctggaggtctgggcagatgtgggcatggctggatccccgcagaagagcccagccaccctgggcctggaggagctcttcagcacccctggccacctcaatgacgatgcggacactgtgctggtggtgggtgaggcgggcagtggcaagagcacgctcctgcagcggctgcacttgctgtgggctgcagggcaagacttccaggaatttctctttgtcttcccattcagctgccggcagctgcagtgcatggccaaaccactctctgtgcggactctactctttgagcactgctgttggcctgatgttggtcaagaagacatcttccagttactccttgaccaccctgaccgtgtcctgttaacctttgatggctttgacgagttcaagttcaggttcacggatcgtgaacgccactgctccccgaccgaccccacctctgtccagaccctgctcttcaaccttctgcagggcaacctgctgaagaatgcccgcaaggtggtgaccagccgtccggccgctgtgtcggcgttcctcaggaagtacatccgcaccgagttcaacctcaagggcttctctgaacagggcatcgagctgtacctgaggaagcgtcatcatgagcccggggtggcggaccgcctcatccgcctgctccaagagacctcagccctgcacggtttgtgccacctgcctgtcttctcatggatggtgtccaaatgccaccaggaactgttgctgcaggagggggggtccccaaagaccactacagatatgtacctgctgattctgcagcattttctgctgcatgccacccccccagactcagcttcccaaggtctgggacccagtcttcttcggggccgcctccccaccctcctgcacctgggcagactggctctgtggggcctgggcatgtgctgctacgtgttctcagcccagcagctccaggcagcacaggtcagccctgatgacatttctcttggcttcctggtgcgtgccaaaggtgtcgtgccagggagtacggcgcccctggaattccttcacatcactttccagtgcttctttgccgcgttctacctggcactcagtgctgatgtgccaccagctttgctcagacacctcttcaattgtggcaggccaggcaactcaccaatggccaggctcctgcccacgatgtgcatccaggcctcggagggaaaggacagcagcgtggcagctttgctgcagaaggccgagccgcacaaccttcagatcacagcagccttcctggcagggctgttgtcccgggagcactggggcctgctggctgagtgccagacatctgagaaggccctgctccggcgccaggcctgtgcccgctggtgtctggcccgcagcctccgcaagcacttccactccatcccgccagctgcaccgggtgaggccaagagcgtgcatgccatgcccgggttcatctggctcatccggagcctgtacgagatgcaggaggagcggctggctcggaaggctgcacgtggcctgaatgttgggcacctcaagttgacattttgcagtgtgggccccactgagtgtgctgccctggcctttgtgctgcagcacctccggcggcccgtggccctgcagctggactacaactctgtgggtgacattggcgtggagcagctgctgccttgccttggtgtctgcaaggctctgtagtgagtgttactgggcattgctgttcaggtatgggggagcaccatcaaggctaagtgtgggagcaccgagctgggctctagaagtctgggcccagcttcgcctctgccaccctgctttgcaacactgcccagatcccttcccttctgggccttaatttcaatatgtgatgatgacagccacactttattgactggcctatgtgctgggtctggtgctatgctttccggaatgacctcatctaatctctacaaccaccctggggggtaggcaggaatgttattatctccattatccttgacttgaggctcagagaagtgaagtaacttgtccaggaaatggcagagctggggttcacaaattgcatcattctgattacaggttttctgcctcccaccagtctatggatacacttcagaggctccctgaaaaccttgaggtcacttgcagaaagttttgtgtagtatgtgtccgtatcaggaacaacaccaaatcagaggtgacttgtgccccatcagagactttaacaccccaaccagatgggaatttcaggacccaagaaatagaaagtggctgcagggttacaactactgttggattcctgaggtagcacagtgtccaaacaggatttcagcactacccgtattgcttagagccccagccaaagatgtgaggttttgccctttggagaatctgtgcccctgaactcgggggcctctttccacatcttgggggcaggcaagggcagagggtgtgcctaggcctgcggatcagcatgcgacagattccccaacatccttccagcttgaaaggggattgccctgcttctatttagaacctataggaaagcagaagttctagattgaagttaaaattgattcccagcctccaggggctttgggctacacctggatgaccttaattgaccctaagcatgggacaaaccacttcctgagagtattaggatggtatacatcttctctgggggcaaagcaacaagatttatttttcatcatggaccaaacacatggatacccactagaaactgtgtagtgaattttgttaaccctgacatagggaccatggtctttaggttaaagcataataacaacataatacataacatatatagcgaatatatatatgtattatatgcaatgaatgtaaatatgattatacccatcatggtcttggaggaaacagatgacacacttaaaatgggtgttttgaggagagtttgaaaaacagattgtttacaagccatgggcaggagttaggaagagtgagagggttggtgcaggggcctggggttagtaacagctgggggagggtagacttgaagggggaaggggagggagactaattagctggggggaaggtatggagacggctgcctgagcttctgcaaagtggaagaatactgcttggccctaactcctcaccccaactcttgctcgtggccagcgccttccaccagctggacccatcagggaggccgagtgggctgtctgctggagtagtccccaggcatcagcctcccaggagccagggacgggtagagaagggggagagtggatctggccaggcaaatggaaaacagccagcaccaaactctatttccctaggagggaggatcatgatactttgagtgggaatttggaaacctgtctgttggagcaatttccctgatagaaataagaatgtgcattttcctgggtagtagactcagtttttaccccaagaggccaggcatcactggcctgtgtgatcctcataggccagtccatctctggaattcttgaatggatcatccatccttgattagggatgtccccgtgattaccagggtgtgcagaagggctctgggaaacctgtgggtctgtctctgtgttcagagaaaggtgagggtggcctggttctagctcatggtgctcagactgtggtgtgtaaaggcactcgtggcaatgcagattcctgggcctgcctctagtgattcccattcagtaggtttggggtggggcccaggaaatctatatttttcacagacacccctggtgattctgatacaagtggtctcgccctgggagaactactggtctgcagcaaccagcttggttttccattagcaattactgtccttgagcgagttttactgctcttcaccttacacacactaaaactgccaaggccgtaggggaggggaagcaaccatgaggttgctgtgagtgcactgtgtgtgtgtgtgtgtgtgtgtgtgtgtgtgtgtgtgtatgagagagagagagagattgagaaagagaggaagggaggaagggggagggcacaggctcctctcccacagtgccaacctgcctctctcccacttgaagcgtttccatgccaactgaaatcctcagcctctaggaaaccctatatacacagtgcccctatataggtttctttagactctggctctctcagactctagagtgatggctttaaaagttttatgttacccacagagagagagcacgcaccaccatgtaaacatggaacctaagtttcacaaaatgacttcgctttatgaactctgagacactctgctctcttctgttctgttctatttccattttagaaatgctgctcaggaccttcaaaatgatttgcatgacctgcaacctgcagtctgaaaaatcactgcactacagaagtggccataagaggccctgagggagaagctgcacaatgtcatggttaagagtggggtttggagccaagccgcctaggctcaaagcctttatgtgccgtacaaccttggcaaagtcacttcgcttgtctgtgcctcagtttctttctcacgaatgctcataataatggttcccatttcactggcttgttgtgaggatgaaatagtgttattattgagaagtggtaagggtagtgatcagtgctagcgatcatgattctaggtgacttttactgtgtaccgggtgctcacaaggctttatgtgcacagcctggtgaggctgataatactattgttccctcttttttttttttggaaacggagtctcgttctgttgcccaggctgggggtacagtggcacaatctcggctcatgcaatctctgcctcccgggttcacgccattctcctgcctcagcctcccaagtagctgggactacaggcgcctgccaccacgcccggctaatttttttgtatttttggtagcgacagggtttcactgtgttaaccaggatggtctcgatctcctgacctcgtgatccgcccgcctcggcctcccaaagtgctgggattacaggcgtgagccaccgtgcccggcctgttccctcttttatagatgaagagaccagcaaataactagtaagtcgctgatcaggatcacaatatccagctgaggcactccagagcctgagctgttaaccattcagtcagggcctcccaagtttgcctaaagataaagaatcatgtgcacagttgttaaaatatacagattcctgggccccaccccgcagatacttgattgccagctccagggtatgggcctgagaatctgtcttttagggaagctttcagatgatgttgtgatcaggtgagttttgggaatggtgccccaagaggagtggcagacagggcttgctcggcagggactagcctgttggagtggtgccattggggttaaggactgggcagcagggcctcactaaccacagcctatatgcctgtttctgaagttttggccactctcatccagctggtctactgtctgctgacctagatgatggtaaattgtccccaggggtagcctgtctagttcaggctgcacctttcgcatatatcagctcctttccaccatcatcccctttgtgaggctgctgtgattatcatgttccttttgcagagatggaaacattgcctcaaattagctctgtcatttcctaaggattccagggttctttagtagggggtctggatcctacgtcctgggccatccccatcatagtgcaccacgtcacctccctggccagggaccgtggggtctccacttttttggggtgctccatctatgcagggtttcctggaagcacagatgctggcacttcagggatgaatgaaagtctttttgggggatttgtagatttttttcttgtcttactagctccattttcaaatgtatttattttgtctctttagtttgcgcgataacaatatctcagaccgaggcatctgcaagctcattgaatgtgctcttcactgcgagcaattgcagaagttagcgtaagtcagcctgggctgtggacaatgggctccaagtgccctggtctcaccccaggtcgtgcagcctgggaagctgtgagtgatgggctggggcaggggctgtttgcatgatggggggtgcaggtgattcctgcccagaggggaagggcaaccctgggatttggtgctcactgtccaatgtgctttgcttctgtgtctcctctcttctggaactgaacagtctattcaacaacaaattgactgacggctgtgcacactccatggctaagctccttgcatgcaggcagaacttcttggcattgaggtgagcccaggttttccttattccctggaaactattttttgccccattcctgagtcagtctgatctggtcttggcctggcactgcccacactggctcctgacctcctgattgaatgcagggacagtgtctcattttaagcaggggttctctaatgctgtgatctccccagtaaactctggactagctctgctgaggacttcctgtcttttgacctttagcccgtagggcaagaaagcttttctaggcccctttccttttctgtgtctaagagtgtcacagctttctggggttactgagttccacgatgcatgttgagctcgtcctggtgggggaggcatacacagttacttgccaccccagctgtggcagcgagttgctgcaacactcccaggaggtcctttcaccactcagagcatgcaaggtttgcagtccatctggttctgcatttctgctactccagtgtctcccagtttcaacaggagtctctctctctcctacctgatgcctttaaattgcccctctagctggccgctgggttggcctggcttctctctccttctctctctctcagatattcttgcctcctgtgatttgtgaggcagtaaaaaaagacaaagtaaagaattgcttccatctattcttttacctcttgggctgggtttgtggatgggagccgccattttaaaatggcgggccacatagctcagtctcggcaagggctactgagatcagaaccacaggtgccaatttgtacaaaggactcagtcctgctaccactgcctgatccctcagactcacaagcctggaataggctgtggccagacctggctggcccatccctgagaagggtgctagtttcagaaatggaggctgagtttgtggccaacacagtagtcctccggtatgtgcaggagagatgttctaagaccccagtggatgcctgaaaccatggagagtatcaagccctacacataccatgcttttcccaatacctacacacctgcaataaagtgtagtttataaattaggctcagtaagagagtaatagcaactcataataaaatagaacaattataacaatcaatatactataataacactatgtgaatgtggactctctccatctccctcaaaatatcttcttgtactgtactcacccttcttcttgggaagatgtgtggtggtaaaatgcctgtgtgatgggaggaagtgaggtggatgacgcatgcagcactgtgctctagcgctgggctgctgttgacctgaccacacttcagaaggagaatcatctgctcccagagatccctaatctttgagcaacaatgaggtcggcagctggatgtcaggagcagacgatcttgatgattaccaaatgggagcgtatagagcgtggatgcgctggacggggggctgattcacgtcctgggtgggatggagctggatggcacgtgatcagaatagcatgcaatttaaaatgtatgaattgtttatctctagaattttccatttaatatttttggactgcagttgatttcagataactgaaaccatagaaggcgaagctgcggataagcagggggcagggattaccgtatatcattgtaatagagagcacaggctctggagccagactgcccgaggtttgaaccctcattagctgcgtgacctcaggtcagcccaatgtctgtgtgcctccgtttccccttctgtagaatggaggtaataaccctggctacctcacaggctgtagtgatgagcaagcaagttaatccacatgaagggctgcaccgtctggcaggggctttatatagtaagcgagtggctgaaagatgatgggtaaatcacacaagcactcagcttgtttctccttatgtgagtccggtcctccaagcagggattcaatgtgccacccatttattggggaaaagtcctaaaaggggaagtggggaagggagctgggggaggctgggaggtgtgtccctgagtgaaggagagagggaaggaaggaaggttgagactgggcaccttggacttcagtgcagtcctaagacatcttggcaaggctgatgaggagttcttgaaccaaattcaccaggcaggggagcctgatgtctcaggcaggggctggcaagtgcagatgcgaggatgttagattttggagcacagcagctggggcccttggctacctccaaggagctgaggctggagacctgaaaggcgagttctcctagctgccacaccccttctccaaggatacaataatatctgccttataggattgttgtgagctgagtggcttgacgttccttgaaagaatgaaagcgtatagttatcccaggaagcctagggttgcaggtgagagctctggggcttctccgaagctctccgaggtgtctggattcagttgcagcaggagccttccttgctgggatcttcccccacccctagccttggccctccctctctccttcctttctggaaggctcagtgggccccacccctccctccagccacctggacctgcccagcgctcttgtgcaacaggtaaagcctacctgtagcaacaacagatctgggaaggctgcagagggcacgatggggtctggatcgagggcggctgagaccagagggaaaggtgtgaccctgagtcaccctcgctgtcccggggaaaccacctcccaggacagctgcctactgtggctcctgcctggaattgtcacactgctgtgcaaacagcgtcccgctgcccctttccctttgctgggggaaaatgaagttgtgggagccgctgagtaaactagacctagcagcgagggcacctgatgtggctgctgcctcccgggcaggtcttcaatgctttcttcctgtgtttccctggccagggcacagacggccctccttttctgcctgccgctgtgttctctcagcctcctctgtcttcccttccaggctggggaataactacatcactgccgcgggagcccaagtgctggccgaggggctccgaggcaacacctccttgcagttcctggggtaggttggattccaggaagagggacctgcatggaggggcttgggacttttgaggatttaggggcaggtgaaactcttcagccaggaggccccagaggcagcccagctccagtggggaggacaagccagggagagagtgggcggcccttgactgccaccttcatacttggtctatgcctgacaaacaggaagtttgggatgttggggctaggggaggacagtgcccacgagctggtgacaggaagccctctgatcctcagggggcgctagggctgtactttagctgcatattaaaaccacctggaagcttctaaacactattgccaggcctcccaccccagactgatgaaatgcaaatatctaggtgcaaggcccaggtatcaggagttttaaaaagcttcccaggggatgtacagccaggggtgaggacccctgacctaagaaagagaaggaaatggggaaggataggaaggcacccaggataagaggggctgtgctaggtccctcggagctcttgctccctgtaggaccatgctagggcctgccagggaggggagtaccccaacctgcagccccagggtgggcttcctctgtttgctaggcacccaggcttgcacctgtgctgtttccagcagcctctctcctatcctgtcatgccctagtgtgaactggagtccatttgacaagaactgggagttttagaacctgggactgtaggaagagagaataaccttagggcctaggtgttccagcccatttcacagggaggcaagttgcccccaagctcagttttttgttttgttttgttttgtttgagatgtagtctcactctgttgcccaggctagagtgcagtggcacgatcttggctcactgcaacctccgcctccttggttcaagcgattcacctgcctcagcttctcaagtagctgggattataggcacccaccaccacgcccagctaatttttgtatttttagtagagacagggtttcaccatgttggcccggctggtcttgaactcctgatctcagatgatccgcccgcctcggcctcccaaagtgctgggattacaggtgtgagccaccgcacccggcccccaagctcagtttgagccacaaatgggactatgttgctctagaaatcaacatcttttccacactgcattagtagcaacagagtctagaacaaaggaggccacagccccactgaactctcttctgcttgaggtcacatctgccacatcaggggtatttacctctttcaacacatatttattagggcacctgtctgggccaggcgttgtgctaaaacccccaaacgctgtcatatgatacaaagtgttctgtaacttgcttggtttttttttttgtttgtttgtttgttttgttttgtttttgttgttgtttttttttgcttcgccatatattataggaatttttttaggtcattatgacctctttatttacttaattatctatttatttattttactaatatttacagaaagggtctcactctgtcacccaggctggagtgcagtggttgcaatcatagctcattgtagccttgaactcctgagctcaagtgatcttcctacctcggcctcctgagtagctgggactacaggcacaagccaccatgcctggccgatatttttatgttttgtagagacggggtctcactatgttgcccaggctggtctcaaactcctgggctcaggtgatcctccctcctttgcctcccaaagtattgggattacacaagtgagccaccttgctcagcctgacctcatttttcaaagagctgcagagtgttacataatgtatttaactggtcactttttgatgactattaagttgttttcaggttttttgttattacagtgtcatatccctggggcacagagcagtgctggcacatagccagagctcaatcgatacatacctaatgaatgaaagtacagtggacatcctaattcagccattctttgctaacttgtgtacatacctgtccagggtaggtccctagaatacagtcaataagtcagaaggtgtgagttgggatctaccttttggaaagggatgttttcaaactacagtgagtcagaggaggatggcccagaagctgggggagttgaagctgatggcgtgaaggaattaggggtgttaggaagaagcaggagataaagagctagcttgcagaagaagtgttagacttgttatgggcaggtactggagggtagctaaggacttgtgggtggcagttaccaggaagcgtatctgaactaagtgtcagaaaaagtgtcacaactgtaaattactcttgtcagtgagttcctgtccttaagggttagggctgggtagccctctactattctctaagtctgtaatgtaaagccactgaaaactcttgggttaagtttggccatcccacccaaaagatggaggcaggtccactttgctgggaccaggagccccagtgaggccactctgggattgagtggtcctgcccctctggctgggactgcagagggaggaggactgttagttcatgtctagaacacatatcaggtactcactgacactgtctgttgactcttttggccttttcagattctggggcaacagagtgggtgacgagggggcccaggccctggctgaagccttgggtgatcaccagagcttgaggtggctcaggtaagcttcagagtctatcctgcagttttcttggggagatcaggtgaagagggaggagctggggccagttctgaaggtctttgaactttatttctaccccacaatgttaggcaatggagtaaggaaaaaagaccattggatttcaagagaggacacttgagtctttctgggtgacttggaaatgtcccttgtcctctcagggttttgatacagtatctgtaaattgaagatattgggctggatcaggtacattttatcttaagggccaattccaatccattggtagtgggtgcccagtgcaccacattaaaaagaattctaaggctgcacctgggcttaaagaagagcactataatcaattagtgatgtctaaaaaagctaaaaaaaaaaaaaaagagcactgcattcaattagtgatgtctaaaaagggtagaaaaaaaaaaaaaaagaaaaaagaaagagcaccgcaatcaattagtgatgtctgaaatggagcagaccaggagagcaccacgaattttgccctccataggttagctcatctctgaggtctttccctgctctgacatacttttgttccatgattacctccagcctggtggggaacaacattggcagtgtgggtgcccaagccttggcactgatgctggcaaagaacgtcatgctagaagaactctggtgagtttgggggattctctgctctggggaagtggatcacaatctctgttgatcccctggcctcatccataggagcggttgtgtggacagacaaaggtggatgattgagtgattgactgattgattgattgtgtttgtctttatatgtactgagtggtatgaagcttatagagcctggtatgtacatgctaatttttttatttaataaaatatatgggtttgctggtttggtgactgcctccacatggcataagtgttaagagcacagactctgtaatcaagcaggccgtgatcttaggcaagttaaataacaatttcagaatctcaagtttcatgtctgtaaaatgagggtaagaatacttccaaccataaaggatttttgcaagaattagataaagtagtgcctgtgaagaccttaatatagtgcctggcatatttgtaagtgctccataaatgttaaattagaataatggcagggttactactactattactgctgctgctgctgctgctgctgctacaactactatagtactgtgactactactactaataaagttttgttattttaaagtgattttgagttcctaggagcactgggtattcaagtcttaggtcattttggaaggtgtaatggagttttgatagttgaaagaggaaccatgaatcatgcttatactgttgacctgaagcagattctaagtttctcatcctttagatgccactagtatagttttctgacatgttctgggcagcttcagattatgtcagggagataaaatactgaatgtttgattttcccgggaagcagaaaggcactgcaacatatgggcattgccataaacagattttatggatggaccttggctgttgcagggcttactagctctactcaagtatgattgattctatcctgactggattttgccacttggaatttcttagtagaggagaaccttgttatgagagcatcagttatgattactgttaaaagaaaaactttaggcaaattaaatttagcagaactggtttgaacatacagcaatttatgaattgggcagcattcagaactgggagtgctccacccagcaaggtaggcaagcagtatctatagacaggaaaaggaagtgatgtacaaaacagcttgattggttgcagctgggcatttgccttatatgggcatggtgtgatgaggcattttctttatatggatatagactgatcagctggtagactgtgactgactgaagcctggctgctgtgattggctaagacttagctgtttgttataaggatatgttgttaggttgcagtttgctacataggaactcaaagtacagaggcagtctcaggccaaatttagtttaactatatgttaagctgcaggtgacagaatacctccatctatagaggtttaaacaaggaaagggtttattttttcctgtataggcagctggatgtaggcagtgtagggtttgtacagtggctacaagaggccaggaggggtctcagctctgtctcattctcttcctgttccatcatccttagcctgtaacttcattcacatggttggttgtctcatgatcacaggatggctgctccaggtgcagcactacttctgtattcccggattcgatctatatacccaggaaagccatctgggttctctcctttaaaaagcattcctggaagccccacctgtcgacttccccttatgtatcaaccatgtgtatgtcacttgaccaacccacttgtatgttgtttgaccagccctggctgcaatggagagtgggaaatacagttttttcaccaagtgcatggctgtccaaatgaaatgagacttccattaataaggaagaaaggaaagatggagatcaggaagctgggggatcagggaacttattacattgagagcccttggagtgaattctcttgcaaatatgtccctggaattgagaatccccacaacgtactttatctgttctttctttatccatgagtttgggttttcagatgttggatttcctatatggggggcatgtgagttcatcatcttccataatcaatgttgtatcaactggattttctctcttcttctcaccagcctggaggagaaccatctccaggatgaaggtgtatgttctctcgcagaaggactgaagaaaaattcaagtttgaaaatcctgaagtaaggaacccataagcaggaaacaggacaataattgctggcctttggaaggggcatttctgattaagatctgggccgctctccgctgggctaactcatgtgaggtggcctggtagaacagcttgccttggtctaggtggacaaggattccagtgcaagttgtttatctgggaggtggtcccagtaaatgctgataggagagtggtgaagtgagatggggaagtgaaggtaaccaataaaggggagttatcaagccagttatcaatgagggaaattggagctcagtactctggggcactcctggagccagtgcagaacacacatggtcacctacccaaccaatgggcaagaaagccatggcatttatccaccaaccctctgtccttcctatgttgatgtgcgctcatggggcactgattctccagcacttccagctcaccctcacccagctgaacatgcttctggggtcaggagaatggcctcaggcagagagtggcaggtcttctctgcaagcagtggctggggaggtgatgtgatggggagtactgtggcctcctccagtggctgactcagtggcttgggacttgtgccacaaagagatggacagctcaggtgaacatgaacccacctagtgaccatcatgggtttgtcagggtgctctctgaggctgatgccaaaattcttatttcaagtagacctcaggaaccccatcagatggctccttttgctggaggaaagtggcatctgcctaggcaaatgtggtcctaggaaaacgcttgcctttagagacagacagacagacagctgcctctgtgagtgccagctttgctgccaggctgctacccactctggcgacactcatttgtgttgctttcacaagctaggaagtttccaaatatttggagaaaacacttccactaattatttgggtggaaatgggctgggaagttggggtgaagcccggatgtgtctgagccagatgccagctttgcactgagggtcggcctttgggaataccaagcccattatcaaccaggtgtggatatggcaggtttgtcttccctccttgtcacagccttactccacttgactcccatggatgccaggcaatgaggctggggttggtcccatgccaccctgtcatcagccttatttttcagcatcctaaactatatcatcccccacaaaaattgaacttctgatatatcttttataaaaaagagaaatgcctacatctttcttttccaggattagtttctgccaagagttggttgagagcccaggcttgctgggtgcagtggctcacacctgtaatcccagcactttgggaggctgaggcgggtggatcacctgaggtggggagttccataccagcctgaccaacatggagaaaccccatctctactaaaaatacaaaattagccgggcgtggtggcatacacctgtaatcccatctactcaggaagctgaggcaggagaatcacttgaacctgggaggtggaggttgccatgagccaagatcacaccattgcaccctagactggacaagagagaaacttccatctcaaaaaaaaaaaaaaggatgagaaaaataataatttaaaaaaaagagtccaggctctggaaccagacagcctgggtcttacccctgctccaccattaccagccagttcttcttggatgagtgcctcagttgcctcaagtgtaaatggagataatggctggaccttcattataggccatgagcattcactgagagaatgtagctaacaaaagtgagttgtaggttggagcaaaagtaattgtggtttcagaccatgaactttaaattattataactaggctaaaatacatctttattaatcaaaataggaaccattaaaatcaacacatttttgccaataagaaataagtttgtttattcctgtagcataaaaattcatgcttcgggattcaacaaactcttggaaagcattttctgcatcctcctggttgtggaagcatttttcctgcagaaagttgtcaagattcttgaagaaatggtagtcagttggctagaggtcaggtaaatatggcggatgaggcaaaacttcatagtccaattcattcaacttttgaagctttggttgtgtgacatgcagtccggttgttgtcgcggagaattggaccctttctgttgacgaatgccggttgcaggtgttgcagttttcagtgcatctcattgacttgccgagcatacttctcatatgtaatggtttcgcagggattcagaaagctgtaggggatcagactagcagcagaccaccagtgaccatgaccttttttttttggtgcgaatttgcctttgggaagtgctttggagcttcttctcggtccaaccactgagctagtcattgccagttgtataaaatccacttttcatcgcacgtcacaatcagatcaagaaatggttcgctgttgttgtgtagaataagagaagatgacacttcaaaatgacgattttcttggttttcactcagctcatgaggcacacacttatcgaggtttttcacctttccaatttgcttcaaatgctgaatgaccatggaatggtcgatgttgagttctcaagtagttgtaagaaaatcagctttgatgattgctctcaattggtcattgtcagcttctgatggcctgccagtacactcctcatcttcaaggctcttatctccttcgcaaaacttcttgaaccaccactgcactatacgttagttagcagttcctgggccaaatgcattgctgatgttgtgagttgtctccgctgctttacaacccattttgaattcaaataagaaaattgcttgaatttgctttttgtctaacatcattttcatagtctaaaataaatataaaataaacagaaagtattaagtcattagcaaaaaatcataaagtgagaattgtgcattaaaatgatgtatagcataaccacatttatttaagaatgtattccaatatcaaatggcaaatttcaacaatgcaaaaactgcaattacttttgcaccaatctaatagaagttcaataaatactggcaattacaattggcattgccttagggtcaacttgtaagacattcctgaaattgtgggaaagggggaggacctggagtggacattattggaaggcaaagctgtaaccaaaagagcaacctgggaaacacatgactcctctgttgctgtccctggccctatcctgtctcccctccctgttgtcagctacctcatatgttctctaatctctgtctctgtgccctcaaagacccccctgaaaatagaaatattactgctcattggttattttctatcaattaagtactgtattagtccgttttcatgctgatgataaagatatacccaagactgggcactttatgaaagaaagagttttattgaacttacagttccacgtggctggggaggtctcacaatcatggctgaaggtgaaaggcacatctcacatggcagcagacaggagaagagggcttgttcagggaaactcccctttttaaaaccatcagatatcatgaaacttatttactgtaatgagaacaggatgggattcaattaccttccactgggtcgctcccacaacacgtgggaattcaagagatttgggtggggacacagccaaaccatatcaagtactgtgcaagtgttttaggcatgcagagagtggtgggtcttcccagcaagcagagtgtggggaggtaatgggggactggtggctgacttaatggcccaggacccatgccacaaggagatggatggtggatgtgaataggagcctgcttacacccatcacaatttagattcttatgctcgatggcacgggtactcttttaggcccattttaccaatgaggagattgggactaatttgctcgagatcaaaaaagaagtggtgtaggtgggatttaaacccaggatgtctagcactaaaatgcaggtacttaaccactatcctaagggagtggctacttaatttgataaactcatctagtgaatggaagagagacggttacatttcactgatggtactgagcctttgttgatgagctcattgggaatctcagacatgagcaggatgtgtctaagggacaggtgggcttcagtagactggctaactcctgcagtctctttaactggacagtttcaagaggaaaaccaagaatccttgaagctcaccattgtatcttcttttccaggttgtccaataactgcatcacctacctaggggcagaagccctcctgcaggcccttgaaaggaatgacaccatcctggaagtctggtaaggcccctgggcaggcctgttttagctctccgaacctcagtttttctatctgtaaaatggggtgacgggagagaggaatggcagaattttgaggatcccttctgattctgacattcagtgagaatgattctgcatgtgaaggatctgattctctgtctaagaaagaagtctttacctctttaagtagggagcaatgatttcatttttaaaccttgactatttattcagcaacttctctgctctatgagatagtgtaggaatggggatgtggttgaagaatgaaaagaaaagtcagctcccgccctcctagaaattgcatctgccttcacaggtcaaggatattggatcagaccttctgcggttctgaatggagattacacaggttaggagcaggttgcacagtgtttccaattctctataattaaagccatagactttcatgtattgaaaaaagcaagaattgcattcttgacagattctttcattgccttaaaaagaatgactagccttgggagtctgggcagctgggtccagtgttgtagactttctctctgctgagccacagcttcaaagatttgtccttcttgtttccagggatctatttctcagacaataagtaaaggctttccctggcctaatgtgctgtaagtgaatgctactatatatgttccaggcactgggctagagactaatatttaaaagccaggaaatttcctatagaaaatctatatctcagggttttctcaaaagagctgggaactctggatgcccattcatgattccagtagttaaccagagtacaagaagggctgagtcttctcagatgggcaaacccactctggctgactgcagatccaccaagcctattgtcttagaccaggaccctttggcaactcattcccataagcctgtgacccttgctttaaatatgcaggccttgtcttctctcaaaaagcacatcaaggctgcagcgaatgcagatatcaaatgatgaagttaaaaacaaaagctttgctgggcgtggcagctcacacctgtaatcctagcactttgggaggctgaggcaggaggatcactttaggccagaggttcaacaccagaccttgtctctcaaaaaataaaaaattcagctgggtgcggtgtagttcctagccacttgggaggctgggatggaaggatcccttgaacccaggagttcaaggctgcagtgggccatgattgcatcactgcacaggcgacagaattagatcccatctcttaaaaaaataaaaaatttaaaagtgacttcaaaaatctatgctgtgatggagagatttttccttctgtatgattgtgatagctctgtggcctatgacgtcatcaggttctgggcaaagtgtaggttttctgtttctttgtttttgaaaccattgcacagtcctaagaaacatcacattctgggtcctgggcaccagccaacatgaggttgatattttaaggggtctgatgttatttgctgcctgttgatggaacttgggagggcaccagggtttgctcattgcattcttgacagattctcttattgccttaaaaagaatcactggccttggggagtctgtggctggctgggtgcagtgttgtggactctctctgcagagtcatggagccttgttcagaatgcttcctgagctgccctggttggccaagggtaaaaacagccctgacttccctgcaagaaacactgcagctgggccagagagtcagcccatcccaggcatgggtttaaaaagtggaggcttttgtttgaaagccctgctctaattttgtcctcactcaaacctctgttcacttgatctgctttaggctccgagggaacactttctctctagaggaggttgacaagctcggctgcagggacaccagactcttgctttgaagtctccgggaggatgttcgtctcagtttgtttgtgagcaggctgtgagtttgggccccagaggctgggtgacatgtgttggcagcctcttcaaaatgagccctgtcctgcctaaggctgaacttgttttctgggaacaccataggtcacctttattctggcagaggagggagcatcagtgccctccaggatagacttttcccaagcctacttttgccattgacttcttcccaagattcaatcccaggatgtacaaggacagcccctcctccatagtatgggactggcctctgctgatcctcccaggcttccgtgtgggtcagtggggcccatggatgtgcttgttaactgagtgccttttggtggagaggcccggcctctcacaaaagaccccttaccactgctctgatgaagaggagtacacagaacacataattcaggaagcagctttccccatgtctcgactcatccatccaggccattccccgtctctggttcctcccctcctcctggactcctgcacacgctccttcctctgaggctgaaattcagaatattagtgacctcagctttgatatttcacttacagcacccccaaccctggcacccagggtgggaagggctacaccttagcctgccctcctttccggtgtttaagacatttttggaaggggacacgtgacagccgtttgttccccaagacattctaggtttgcaagaaaaatatgaccacactccagctgggatcacatgtggacttttatttccagtgaaatcagttactcttcagttaagcctttggaaacagctcgactttaaaaagctccaaatgcagctttaaaaaattaatctgggccagaatttcaaacggcctcactaggcttctggttgatgcctgtgaactgaactctgacaacagacttctgaaatagacccacaagaggcagttccatttcatttgtgccagaatgctttaggatgtacagttatggattgaaagtttacaggaaaaaaaattaggccgttccttcaaagcaaatgtcttcctggattattcaaaatgatgtatgttgaagcctttgtaaattgtcagatgctgtgcaaatgttattattttaaacattatgatgtgtgaaaactggttaatatttataggtcactttgttttactgtcttaagtttatactcttatagacaacatggccgtgaactttatgctgtaaataatcagaggggaataaactgttgagtcaaaacagccatcttccttgtgaccaaacatttaaaaatattctggctgggcacagtggctcacgcctgtaatcccagcactttgggaggccgaggtgggcagatcacctgaggttgggggtttgagaccaacctgaccaacatggagaaaccctgtctctactaaaaatagtggaggttgcagtgagccaagatcacaccgttgtcctccagcctgggcaacaagagtggaactccatctcaaataaataaagaaaataaaaaataaaaatattactaaaacttgtcaaattttaaagcacaattttctacttgaagcggaggaaaatgatgttttcaacccgataatgtatagcttaaggcaaaagcaattcttagaaaatagccaggcaatcaaaacacttttggcttcagtttagaaaagtttaaccccgtgaagttttcagctgtgcaggagcctccccgtacccagcctaaaaggctgcaacacatgtgaaaaggccccttggcccccctcgattccctcaaagtggctccaggagtctttaacagaaggatggagaaggtttacttatggctggctctccacagcgagcagcctctcatgcaggccttgtgttaaaatagtgcttagctgcgtttaataagcaagggatcaggtggtcacccagcaaggtaaaatcctacttccttgaaaggttttgcgtctggctgactcggtggtgtggcatctccctggaccctgcatgggagtgtgtctatgggttttctttgtgattggtgccctgttctgcccagaccattgtttctgatacagcagatcaggaggaaggtggtgttgagtctcctttcgctgaggagtacacacagcagcccatttgcatagcactgtattgggttgtcagtttgtcatctttaaattcattcagcaatgaggccaggcatggtggctcatgcctgtaatctcagcactttgggaggctgaggcagctggatcacttgaggtcagaagttcaagaccagcctggccaacatggcaaaaccctgtctctaaaaatagaagaagaaaaaaaaaagttagctgggtgtggcagcgcacgcctgtaatcccagctacttgggaagcagaggcaggagaatcgcttgaatcttggaggaggaggttgcagtgagctgagatcatgccactgcactccagcctgggcgacacagcgagactgtcataaataaataaataaataaattcagcaatgatttattaaccagttatattaggatgaccagtggattgacaaaacagacatggtcctcaaggtgcttaggtgagggtggagggagaggcaggcagaaaacaagtcagttgaaaaagacatgaaaaagtcttcatccaggcactgtggctcatgcctgtaatctcagcactttgggaggccaaggtgggcagatcacttgcggtcgggagttcgagaccagcctggccaacatggtgaaaccctgtctctactaaaaatacaaaaattagccgggcatggtagcaggtgcctgtaatcccagctacttgggaggttgaagcaggagaactgcttgaacccgggaggcagaggttgcagtgagctgagatcacactactgcactctagcctgggcaacagagcaagactccgtatcaaaaaaaaaaaaaaaaaagtcttcaggctgttaaggggctggtccgagacaggttgtctgaggaggtgccaggtaagctgtgtccccaagaatgagaaagatatggccaagcaaagagtgagagggaagaagggagcattctagtaatgggggacaagaggtacaaagaccctggtgagggaaggagcgtggtatgcatggtaggctcaatagtcactcccgaacatatgtagatcctaatccccgggacctgggaatgttgccttacctggcaaaagggactttggaggtgggattcagttaagggtcttgagatgggaagatcatcttggattacctgggtgggtcttaaatgcaatcgcagtttccttataagagaaatttaaaggacaatgtaaagcaaagggaaatatgacactggagaagaaagaaatgtgatcaccaagtaagatgctacactgctggctctgaaggtggaggaaggcgccatgagccaaggattgcagctctagaagccaaagaagaccaagaaatagattctcccctagaacctctgcaagcagcatagccctgcctgccttggctccagcccattttggacttctggcttccacgactataaggggataatttgtgtcatttcctgcagcagccataggaaactaatacactatgttggaggcaagctaagggaaaggtgtcactagatgggtttgcagaggtaggtaggaccagttcaggaaaggtctcactggccacagtcaagagtttggtcttgatcttggaataatgtcaaggccttggaaagttctaagcaggggagatgtgaaccaatttacagttaaagaagatcttgtttgcttctgggtggagataggacaggaatatgtaggggtggggatgggaggcagaagaagtggggaggctgcctcagagctattgcaggtgagaggcggttggcagtggaggtggagagaagaggatggattccagagacattttggaggtagattcccaagagcctacgaatgggttggatgggagggatgagggaatggcaaacatcaaggatgactcatagatttctgacttgagaaactgggggcctgggaaagttgggtaggaaaccagtttggaagtgggagggagttctgttttgaattgtcaagtttgagacaccgaaatggggaagttaagtggagacgtcaaaagatggtgtgaatttggagctcgtgggaaaggtcacagccagagataatagcgtgggtgtcctcagtgtcaaactgagaatggggccctcgagtctggatgacatgagctagaaagagattatggagaaagaagaggtcaagagggtctaggtaagatggtactgagatcttgatatgtgattcctggtagagttcagagtaggagaaattccctaattttcaaaagtccagcggataccaccaaaagcctcctgggcctgtgtagggaactagggaagtaggattcttgattgtaagcttctctgatagggaagttacctgaaaggtacatgctcatggccagaagtttatccatgagcagacggattccagttttgcagctaagaatacataattcttatgcacagaaaaacaacgtattagagcagaattttaaaaacagcctcagactttcataatattcatcatcatcctggaagaaaaaggatgccagtctgagggcccttccctccccatagcaccaaacaaaaagctgaaatgaatacaccccacagaaatgtgagagttggagtcatattccaagtggctgagctgagactagcgcttcattccattgttgtaccaggacagcttcaagcctccttattcactccggtgagtggtccagcccagtgtgtgaagtgcccagtactcagggcaatgcctggaagtgcccgggcacgagaggatgtgctgcctcgggccctaggtggagggttccaggtgagctgtaaggtcataaaggacatttcccctggagaatcgcaggcggagatcgcagcagggaagactggcaatccaggctctttgattggcttcccttggatcgtttttttccctgtaaatttaatcccaacctattattatttcctgaacaatccacagatccagtcccctaagcatcaccactcccctgatcactcaccctgaaaatgcttcttttcaggagtgctacatctctttctgctttgtaacaacttctcgatatcttcagttccacatccccctgcacccctccctctcacctgctctgcctccacccccaggaaacaagggggtccctttgggatccatccttgcctgggttactgcatcagtctccctgttactgactttgacctgaggcatgaacctattaaaacataagtcagatcagctactgctctgatgtaaaccctccaggacttcttgttggtgcagggtaaaaggtaaggtctcatctgacttggaccccctgtatcctctctggcctcccctttgccactcacacctgttctctgggctccaacctcactggcttctttgctgttccctgagcataccaggcacattgctgaggacaccaggcacattgctgcttccagacctctgcactcgcctttcccctcctatgggaacactgttccctgagacagtggtgtggttggcttcttcatttccttccagtcttagttcaaatgccacctacatgaggtagtccttccctgaacaatctacctaaatagcagtttccagccactgcctgccttcctttgtattgtcttctctgcatgaactacctgatgcatggtcatttttcccctcccctagaatgtcagcttcttgagaacaggaaccacgctcactgcagtgtcctcagagtctacaaaggtgcctagcacatagtaggtgctcaatacatatttgttgaatgaaggaaggatccactttctttattaaagggggcagaaaatagaagttggggcagcttataagaatgagtcaccctttttctgacatcatttgtgtctccttggtaaaggaggaagattccctgggacatggaacaatccctaatgcatcaactgcccaaaatgggatccagatgtagcagaaagttccctttaataaagagctttctgtgtgtgttttaaaaatcaaacatagaaattatttgtcattgataccagcaaatagctcaaatgggagagcatggatttatagttcggctggattagtttaaagatgattaaagtaatcccctttatcttatcaaaaagagcttttaggtggtcagagtaaaagtcctcagacagaatgttcagttgcacttggaatttcccttccctaagagataagcacatctcagagatggaagacctcagcccgttatccatggatcaaaacactgtgctgggctactgtggagaaagcgcctgtgacgtatccttgcttgtgcggatacctggtccagttagccacttggcctggtgttcattctgaatgcccatattcacaggattagtgggaaaatggctggaaccatgggaggttggatggacatctgggagttgccatttactaagatggggagtgcagagggattgcagggggtggtggtggtgaatatcaggagttcgcttttggctgtgttgagtggagatgctgagaaggcagtaggatataaaagagacaccaaatttggagagactgcaagtaggaggtaccccgtggtaggcactgggaagcatggagcagggtctagtcaataatcatgaccggtgccactgagcaggttcccttgagtcctgacggtgtgttactctatgtcccatgcccctagcaggctacctggagttcaccgtcctccgtggggaaagctccattcaattcaatagctttatgttagggtcccgctgtgtgcaatgagagaactacataagacagcttagaatcagtgttaggtcaggcacagtggctcatgcctgtaatcccagcactttgggaggcaaaagcaggaggatcacttgaagccaggagttcaagaccagcctgggcaacatggtgagaccctcatctctactcaaaagagaaaagttagctgggcatggtggtgcgtacctgtagtctcagctgctcaggagactgaggtgggaggatcacttgagcccaggagacgggggctgcagtgagctatgattgtgccactgtactccagcctaggcaacagagtgagaccccatctcaaacaaaaaacaaaaaacaaaaaaagaaccagtgttatgttccctgcaaaacccttcacaacttcccattgctcttgggatggagaacaacccctgtccttggctcccaaggctcttttgtgccttcattgtctgcgctctgcctcttccagtttcttcaacaggtcatgcactttcctgtttcctatttctggagtgttccccctcactcctgcctgccagttatctttcccatctcatctcaaaggtgacttcctcaaacaggccttccctgagtggccaacctccctttaggcatgctcagagagattcttcttctgaggcttaccacagccataattaagtaagtgatcatctaatgagtattttagtttgcctttttttttttttttttttttgccagagggagtgtggcatctctcttgtacactgctatgtttcctggaacctgctcagtaacacaaccgctagttccatgaacccaggaccaggctggatggaagaggctgtggggtggtggattgagagaggtcattagtgagggctggagccctctgtgaagacatgtctgtaaaggactttgactaggtcctccatgaagggaggatttggaaggcagagatgatgagcatttcagttggggaatccattttaacagaggtggaaagagtcttggcttggaatcagggtctcggcccatctcctgagtgacaggggcttgtaatttactgtctttgggccttcatctactacctgtaaaatgagaggctggttcaccaaggactgcaaataatagcaccatgacactatctccccatcttatcccctggcagatatctctcttcccggtgagcctgaatataagttcagaattagctttaacgcaatgttctaagcagccattcccaattgataggaaatgataattgagataagccccatttgtcaggcttgacttggatgaagatcccttagatgaagtcaggccccggcactgattcagtgaacgtatgacaggacagagcctggggacgaaagccctatggaagtagagacctcagcagcaccaaacaccatcaacagaaaggacacaaaaataggccgggcacattggctcatgcctgtaatcccagcactttgggaggctgacgcaggcagatcacttgaggtcaggagtttgagaccagcctggtcaatatggtgaaaccttgtctctactaaaaatacaaaaattagctgggtgtggtggcaggcacctgtaatcccagctacttgggaggctgaggcaggagaattgcttgaacctgggaggcggaggttgcagtgagctgagatcgcaccattgcactccagcctaggcaacagagcaagactctgtctcaaaacaaagaaacaaacaaacaaacaccccagcaacaacaacaacaaaaacaaaaagaagggacatgaaaatattctagtccagagtggcaaactcagatgccttaagggaccagtggatgtagatcgtgcagataagagaagtggtcccagtggtaacatgagaatgtttgccttgcctaaaaggaccccaaatctctctccttcacattcttttctccttcctccttatcgtatgggttaggcaaaaacaaatttcagctgaaattttcttccagacagttggactgtgacctctgagtcctaccagctttgttggagaatccagatgtagatgagaacggtgttgcctaaggccacacttcaagccaggcccgttgatttccaacttatggcttcctacagcagtgtggtcatgaagcctggaaaacaggaagataggagtgacaaaagagggacaggagtagaatgaggcttaggttttcaaaagatgctcatttcattttggatgactatggcaaggaagagtggtggcctgtctactgctactgttagtcatcactcatgtgactgtttttatgtattcattggtttaaattccctggatctccagaaacatgtcactttccactgggggaaatttgtgtcatgattaaaaacacacacacacacacacacacacacacacacacacacccctcctcctttctcagtgttaatcaccttctcctataattagcacttaaaatgtcaaaggagaagaaattaattaacaggagtatccagtgcagcaaggctctaggactgattataaaaagcacttccttaaatattttgagtgcttttgggaatcagaagcctcccttctaattgaaagatccttaactacaccctaagtcctggctggtggccaggggtgcggggctgagtgaggcggcgtgtggaaatcccttcttcaccatccttgggaaaattccctccaaactgggataggtggcaacagaggttcggaaacagcaagcgtcccaggctgaatctgcggaggaggaagagatgaacctttcctgagctggtactgcgtgccaggaactttagctcggtattttgccacaatcctgtaagacaaccgatactatgatctccattttacagatgaggacattgaggctcagcgtggttgtgacttcctcaggtcacgcagccactgaatgaaagcgccaaagattcaaactgaggtctgattctaaagctttgctctctcacggcatcctggaatcctatttcaaccttcatctggactcttaacccagcccaaacctaagcgtctacagttttgacagctgaggcgggagcacgggaggcggagctggtggcagcgcagcgccccgccccggctccagcatcagccaatggtgacgcggcacccacagcctttcgcccaatcagcttgagcttcccgcctccatccgccgctcttctctgccccgccccttcgctttccctttggttccaccgagcttgacagagcggaaagtcccttcggccggcgccgggctggcagccattggaggaaggtctgtcacagggaggcccaatcacggcccgctcaggagcgcagctcggcctacgattggctagcgcggcggctgccccctccgcccccgctccctccctcttccctgtgcggttcggaggcggggcaggtgggggcgggcccaggtagcaggtttggctgcgcgggggccgcgcgtcggaggtaaatactagggcggtgggtgtggggagccggggccggcccgggacgcgggctggggagccggggcgaggggcgacnccccngccgccgaggttagtgaatgagcgggcggctggcggccggcgggcggccggatcccctcggcgcanccgcctggcctcagggcgtccggagccgccgcggcgaccatcgggccctcggcgccggcccgttagttgcccgggcccgagccggccgggcccgcgggttgccgagcccgctgacgtcagcccgggtttccccccccaccggggcttccccatcccccgaggcttcccgggagggctgcgagtccgggagcgtgcggggtcgccaccatcgggaccccagagagagaggacttgggcgggagccgcgcgacgctgtycccctcccgccccccaccccatttacagattgggagactgaggcacaggccgctggcgggccccgacggccacggttggcctcaggagcccggggctgtgattcctaccgaccgcgccgcggggcgtacgtaccgatcgattttgcgggtgttggtggctcccgtccaggaatggcagtcggggttctggccttgttaatggcgtgttctgctttttctttcagtttccccctttctagggtgaggatggttctacacagccacccggagttccttagttgaaaggtgcgccctgctgtgacaggtattctttctttatgtttttctttcatgttaacaatcgaggggggtggggggcgaatggggggcgggggcgaagtcatgaaatcttcaggagatggtgttgagtttggtactcagctgggtcagctgccggttattcatgtacttggcatcgtttctcttccaccccttggcatttgaatgttttaggatagttgtcatcttccagccaccaagcctgtggccttgcagtctcccagcccccatcatccctgccaccttcttctcctcaatttttcctggaaagttttatccttagctcagctaaggagcatgcctaccttgcttttgaattcgggctaattagggatcttaataagattgttcattttgcaatcattggctctcagagaagcacccaggccttgagagggtgttcgtttgattgttggctttctacacaccccctcacgccccaagtagactgaatggccttaagaatttagcctcccattccccactgagcagtaggtggatttgaactagaacagtattaggagaaaatgatttgctggaaattcttattgaagtaacacccagaacattctctaatattctgctgcaaaattgtatagtattcttgcaaataaaccttcctctgggtggtaacttttgtgagaagcagataaggcttgttatataaagcacaactaacattaagcagcaatgatttttatagtctggcacacctaaactgtggttttgtttgatttaaggaagtctccaacacagggagagagaaaggaatagttatgttgtttatcaaactattagtattttgttcctgattttcacactatgatttaaattagtttttttttcattggttgtacagaatttataagcatcatacatgctagttgaggctgtaggaagctagtatcaaataaacctcaaaacaacttggtttcgtaattgtgaaattttccgtatttgtttcttcttatatgtataacaatgaagtggtttagcatgatttcattttatctagagaattactgaagttttaggcaaaattcattaaatactcccaattcctgagtctttttctcttctctttctcttggtttaatcccttaaacaggaggaggaaatgcaattttgttttcactgttaccacttgagtctttcattcatttctctgtattcagtgcctagcatatgccaggctctcgtgtgggcactggataatataaaaatgaaggacttggggaattcacagtttggcagtggagtggctaggtttaacactagagaggcagcagtattccttgttccagtgggaatatgcagatgtgagaggctcttcttttcttttttttttttaaccttataaatcccacttgtattagggactgtgtacttgtgacacaaattagtcattgaggaaaattaaaacggactcagtcttttttctggccacggaatctctgtatctctattctttagctgtttagaaatataacaactttgtcttttagtgagagatgttctcttttaaaaggatgatcattctagctatccagaagcttttggaaaaaggcccacatgtcttctttctttggtgttcaagctgaccttcctacctctttgccatttataattaggggcagaattaagtattgtaagttttattctaatttaaatagcttcctgtggtttttagaacaagcaggatatctttggagatgcaaaaagctcttgaattggatctgtctttgtgagatccttatgaacaatataacctgataacttgagaatcagaaaaacactgcatcttctggataagttaaccattgttagttttctgtagctactgatgttcatttgtactatatgttgcctttcagaatgtggtaattgtaatctttaacattttcatgtaaaacatatttcctgatcatctttccattgtcttcatggaaaattgataaatatttgtgccttccaactctcgtcttggttgaatgacttcatcttaatacaagtaagttcccctttactcagaatccagaccatcaacaagctcagataaccagaaatgttttcaaatctatgtgaacctgaactgttctccttcatcagcgtccttaaaggaaaggccttctgttcaacatggctttagggttaaacatattattgtgtttcaactcgttggtaattttcattcagtatttattaccaagatattcataatcacacagttatccagcctgaagtaagatagtatttagatgagtcatttgtgatatactcactcaaagtgattcaacctgcaaaataataagagaatacaagtgaaaatttctcccttcacactgacccctcacccccacctgccctacggtgactttgaatttagctgtgcttctttttccttcagttgtcttactgttccctaggcctttacttaaaggcagaagctgagtgaatgtggattgatgttgggtttttttttgtgtgtgttctctctttcctctttgtttttttttttttttttttttttgagaccaggtcttgctctgtcacccaggctggagtacagtggtgtgatcatagctctcttcagcctggacctcctgggctctagcgatcttcccatcctccagagtagctgggaccctgagtagctgggcccacaggcagacaccaccacacccggctaattttcttttctttttttttcttccttttgggacaggctctcattctgtcacccaggcaggagtgcggtagtgctatcacagctcactaaagccttgaactccagggcttaggggatcctcccacttcagcctccaaagtgctgggattacaggagtgagccactgtgcctagcctagatgatgtagttttcagtatctaactctgtactgaaagcgtaaaaaataccaaactaacaaaccaaccttcttgatgataaataactcatttacaatgtgatttagatctttcccttcatattgtgttgagtcagtttttactgcttggggtacctaagactttaactatttaactactatgcacatcccagtgaaagtagactgttggtgttatattcacttctacagtggggagaaatgtatgttagcatatttttattgcaatactggtattttgagtacataaaataaatatatatatataatggagtgtgtatatatgtgagagagtgtgtgacagggtcttgctttttcacccaggctgaagtgcggtggcgtgatcatggcttgctgcagtccctccctccagggctcaagccatcctcccacctcagcctcacaagtagctgggactacaggcacatgccatcacacctggctaacttttgtactttttgtagaaatgaggtttcactgtgttgcacaggctggtctcaaactcctgggctcaagctgtccactcaccttggcttcccaaagtgttgggattacaggcgtgagtcactgtgcctggccgagaatattagtgatcattcagttgattgccttgtatatctctagactcgagccgtaaagtttcccattcaactttctctatcagttgcagtgaagagaatcaatttttaataagagagtttcaaacttgttcttaatatattctttctgaaagaggaaaggctgtatcctttatttttggataatgcttttgaaatatttgataacttgtgcttgactattttagttgtctaacatgacccatcctattgctaagtctaagctcatttccacttgtgctaatgaaagttaggaaaaaagttaccactccttgtagagttcactttaaaatatggtacttgaaagctatagtttattaccctaaaacatttttataaacctagcagttatatcaatttttactgtggattctcttccttaaattatttcagaaagcaagcttataatcaaatttatttaacataatgtcctaatgcacatatagtaatttagttttgtcttaataatagattattagcattaatgatttttattttaaattgtgacatgaatagttaagctacaggaccaatagagtaggagctgttggtataaagcaattattaagattcagggaagtttctgattgtaatatttgaagacattgttcttaggaattttaaaaaagaatttcttttcaaaatagaattactttacctttttcaaaaaaattttggccctaaaaatctaaatacattttaaagagaaccaaaacaacagctcgtttttttgaaagttgctttttgactgtcttaaccttctgctagtgaccagactctctattcaataaagcctatgtgccctttgctcctaaagaccctttcagaatgtatgcattcctcttttcacgattgttgctttgtgttttcaaacacacaaacatatttcactacctggcttctcagaactgattcgaagcgataagttggaaagcaacaaggccgtaaaaggagtcaaatgcatacagcaggaaaccacagaaaatggctgattgcaagggaaaactctagacagtagatctgtagaaagcattcgcgacctcaggaagcataagatacagccttttaacaaaataacagccttgcagatcaagagttatgcaaaataatttacagtcataatgatacatcaatgatcaagaaaaaaataaggacattttcttgtggaaagtgttgacatgttaaaagcattttggtcaaaaagaaccaacacttcagtttggtcctttaaaggaatccaaccaaattgaggggttggatagctgtttgggcagcccttataaggagttttgtttatattgtgtcaagatagaggtttccacaggtgtcttatataagtggcaaatataaattgatcccattcttgctgaagtagacagtgccctcaagtggaattaaaacaaacacaccacaaaaaagaagaaaagagaaccacttcatgctacctctgcttttaccctcactgagtgttacacagatatttcagtcatgttggtttgaaggaggtgcctaacctgtatcctgtcttggctaaaccacatgtctcatgctggcttgtagagggagagacttttaggaacgttaccattatggaatacttcattatctagcagtgctttctaaaagaagtgttccactgtgtatagatttgccaggttgtttgatcattaagtgattaaatctaaaatttggttctttaggagtatttattttttaattgctagaataaaataaatatgatagtgctatcaattgcagccattacccagaataatggaaatggatacctctatctcaaggaaggatgaaatgaaagtactgtctttggaaaccagatagccacattcttatgacagggatacctaggaagtattgttttcagcagaaaattaattaaaataatgaagtaaagtctcagtttaaattaatgaaattgtgtagttttttaaccatcagttaaaataggtttgagaatgagcctacttcattggaaagattattattcttgtaaaaattttaaatgaggaccaggtgcagttgctcatgcctgtaatcctagaaccttggaaggccaaggtgggaggatcatttgagtccaggagtttgaaactgcagtgagctatgatcgcaccaatgtacccaagcctgggtgacagagcgagaccctgtcttaaaaataaataaataaaataaaaataaatgaaaatttgaaaaagaaataatagaaagaaattataatgcagttatatcatgatattcccttgctatgtagtacaagttttgatgctacaaaattgatttttaaaatatttttaatatagtcatattataatatctgatatttgcgatttgagaaatcagataactatgattaatgtgatgaacattgcccatcttcagaaaaaatatatgaaatgaagttgagtcagaggtaaaatgttccattatcacaatatggccatatcatagctatcatttataggcatgagccacacagctcagcccgaaacgctacttttaaaagtttattagtgtcagaatatgggacaggcctggtggcttacgactgtaatcccagtgcgttgggaggccaagacaggaggattgtttgagcccaggagttcaagaccagcttaggcaacatagtgagaccctgtctctacaaaaaatagaaagcttagctgtgtgtggtgatatgcgtctataataccagttactcgggaggctgaggtaggaggatcacttgagcctggaaggtcttggccacagtgaactgtgattgtgccactgcagtccagcatgggcaacaagagtgagaccctgtctcaaaacaaataaataaaaataaattaaaaaaagttagaatatgtatataagggtaatctttaaaagtttttactagaatctgattttataaatttcagtgtcttggaagcaaacattgtgttgtctttgaaagtactttacaattggatttcattaattaaatatgcacagttacagtagataaaagtaatacagtatgtatgtcttttagcccttttagatattttttgaaaatatttcatttgtgtgtatgtgtttactggtcaaatgaaaattttaaaagtcttcagtcttaattttcagtcatgtagaatgaagtctaaagtttatttttgctttttcactaggcattttgatttcctttctttttacagcatggacaccacgttgctgaaaacatgctttgggactgccactgaatttatcttttgcggttttatgacaaagttattagtagtttcccttttttgaattagtattttgaagttaatatcacaatgagttcaggcttatggagccaagaaaaagtcacttcaccctactgggaagagcggattttttacttgcttcttcaagaatgcagcgttacagacaaacaaacacaaaagctccttaaagtaccgaagggaagtataggacagtatattcaagatcgttctgtggggcattcaaggattccttctgcaaaaggcaagaaaaatcagattggattaaaaattctagagcaacctcatgcagttctctttgttgatgaaaaggatgttgtagagataaatgaaaagttcacagagttacttttggcaattaccaattgtgaggagaggttcagcctgtttaaaaacagaaacagactaagtaaaggcctccaaatagacgtgggctgtcctgtgaaagtacagctgagatctggggaagaaaaatttcctggagttgtacgcttcagaggacccctgttagcagagaggacagtctccggaatattctttggagttgaattgctggtaagtttgataaaccattttagtagtgtgtttgtttgtgttcatgtgtgtctgtgtatttgtatgcacatacatatttttctccttaaatacgaaataaattttcccaagagtcttctgtaatttttaatattcatcatccttgctgatgaatccatgttgtggttgaatccataatccaaaacttgcttatagttgtcactgataatatgtgtgaaaatcaccttggcgtttatttctgttggaaagagacccaagaactctgtgatatgtttccaagcttaatattcattcttgagaacttaaatgtcaattatattttgacattcttgcaaatagaattgtatgccttctttgcttcttgatttaatttcttttgtttactttttaatgatgaattgcgaagatgtaaagatgatgtcgaaacttaaaaaactatgtactatggtaggaacatacaaagagattcacctggctattgcagacatatatattttagaaattttaacattgcctgtattaaacatgaacgctaccagttgtaaatagttacataaaaaattgttaattaccttgcgttatcatctataggtttcttagttcttcttaatgtatgttattaaataacaatttagatataagatttttgaaaaaaaagttgcagaaatttaaacttgcttataattgtccccgataatatatgtgaaaatccttagaatttatttctaccggaaggagacccaagaatgctgtgatatgtttccaaacttaatattcattcacaagaactgaaatgccaattacattttgacactcttgccaatagaattgcatgtcttctttgcttcttgatttaattttttttaaaagcagtgattgtaaacaattaggaatttgaatcccagttaagccatttactagctgggttgccaggttacttaacaaagctacttaacttctctcattatgcatccttacctgtacaatggtgttaatagtacatgacttgtagtgtttttgtggtacattgatgcaggatttaagcacagtgactgacaataagtgcttaatgaatggagctaacattactgctattttaaagtaacattttctttttataaccaaattaatgttagaatcacaacgtggaattcagcctagctttctcatgatagagttatgaattgaaattatcagataatattatttcagcatcagatacaacttcttattttttaaaacactctaaatccaacagaaactgctaataattgtatttcttattatatgtatcatttagaaattttccagagtgattttcctgaaatccctagagtgaaccccttttcctatggatcgtctttctatatctatttctttcccttctctcttaaaaactaggaagaaggtcgtggtcaaaggtttcactgacggggtgtaccaagggaaacagctttttcagtgtgatgaagattgtggcgtgtttgttgcattggacaagctagaactcatagaagatgatgacactgcattggaaagtgattacgcaggtcctggggacacaatgcaggtcgaacttcctcctttggaaataaactccagagtttctttgaaggttggagaaacaatagaatctggaacagttatattctgtgatgttttgccaggaaaagaaagcttaggatattttgttggtgtggacatggtaagaaaattttggattaaatatctttgtgatatatatattagtttatatatatatgtatatatatatataaacatatatatacacacatatatatacacacatatatatgtatagtttatatatatatgtattagttttaggaccaatttacttgcaaattgaacactttgaatatttaacatgatctaatttggagtactttaaagaacatgttctaatttatctttggtaaaggagcattgaaatagaacaggggtctagatacagattacatttacttttttttcccatttgaataaactagaataatgttctctatctttaaatttgccttattgtagctgaccagtagacaaaacaaaacaagacaaaacacaattatattacttgaagtcctatttttctttattttgaaacagttttttggggtactccatttttttgtgatattctacacaatttaatggctgatctgattttaataattagtataataatcatttatagaaaatacctgagtagaggaaaaccacattgattttgaggaatagacaatcagaatatctcataggatttcattcattttaaaaaccttttttaattgtggtaaaatatacataacaaaatttatcacttaagcatttttaagtgtgcatacagtggcattaagtgtattcacattgttgtactgtcacctgttcatctccagaactttttcatcatcccaaaccgaaactctgtgcctgttttaacagtaactgcccactttccccaacctctgctaaccacaatttcttctgatttctctgtctgaatttgccggttctaggctcctcataagagtggaatcatacaacatttgaccttttgtttgtgtcacttatttttaatgtttccttacaatcatactttttaataatggatccattccagtgtggttcattggattatacctgtggcactgaaagaataagaagagaaaggctgagaccatttttatcatatattgaacatatgggcaagactttgttatgtataaagaaggaaattcatatggaattactgaacactagaatgagttaggaggcgatgtgagtagtaatctcttatactcacaatggggatgcttttagtcatcatttttatctgctcaggtatactttttggttggtaaggtaatgttctagtgtaatggtttcctgtgcttgaaaattccaggaaattctatctgatactcattggttagttactaaacaaacgtttactcttaacatgtgaaaagttagaaccagagtaaaacatgtatgcccctcaggatagctgacagtaaagcactccttttaaccaatattctttaaatagtaattcagtctttatttcaaggagaattgtggccttcatggagggaagattggagaaagagggccactggtcattggggttggtctccccttgcatcaggctctttaccttgggcctcaaacttggcagaagctgtttagggtttaggccttgcctttttcagatggcggtctggggtcagcttgtttacctgaggcaagctgcctagagatttgccctgccagcttctctccttgcctccatctgtcccatagctgacttgtgcagatattcattccaaacacttctattatagtccttaagaggaaagttctggcaaatgctagaacttctttctttatctccttttccttctattcatcctttatttccagggacattttagcatgccatgcacattggtgcccagggcagttgtctgactggcccgtctactgatgtagttccctgtacagcacagtgctagttggcactatattagaatatcagataattaaatataaacatctccatcttggagaagattcctatatgctcataaatgacaaaagaacaattagaaaatagactttttatgtacagaaaggcatacagaagttcagatggactatttaaatgctcagggaatatgaagaacttagggctaattagaggcaggtttctgggtgaaataatatattattaatgaaacttcctgtgcaaaatactgtctttttaaacctcaaatgggtgttatcctacagattagtatttattgttcagtaaagtatgaaaaaaacactttcaattctttgcttatctgggggtttactatcacttggttattcttgaatctcatttccctaaagaaaaaaatgaacaaaccaatgaaaaaagcaaaaccttattactatggcaactattcctaatgtattctttctttcttttaggtaaaattgttaacatttaccaatgtaaaatattttggaggattctttatggaaaatacagacttccacatttacatttcattgaggaggattttaatgtttattatttaatttctaggataaccctattggcaactgggatggaagatttgatggagtgcagctttgtagttttgcgtgtgttgaaagtacaattctattgcacatcaatgatatcatcccaggtatgttttctttgttttatacatttataaggcaaactttattttttaattttttatttttttatatcaatatgttttgggggaacaggtggtgtttggttacatggataagttctttcgtggtgatttctgagattttggtgcacccgtcacccgagaagtatactccgtaccccatgtgtagtcttttaccccttgccaccccccattctttccccctgagtccccaaagtccaatgtattattcttacacctttgaatcctcatagcttagctcctacatataagtgagaacatacagtgtttggctttccattcctgagttattatacttctcttagaataatagcctccaattccatccaggttgctgtgaatgccattatttcattcctttttacggctgagtagtattccatggtgtatgtatatatatacacacacacatatgtatatatatatacgcatatatacatatacacacatatatgtatacatatatacacacatatgtatatatacacacatatatacatatacacacatatatgtatacatatatacatatatatgtatatatacatatatatgtatatatacatatagatatgtatacatatacacacatatatacatacatatatacacacatatacacatgtgtatatatacacacgtgtacatatgtgtgtatatacacacgtgtacatatgtgtgtgtatatacacacgtgtacatatgtgtgtgtatatacacacgtgtacatatgtgtgtatatacacacatatgtgtactacattttctttatcgacttgttcattgatgggcatttgggctggttccatatttttgcaattgcagattgtgctgctgtaaacgtgcatgtgcaagtatctttttcctataatcactttttttccttgggtagactcctagtagtgggattgctggatcaaacgctagagctacttttatctttaaggaatccccacactgttttccacagtggttgtactagtttatatttccaccaacagtgtaaaaatgttcccttttcaccacatccatgccaacatctattcttttttgattttttgattatggccattcttgcaagagtgaggtggtatcacattgtggtttcgatttgcatttccctgataattgatgatgctgagcattttcccatatgcttgttggctatttgtatatcttcttttgataattgtctaaaagtgggctaatgtccttagcccattttttgatgggattgtttttttcttgctgatttgtttgagttctttgtagattctatatattagttctttgtaggatgtatagattgtgaagattttctcccactctactgattatttcttttgctgtgtagaagccttttagtttaattaagtctcatctatttatcatttttgttgcatttgctttcgggttcttggtcatgaagtctttgcttaagccaatgtctagaaggatttttccaatgttatcctctagaatctttatggtttcaggtcttagatttaagtctttgatccctctataaggcaagctttctaatatatattttgagtacataaatgtaagcttcaagatatatttttagaacttgacttttatattatggaattgttattaaataggatatcctttaccctcaaatgaaaataattaagatttttgtttccagacgtatatgagtataagggtggcattaatatgttttcattcactttttcatcacctgtccattcttagtgggggaaaaccccttcctgttaattagaaggatcggaaaatgtaataaactgctacctgagtgagagcttggtttaaactagaaggctttacacagacattggtcatctaatctaatctaatgtactgtggagaagattcttgctggataacctgtgagatcccttttagttttgagaaggtgtgattgatcagggatcaggactctagtcagaaatagattgctcaactttacatttagaagaaaaatcaagcaatcttttattttgcctctaacaagtagcacctagtgtctgctgtcaggtaattgacaatttctgttgataacagcatcaacagtttcatccccctgctgttagtggaactctctgtgatacaggctagtgcaataaagccaacagtggcagtcagagatggtgattctcattgagcattatgcaagtctgattaaaatgtcagaaggcctgcaggcagactgtagccaggaatgtaccaggccctgagttagacgacttaatacttttttacattcttaacaaacttataatgtaagtcttaatgatccccatttcgctgataaaaagctggggctcggatggacaacaattaccaaaatcaaagtaaatagtagagccagaatttaaatccacacctgtctgattagaaagctgtgctcttttcagtacctccccaccccaaatcctatctgtatatttaggatgtgaagacctgcatagaaaaccatacttctcagtctcacatgtatacttgggaatattgtttccatggagatatattttgtctctaattctataaaagctgaattttgctatagcaaggatcacaattgaataagcaaactgaattgtttttttttcaggtcatttcaggtcctcagtttcttttgttgtaaaaatgaaagggctaatactagatgattcttaaggttccttttagcgtgcactgtttgcgcttcctgttttcctgttgctgaagcaagtaatcaatgcttgtttttcaagttagggcatgctttctgctttagtttttagctttacagcaacagcacattaatttagttggaggtataggattcaaatgatagctttatttcaattttacttcttcaaagtgtgacatactttgctttacttgatgtttgtaaaatcaatttttaatttattgcaaattgaattcctagctattttttattttgcttccctttgggaacaaatgatttacattcaggaaaaagcatatatgtgcttgatattttacttggcaaaatttaatttagtttttcatgatttttttttttgagacggggtctcgctttgtcgcccagggtggagtgcagtggcgtggtctctgctcactgcaagctccgactcctgggtccacgccattctcctgcctcagcctcccgagtagctgggaccacaggcgcccgccaccacgcccggctaatgttttgtatctttagtagagatggggtttcatcgtgttagccaggatggtctcaatctcctgacctcatgatccacccgcctcggcctcccaaagtgctgggactacaggcgtgagccactgcgcccggcctagtttttcatgattgttaatggagataatacaatttattttatgaattaaagtacttttaaatattataataaatgcttatggtttacaaaacagtttaataaaaggccattccttcattcaaatattattaagcccttacctagatgttggggatatagtaggaagcaaaactggtaaaaattcttctcgtgtggagttttcattctagtgagtggagacagacagtaaatatgtaatgtgtatgatcaattacatgataataagatgaaaaatgataaacacagtgaggaggaagggagcactaggttgtagggcgggatttttcgatttcatgtagggtagttctgataaaccttctaataaggtgacatttgagctgttgacatgaaggaagtttgggagagaacatgtggattccgagggagagcccaaggccgcagccagcgtggccagtttgagcaatgtgaagagttgactgtggctgcggcagatggagtgagggagaaagttgtaggagccgcagtgggagctggaacaggtagtgctcagtgggctgttgtgtggattcttggctttcatagtgacagaggtggggagctataggtgggttttgaacaaaggacaactcaccctaatttgcatttttaaatgatctctctggctgcctgttaagaataaactagacagaggacagaaacagggagaccaggaaggagactgttgtagttatccacgtgagagacggtggtggctgggactggggtggtatgaagaggatggtaagtgaaggatttggatataatgtaaagatcccatcaagatttgcagatgggttgggtgtgaggtttgagagagagaacagaatcaaggatgattccaaggtttggactgagcaactggtaggctggagaggcaatttacccaggtgggaaagacaacaggaagagcatgcgtcggggagtgggagttggaagtcaggatcttggttttgatcatgttaaaattgagttagctattaaacaatttcatttgaatgtttatgttaatattatacgaattcatgtttaatccttaaaaatgggcaatgtgctcatcattttcatatttaagaaacttttggctgggtgcagtggcttattcctgtaatctcagcactttaggaagccgaagtgggcagatcacgtgaggtcaggagttcgagaccagcttggccaacatggcgaacccccccgtctctactaaaaatacaaaaattagccaggcgtggtggcggtcacctgtagtcccagctactcaggaggctgaggccaggagaatcgcttgaacctgggaggtggaggttgcagtgagctgagattgtgccattgcactccaacctgggtgacagagcgagactccatctcaaaaaagaaactttttactgtagaatgtatttgcaaaagtatatataacaacatatattaagaataataatgaacactcatgaaactgaccatctaggttaagaaacagaacattagaagtaccttgaaaaccacctgcaataccttgttttcattataattgcaatctctccctagaggtgaccattattctgattttttcattaattatttccttgctttttataatttaattatatctctgtagctaaacaatatactgtttagcctgcttttgaacttaatgtagttaaaatcttactgatttttaaattacttgcatcatttacttaaaatgtattttgagattcttttctgtggatgagggcattagtagtttgttcactctcactgcttcatagtatatttcgtcatgtgactatcccacagtttggtgcccattgtaatattaatggacgcttgggttttaggttgtttccacctccttttccacacttggtactgattaaaatttttgccagcctgacagctgagaaatggtatctcaaggtggtttaaaagtttgtagttccctgattacaagtaggattgaacagccttttatatgtttatacaacatttgtgtcttctattaaacacgtattttttgcctgtttttctgttgagttgctcatttattgattcatgagttctctagttttagaattttaataaaacatcttttaatgttttgttatgacattttaaacagaaaaactgaaaattttatattgagcatccttatgcatatcatctagatcctacaatcaacatcttacttgctttatatgtatctgtccacctctctattcacgtacttatccgtcacgttttcttgtgcatttcacattaagttgcagataccagttcacttcctcctaaatacttcagtgtgcatctaattaactagagataagtatttagggttttctttttcatttcagatagaagtcacacatataatgacatacatatggatttatttgggttctaactaatatatatatacccttgaattagaaacctctatcaagttattaaaacaattttaagaagaaatcattcatgtatctcaaatcaaaattaaaaagtacaataaaatatctcatttccatttttatcccctctgcctcagttgcctgcttactccatccttcgtttctcactagtcacagtttttatgaatttcttatatatctttccagtgtttctttatacaatataaatattcttattcccccttcccttttaattcaagaagtgtagtagatacactattctgctgtttgctttattctcttaattttatatgttagaactctttgtatatttgcaaacagaggttcttgttttttatagtgtataattttccattgtacggaaaaaaatttcataatttatttaaccagtttcctatcaatggacatttgggttgtttctgactttttgatattgcacacaatgttaccgtaacctgtacatgtctgtttcccacatgtgctagcatatctggaggatatatatattcccagaagtggagttgcttgatgaaagggcgtatgcgttggtattgttctggatattgttaattgccttcagtcgtagatataacaatttatattcctgccagtagaatacaagggggaacttatagctttcccatgagagtgtgttactaacttttttcccaatctgatagataaaaaatatatttcagtgtatataatacatttgcaaatagaaatttgcatttctctgagtgatgttgaacatttttgcatatgattaagggcaatttttctttctgtgaactgtttgcatctgttgcctatttttaaattgggttaggttattggccttttttctcactgatttcttcatgtgttagggtggcaaactcttctgtgatgcgagatgcaaatgttgcccactcttccaccctcatttgtcatttgtctttttttaaaattgcttatttttctggtcaccctcatttgtttttattgtggtaaaatatacctaacaggatgtaccattttaacaatttttaagtgtataattcagtgtaagtatgtttacagttgtgcaaccatcaccactatctatttccagaaatcttgttcattatcccaaatagaaactctatactcatgaagagatagctgccggttcctctttccctccagcctctgctcatctctgttctctgctctctgtccttatgactttgcttactctgggtatctcatattagtggaatcatacatatgtcctttggagctggtgcatttcacttggtgtgatgtttttgactttggtgctttttgccttgcaggatttataaaatttttatgctgttgtattcttttagttttaatagattctggattttgagttactgtaaggttataaaggaatttccctgtgttttcttctagtactctgtggttttagtacatatctctatatctatctatctatctatctatctatctatctatctatatctttgacccatttctgttttatgtggtatatgatgtgaaatataaatccaatctagtttttatttttgcccacaggtagaagataccctgttgtcttagtatcatttattaaaaagtccctctttactggtttgagaggccactttcatcatactaaatttccacgtgtagcgtggtatatttctggactttctattctgtcttcccacgtttcaataccacattgttcttaatgatttttaaaaaattgtatatattcatggggtacaagtgtaattgtgctacactactgtattgcattgtggtgaggtcagggccttcagcacatccatcactggagcaatgcacattatacccaccaagcaacctcccatcatccaccccccgccaccccaagccccctttattcatctttccacactctgcttccacgtgtgattctttatgtgttttaatattattaacactagtctcctctcactgttcttttgaattttcctgttctatactgttttcaaaatagtagtcttcttgatagttttgcgtttttacatttaagtgtgttattcacttagatttggttttgaacaggatatgaaatatgggtacagatatccaatttgaccttccatgcttgctgcgtataaatcaagtttccagatgtacacgtgtggatctttctgagccctgtcatttccctacactaaagcctatccatagctttagaagtcttggtagctgtgagagtacatttccattgtttgttttcttaatgaatgtcttggctattgttagcctttgggcttcattgtaagtttaactatcagcttctcaaatactataagagagttctgttaggattttggaattgcaattaatctgtagaacaattggaggagaattgacatttctatgatattaaaacttctaatatataaaccttgtgtatcctttcatttatttaatttccttttggtaaaattttataattttctccatgaagagcttacttgcattttgatgcattataaagcatattttctaacagtgtcatgctgatgtagaaatacaattgactttttttttagaaaacagctttactgagatctagtttataattcactcagagtgtacaaatcagtgcattttagtgcatttacagacatgtgcaattgtcaagataattttagaacattttcatcacctctaaaagaaacgctgcaccccttagtgatcatctcccaaacccttcatccttgtttagtcctaagcaactaccagtctacttctgtctctgcatatttgccttttctggacatttcatttaaatggaatcacattatatgtggtcttttgtgatttacttttttcacttagcataatgttttcaaggttcctccatgttgtagcatgtgccagaatttccgtccttcttaaggcagaataatattccattgtatggacacatcacatgttgtttattaatcagtagatagatatttaggtttttttttcaccttttggctaaaatgaataatgctgctacaaacatgcatgtacaagttgttgtgtggacatatgcttttgtttctcttgggtttatatctaggagtggaattgctgagtcatatgataactctatgtttaaccatttgtggaactgccagactgtttcccaaagcagccacaccattttacattcctactagcagtgtgtaagcgttttggtttcttcatgtccttgtcaatacttgttattatctgacttttttattctagccatcctagtgggaatgaagtcattttcaattgactttcgtgtgctgatttttcttacaaacagacttactaaaatatcttattcacaatccatggattacttataaaatattcagtcattatagtttgcacataataacagttttgcctcttctgaattcttttatttttaaaaatggtttcttactgtcctagctaggacctctaaatacaatattgaatagaagtagtgatggaaggcatcttggcctttttttctgatcttaaagaaaatgctttcaacatttcattattaaatgtgatgtttgctatagagttttattgttgtatctgtcatttatcaggttagagaagttacctactgttcctagttttctaacagttttatcatgaattgatgttgaattttatcaacccctttttctctattgagataatcctattttcttttaatctgctaattttcttatattgaatcaaccttacatccatgatgtaaacccaacctcctcatgattcatactttgcttggtccagtttgctagtatttgcatcctgtttttaaaatctctgtttataagagatattggcctatactttttcccttttagctgtccttgtctggttttggaatcaaagtcgtgcttgtctcataaagtacctgggaaaggtttcttttattttgttatttgaaagagtttatgtgagattagaattacctattccttgactatttgacaaagcttctttttgtggaaatgtttagctactgatgaaatatcctttaacatttgtttgtttttgattgtcttttgcaagttttattttttatgaatgtatccatttaattcattttcaaagctt

SEQ ID NO: 23969 - DNA, 3299 bp, Homo Sapiens
cttcctgcacctggtgacgcttggcgaaactgaggtctcatggagaagccccggagtattgaggagaccccatcttcagaaccaatggaggaagaggaagatgacgacttggagctgtttggtggctatgatagtttccggagttataacagcagtgtgggcagtgagagcagctcctatctggaggagtcaagtgaagcagaaaatgaggatcgggaagcaggggaactgccgacctccccgctgcatttgctcagccctgggactcctcgctccttggatggcagtggttctgagccagctgtctgtgagatgtgtggtatcgtgggtacaagggaagccttcttctccaagaccaagaggttctgcagcgtctcctgctccaggagctactcctccaactccaagaaagccagtatcttggctaggttacagggaaaaccaccgaccaaaaaagccaaagtcctgcacaaggctgcctggtctgccaaaattggagccttcctccactctcaagggacaggacagctggcagatgggacaccaacaggacaagacgctctggtcttgggcttcgactgggggaagttcctgaaggatcacagttacaaggctgctcccgtcagctgtttcaagcacgtcccactctatgaccagtgggaggatgtgatgaaagggatgaaggtggaggtgctcaacagtgatgctgtgctccccagccgggtgtactggatcgcctctgtcatccagacagcagggtatcgggtgctgcttcggtatgaaggctttgaaaatgacgccagccatgacttctggtgcaacctgggaacagtggatgtccaccccattggctggtgtgccatcaacagcaagatcctagtgcccccacggaccatccatgccaagttcaccgactggaagggctacctcatgaaacggctggtgggctccaggacgcttcccgtggatttccacatcaagatggtggagagcatgaagtacccctttaggcagggcatgcggctggaagtggtggacaagtcccaggtgtcacgcactcgcatggctgtggtggacacagtaatcgggggtcgcctacggctcctctacgaggatggtgacagtgacgacgacttctggtgccacatgtggagccccctgatccacccagtgggttggtcacgacgtgtgggccacggcatcaagatgtcagagaggcgaagtgacatggcccatcaccccaccttccggaagatctactgtgatgccgttccttacctcttcaagaaggtacgagcagtctacacagaaggcggttggtttgaggaagggatgaagctggaggccattgaccccctgaatctgggcaacatctgcgtggcaactgtctgtaaggttctcctggatggatacctgatgatctgtgtggacggggggccctccacagatggcttggactggttctgctaccatgcctcttcccacgccatcttcccggccaccttctgtcagaagaatgacattgagctcacaccgccaaaaggttatgaggcacagactttcaactgggagaactacttggagaagaccaagtcgaaagccgctccatcgagactctttaacatggattgcccaaaccatggcttcaaggtgggcatgaagctggaggccgtggacctgatggagccccggctcatctgtgtggccacggtgaaacgagtggtgcatcggctcctcagcatccactttgacggctgggacagcgagtacgaccagtgggtggactgcgagtccccagacatctaccccgtcggctggtgtgagctcaccggctaccagctccagcctcctgtggccgcaggtaaactacccaggtccctctgagcagccctggtaacaagggtgggaagaagggacagctgttctccggcccctcctccagccccgccctctcctcattgcccagaaccggccacaccgctgaaggccaaagaggccacaaagaagaaaaagaaacagtttgggaagaaaaggaaaagaatcccgcccactaagacgcgacccctcagacaggggtccaagaagcccctgctggaggacgaccctcagggtgccaggaagatctcgtcggagcctgttcctggcgagatcattgctgtgcgtgtgaaggaagagcatctagacgtggcctcgcccgacaaggcttcaagtccagagctgcctgtctccgtcgagaacatcaagcaggaaacagacgactgagccttcctgcctccagcctggcttctagctggaagccagcccagcgtttctctaccaccaccaccatgcctccacctgactttggcttggagactgatcctctctgtgtaaattctgcccggtgctgtgaaggctggacggtggaggacctgctggggtctcctgggacccgcctgttgcttctgccctcccctgtggaaaggtctatatgacgggccgcctgaggccccagaactcgtctgtgaaccaccttttccagccagagttcccaaagctggaacgctagctgcctgctcttccttaagatggcctccccccgacccgccacggccctcagttgccagggatggggccaccactgtcacactgtggaatacaagacagtgaactctgtctgcctgaacgagtcatgtaaattaagttctagagcagctctctgagcaggataaggtcccctgacagtgagttgtgtggtgggggcagcctctgcctcaaaaattcaccaagcagaatgcctctcagcctcatgtgttggtcctctgctcctcctagctccccagggatgttggggacccagcttgtctcggcagctaagaagcagtgaccaggatgtggattttggcgacctgtgtggtggccttgagctgctttctgtgtttgtgaggactgactcccatttcctaaaggaaatgcccccggggaggacattgggaggaagatggcctgagtgtgcactttggctctgctacctgctcctgaagccccgctaaaaataattcatccaagattcctttgtagttaaagggtccagttctgactggagcctctagagagctgggcttgtatgttcttttggccttttgttcctacctaaatgaagaaaccatgcctggaggggccgtgaacacagaaccctcaagacaaggatgacagagctggaggacacatctagctgccattgcaacctcactgggctccccagactctgtgtgtgagaaattaaaccccctgcttgcttgaaaaaaaaaaaaaaaaaa

SEQ ID NO: 23970 - DNA, 3321 bp, Homo Sapiens
atggccaaaagaaaggaagaaaatttttcctctcctaaaaatgccaaaaggccaagacaagaagaattggaggattttgataaagatggtgacgaagacgaatgtaaaggtactactttgactgcagcagaagttggaataattgagagtattcacctaaaaaacttcatgtgtcattcaatgcttggaccttttaagtttggttctaatgtcaactttgttgttggcaacaatggaagtgggaagagtgcagtactcacagctctcatagtcggtcttggtggaagagcagttgctactaatagaggatcctctttaaaaggttttgtgaaagatggacagaactctgcagatatctcaataacattgaggaacagaggagatgatgcctttaaagccagtgtgtatggtaactctatacttatacagcaacacatcagcatagatggaagtcgatcttataaacttaaaagtgcaacaggctccgtggtttccacgaggaaagaagagctgattgcaattcttgatcattttaacatccaggtggataatccagtttctgttttaacacaagaaatgagcaagcagttcttacagtctaaaaatgaaggagacaaatacaaattcttcatgaaagcaacgcaacttgaacagatgaaggaagattattcatacattatggaaacgaaagaaagaacaaaggagcagatacatcaaggagaagagcggcttactgaactaaagcgccagtgtgtagagaaagaggaacgttttcaaagtattgctggtttaagtacaatgaagactaatttagagtccttgaaacatgaaatggcttgggcagtggtcaatgaaattgaaaaacaattgaatgccatcagagataatatcaaaattggagaagatcgtgctgctagacttgacaggaaaatggaagaacagcaggtcagacttaatgaggcagaacaaaagtacaaggatattcaagacaaactagaaaagattagtgaagagacaaatgcacgagcaccagaatgtatggcattgaaagcagatgttgttgctaagaaaagggcctataatgaagctgaggttttatataaccgatccttaaacgaatataaagcattaaagaaagatgatgagcagctttgtaaacgaattgaagagctgaaaaaaagtactgaccaatctttggaacctgaacggttggaaagacaaaaaaaaatatcttggttaaaagagagagtaaaggcctttcaaaatcaagaaaattcagtcaatcaagagatcgaacagtttcagcaagccatagaaaaggacaaagaagaacatggcaaaattaagagagaagaattagatgtgaagcatgcactgagctacaatcaggggcaactgaaagaattgaaagatagtaaaactgatcgactcaaaagatttggccctaatgttccagctcttcttgaagccatagatgatgcttatagacaaggacattttacctataaacctgtaggccctttaggagcttgcattcatcttcgggacccagaacttgctttggctattgaatcttgcttaaaagggcttctgcaggcctattgttgccataatcatgctgatgaaagggtccttcaggcactcatgaaaaggttttatttaccagggacctcacggccaccgataatagtttctgagtttcggaatgagatatatgatgtaagacacagagctgcttatcatccagactttccaacagttctgacagctttagaaatagataatgcggttgtggcaaatagcctaattgacatgagaggcatagagacagtgctactaatcaaaaataattctgtagctcgtgcagtaatgcagtcccaaaagccacccaaaaattgtagagaagcttttactgctgatggtgatcaagtttttgcaggacgttattattcatctgaaaatacaagacctaagttcctaagcagagatgtggattctgaaataagtgacttggagaatgaggttgaaaataagacggcccagatattaaatcttcagcaacatttatctacccttgaaaaagatattaaacacaatgaggaacttcttaaaaggtgccaactacattataaagaactaaagatgaaaataagaaaaaatatttctgaaattcgggaacttgagaacatagaagaacaccagtctgtagatattgcaactttggaagatgaagctcaggaaaataaaagcaaaatgaaaatggttgaggaacatatggagcaacaaaaagaaaatatggagcatcttaaaagtctgaaaatagaagcagaaaataagtatgatgcaattaaattcaaaattaatcaactatcggagctagcagacccacttaaggatgaattaaaccttgctgattctgaagtggataaccaaaaacgagggaaacgacattatgaagaaaaacaaaaagaacacttggataccttaaataaaaagaaacgagaactggatatgaaagagaaagaactagaggagaaaatgtcacaagcaagacaaatctgcccagagcgtatagaagtagaaaaatctgcatcaattctggacaaagaaattaatcgattaaggcagaagatacaggcagaacatgctagtcatggagatcgagaggaaataatgaggcagtaccaagaagcaagagagacctatcttgatctggatagtaaagtgaggactttaaaaaagtttattaaattactgggagaaatcatggagcacagattcaagacatatcaacaatttagaaggtgtttgactttacgatgcaaattatactttgacaacttactatctcagcgggcctattgtggaaaaatgaattttgaccacaagaatgaaactctaagtatatcagttcagcctggagaaggaaataaagctgctttcaatgacatgagagccttgtctggaggtgaacgttctttctccacagtgtgttttattctttccctgtggtccatcgcagaatctcctttcagatgcctggatgaatttgatgtctacatggatatggttaataggagaattgccatggacttgatactgaagatggcagattcccagcgttttagacagtttatcttgctcacacctcaaagcatgagttcacttccatccagtaaactgataagaattctccgaatgtctgatcctgaaagaggacaaactacattgcctttcagacctgtgactcaagaagaagatgatgaccaaaggtgatttgtaacttaacatgccttgtcctgatgttgaaggatttgtgaa

SEQ ID NO: 23971 - DNA, 5210 bp, Homo Sapiens
cgcgtagtgagcaatggcctgagcccccatggctgcccctcaggacctggacatcgctgtgtggctggccacggtgcacctggagcagtatgcagacacgttccgacggcatggcctggctacagcaggtgcagcccggggcctgggccacgaggagttgaagcagttgggcatcagcgccacagggcaccggaaacgcattctacgcctgctgcagacaggcaccgaagagggctccctggatcccaaatcagatagtgccatggaaccatcccccagcccagccccgcaagcccagccccctaagcccgtgccgaagcccaggaccgtgtttggtggactcagtggccctgccaccactcagagacctgggctgagcccagccctcgggggaccaggagtgtccaggagcccagagcccagcccaaggccccctcctctccccacttcctcctctgagcagtcttcagccctaaatactgtggagatgatgcctaattccatctacttcggcctggactcaagaggcagggcacaggcagctcaggacaaggccccagacagctcccaaatctctgcccccacccctgccctcaggcccacaacaggcacagtgcacatcatggatcctggttgcctgtactatggtgtccaacctgtggggactccaggagcccccgacagaagagagagcagaggtgtttgtcagggcagggctgaacacaggctcagcagacaggatctggaggcacgggaggatgctggctatgccagccttgagctacctggagactccaccctcttatcgcccaccctggaaacagaggagaccagtgatgacctcatttcaccctatgccagcttctccttcacggcagaccgcctcacgcccctgctcagtggctggctagacaagctctcccctcagggaaactatgtcttccagagacgctttgtgcagttcaatgggaggagtctgatgtactttggcagtgacaaggaccccttccctaagggtgtgatacctttgactgccattgagatgacccgcagcagcaaggacaacaagttccaggtcatcaccggccagagggtgttcgtgttccgcacagagagcgaggctcagcgggacatgtggtgctccacgctgcagtcctgtctgaaggagcagcgcctcctgggccacccccggcccccacaaccaccccgacccctccgcacgggcatgctggagctgcgtggacacaaggccaaggtgtttgctgccttgagccctggagagctggcactgtacaagagtgagcaggccttctctctgggcatcgggatctgcttcatcgaactgcagggctgcagcgtccgggagaccaagagtcgaagctttgacctgctcacaccccatcgctgcttcagcttcacagccgagtctgggggtgctcggcagagctgggcggccgctctgcaggaagcagtaaccgagaccctgtctgactacgaggtggctgagaagatctggtctaatcgggccaaccggcagtgtgcggactgtgggtcctcccgcccagattgggctgctgtcaatttgggggtggtcatctgcaagcagtgtgcaggtcagcaccgggccctgggttctgggatctccaaggtgcagagcctgaagctggacacgagtgtctggagtaatgagatagtacagttattcattgtcctgggaaatgatcgtgccaaccgcttctgggcagggaccctacccccaggtgagggactacatccagatgcgacccctggcccccggggagagttcatctcccgaaagtaccgtctgggtctcttccggaagccccaccctcagtacccagatcatagccagcttctccaggcactgtgtgcagctgtggcaagacccaacctgctgaagaacatgacccagctcctctgtgttgaggcctttgaaggcgaggagccctggttccccccagcccctgatggcagctgccctggcctcttgccctcagacccctcccctggtgtgtacaatgaggtggtggtgcgtgctacttacagcggcttcctgtactgcagtcccgtcagcaacaaagctggaccctcaccccctcgcaggggccgggatgctcccccgcgcctttggtgtgtgctgggagcagctctggaaatgtttgcatcggaaaacagccctgaacccctcagcctcatacagccccaggatattgtatgtctgggtgtgagccccccacccactgacccaggtgacaggttccccttttcctttgagctcatcctcgctggggggaggatccagcattttggcacagatggagctgacagtctggaggcctggactagtgctgtgggcaagtggttctccccgctgagctgccaccagctgctgggccccgggctgctgcggctgggccgcctatggctgcggtccccctcccatacagccccggcccctggtctctggctgtcagggtttggcctccttcgtggtgaccacctcttcctgtgctcagcgccgggcccaggccccccagcccctgaggacatggtgcatctgcggcggctacaggagatcagtgtggtttctgcagctgacaccccagataagaaagagcatttggtcctggtggagacaggaaggaccctgtatctgcaaggagagggccggctggacttcacggcatggaacgcagccattgggggcgcggctggtgggggcggcacagggctgcaggagcagcagatgagccggggtgacatccccatcatcgtggatgcctgcatcagttttgttacccagcatgggctccggctggaaggtgtataccggaaagggggcgctcgtgcccgcagcctgagactcctggctgagttccgtcgggatgcccggtcggtgaagctccgaccaggggagcactttgtggaggatgtcactgacacactcaaacgcttctttcgtgagctcgatgaccctgtgacctctgcacggttgctgcctcgctggagggaggctgctgagctgccccagaagaatcagcgcctggagaaatataaagatgtgattggctgcctgccgcgggtcaaccgccgcacactggccaccctcattgggcatctctatcgggtgcagaaatgtgcggctctaaaccagatgtgcacgcggaacttggctctgctgtttgcacccagcgtgttccagacggatgggcgaggggagcacgaggtgcgagtgctgcaagagctcattgatggctacatctctgtctttgatatcgattctgaccaggtagctcagattgacttggaggtcagtcttatcaccacctggaaggacgtgcagctgtctcaggctggagacctcatcatggaagtttatatagagcagcagctcccagacaactgtgtcaccctgaaggtgtccccaaccctgactgctgaggagctgactaaccaggtactggagatgcgggggacagcagctgggatggacttgtgggtgacttttgagattcgcgagcatggggagctggagcggccactgcatcccaaggaaaaggtcttagagcaggctttacaatggtgccagctcccagagccctgctcagcttccctgctcttgaaaaaagtccccctggcccaagctggctgcctcttcacaggtatccgacgtgagagcccacgggtggggctgttgcggtgtcgtgaggagccacctcgcttgctgggaagccgcttccaggagaggttctttctgctgcgtggccgctgcctgctgctgctcaaggagaagaaaagctctaaaccagaacgggagtggcctttggaaggtgccaaggtctacctgggaatccgcaagaagttaaagcccccaacaccgtggggcttcacattgatactagagaagatgcacctctacttgtcctgcactgacgaggatgaaatgtgggattggaccaccagcatccttaaagcccagcacgatgaccagcagccagtggtcttacgacgccattcctcctctgaccttgcccgtcagaagtttggcactatgcctttgctgcctatccgtggggatgacagtggagccaccctcctctctgccaatcagaccctgcggcgactacacaaccggaggaccctgtccatgttctttccaatgaagtcatcccaggggtctgtggaggagcaagaggagctggaggagcctgtgtacgaggagccagtgtatgaggaagtaggggccttccctgagttgatccaggacacttctacctccttctccaccacacgggagtggacagtgaagccagagaaccccctcaccagccagaagtcattggatcaaccctttctctccaagtcaagcacccttggccaggaggagaggccacctgagccccctccaggccccccttcaaagagcagtccccaggcacgggggtccctagaggaacagctgctccaggagctcagcagcctcatcctgaggaaaggagagaccactgcaggcctgggaagtccttcccagccatccagcccccaatcccccagccccactggccttccaacacagacacctggcttccccacccaacccccatgcacttccagtccaccctccagccagcccctcacatgaccctaggaccagcagtctgagagggtaggtaccagaagacccagaaactcttatcgtggcactgttgcagcttcctctgccctggctggaaagactccagaatccagtgtggtgctgtggaaggagcactggactaaaggcttcagtggctgcgtgtcccaggacaggtcatggcccctctctgggcccagcccatttatctataccatgaggtaactgaagtaaggagagcagtgaatgtcaaactgtgtttcttagagccataagccccacatattatccctgaacaagggcagctcctgctttatatatttgatacgtaggggttccatgagagattttgggttttaaaggaatggttttactgcattaaagaaaaaaaatgctttggaaaccagaggcctgggtgatgttaaagtctatcctgtcccacttcctacattctgggactaccgtgaagcctggagtagggagagcgagtttgggagctgggactcggggagtcaaaaatagatgagtaattgtcaataaacctgggaaccaaaag

SEQ ID NO: 23972 - DNA, 3026 bp, Homo Sapiens
cccgggtcagcggcgcgggtgctgcgcctagctgcgcaccatggccgggttgctggcgttgctgggtccggcaggcagggtgggcgcccgggtccggcctcgcgccacctggctcctgggcgccaccgccccctgcgccccgccgctcctggccctggccctgctcccgcccaggctagacgcccggctgctccgcacggcgcgcggggactgccgcggccaccaggaccccagccaggccacggggacaacaggcagcagcgtcagctgcacagaggagaaaaagcaaagcaagtcacagcaactgaaaaagatttttcaagagtatggcactgttggcgtgtcattgcacattggaatctcattaatttccttgggcatattttacatggttgtgtcaagtggtgtggacatgcctgcaatcctgctgaaactcggatttaaagagtccctggtacagtcaaaaatggcagcaggcacaagtaccttcgtggtggcctatgcaatccacaagctgtttgcgccagtgagaatcagcattacgctagtctctgtgcccttgattgtcagatattttcgaaaagtgggattttttaaacctccagctgcaaaaccttaatgaactcttcagtcgtacacactgaaaacctatttcttctaaattacatgatttggattggttttagggttttagggttgtagggtttcttttggagaggtagggggctaattgctatgttctcatggataaactttgccagcaaaaatcaggcttttgaacaattttaattttttgcctcataaattttgtgaatgctattcattatagggcttgtatatataatctaaaatgtcagcaaggcatcggagatgggttaacatctcaaaacaaaatagcctacaaatgttccttgtgggagactttggcgagggtctgtgggtaaaagcaccagggggttaatcttggctcagtttcctaaaaagcattgattaatttaactggmttttaaatatccccttccgctgatatttgttgtcagctgcctacagtttaatatgcagcgttcacaaaacagctgccagtgctacaattaatgaagcaaaacttaatatgtaatcacaatctaaattagcatcaatactttgacattcattacattggtttgggggaagaaaagtagttctggtatgtttcattgatccccagataccttccaatctggacatgatggggctgattccagatggtttttctgaaatttcattaaggtaggtcagcgtcatttgtctctgtttaggtaaaatataaaaaccctgcccagtagcagtggcatcgcttggttcctgatgcccatgttccagaggaattcggataccacaaacagctaagacaatctcagcttttcttagacaatcttctatctcaaacttcagacattccagaattgtcatgatgtttacactgtctgagttaaaaatcctgttcaagaaaaaaaaagattttgtatcacttcttaaaaaggaatattcatagcacttgtcacaaatagaaggcaaccatgagataatacaagccagggagaggcttgtattacatgacaggtgtaattagtctgctgagccagctttacccaatgaagggcatatgtgttagagagattagctaagagtagaaattcgagcatagaggccaggtgcggtggctcacgcctgtaatcccagcactttgggaggttgaggcaggcgtgtcacttgaggccaggagttcgagaccagcctggccaacatgatgaaaccccgtctctactacaaatacaaaaattagccgggtgtggtggcacacgcctgtagtcccagctactggggaggctgaggcagcattgcttgaacccaggaggtggaggttgcagtgagccaagatcacaccactgcactccagcctgggcgacagagggagacactgtctccaaaagaaagaaatcccagcgtagatccaaactgagacactgaggcttcgtccttatagtagtcaggagcaggcgattgaagtaattctgtcctgcggggttcagcatcatgcacgttccccctgggccattctctgatgcagggcacttgctccacactctgggaacccagattcaccagtctgccctgtcacgtagttgaaggagttgcatttatctttctggctcctaattcctttaaaattacatttgttgcagaacctccacaaggctaaataaaattacatttgtgaccatcagagaactgaataaaccattaactggccatcctggttttgcagagatcaggttgttgacagttcctggttgacccacagctacccatgtcagttatctccactaacatatccaagaatctttgtaggacaatttctccacctgcaaggtctttcaggtagaactcttcttttaaggcaattagcccattgccaaaaggttttactgtcttaaagctgtctttctgagatctaattccaaggacttctccacagctaagtgagatgcctcacaccattaggtgatgctttggacagaacagagtattttcatcttgtgtttaaagcaattccttggcttcggctcctcaccactttctatgccagtctcccatttatgtccctagtaatgcctatgcaaaaaaaaaaaaaaaaaaaaagaaaaactgatggtgaaacctacaggtttaagggcttaaatctcaaactttgttaggagtaacaggagcgtgctgagcgggcaagcaataaaacaaatcataccaaaaagccacattgctctctcctaagccccaaccccactccactcctgtggccaggggtccaaacagaaaataaccggagaagacaaggaggtcaaaggatcagggaactaagcattatgtgaattcaccagcaagatgtacagaacgcctgtgtttacattgtttttatggaactagcagaataaaacatctattttaaaaatgaaaaaaaaaaaaaaaaaaaaaaaaaaaaaaaaaaa

SEQ ID NO: 23973 - DNA, 2291 bp, Homo Sapiens
tgactgttttcggactcagcctgcctacacccaggtgattaaaagctttattgctcacacaaagcctgtttggtggtctcttcacacagatgcgcatgaaacccagtaatctacttcaagtttcctagctcttccctatgccatctccattacgtttgtgagcctatccagtattttatttcaattattgtctttttatttctaaaatttccaattagttctttatatcttctgtttctttgttgatatttttctatctttccattcataccccagggctgagggagcacatccaaggaagggccaacttggaaggggttcagcccatcagatagcaggtaagtcctctggtttgggcaggctagtctggagttgctgggtaactaataggagaacccctcaagtgcaggtagggatggccaatcagcaactggtggcatgggcatgtgatggaagtccagatggccttcagagtgtgtggaccacacaggcacttgcagaaggcatcgcaggttggcatgtgaccctcaggggcacaggcagctgtgtgcaggtaatatgcaggcttgtgaagaaagtcgaaatacaagcacaggcaggagttcttcagagcacgtgggctgcacaagggctctgtgttctggctcaagagagctgtagaaaggtgactgcaaggccaaggatgcaaagtcgcaaagggactgttctgagcccatgcttggggcagattccgatggatattctcacatgcacactgctgatccccagcccacgccaaaaaaaaggcaggaagcctcttcctactaccttgcccctccagtgccttctactgagaaagcacagcactgcgctcactttaaagggccaatatttaaaggaatgccattgtataacacagggtatatttattgagtggcgcattcaaagctgagaagcagtaagttgataactgacaccgtgggtaaccaatttggttgagttctgacctcaaattccaacctgccttctgtggggtgtgatccccatgtcaggtctgttttcagtcttcgtggtgctattcagctatgttccgtgtgcaccacccagtggcccgtctacggcgtggctgaaggtctattccagtgtccaggtctaacttctttggagtgctggttagggtcagatccacgcatgcgcagctaggggaggagcccaggaacaaacttacggagctgtttcctccaaattcctccctctctgtgatctccctggtcctttcctgatcgctgggctccctttttcgggcctctggccaaaaacttggtgttgtagttaccctgctctgccgtgcacttcctacaactgcacccacagtcgcggccaagcagcgaagatttaagaaagtaagaaagcgtgacggtttgctccactcttttgggctatagctcctccaatcagaaaaggaaggttctctgcatgtcccactttatgtgaaatctaacaaagttgaactcgtagaagtagagtgtagaaagagattggggccggggaggaagggaatggggagttactggtcaaagggtacaaagtttcagataggtaggaggaatgttttgaaatctattgcatagcagggcgactatagtcaataataaagtattgcatatttcaaaatcactgaaagggtaaatttcaaatgtctaccataaaaatgataggtaaaagaagtgcatttaatttttcttttaccacttttcttactctgttatcttcagctcaggagtatctaacctgcaaagatcttaattaaggctttggctttcgacttaaaagtctccataaaggaacgctacgcatcatcctgaaaataaagatcaaagtccacagccagtggtgaagaaacattaataagagaatcagtcagcctagtttttttgaggaaatctgtgcacagatcccaagtctacacataaaccaaaaagccaaagtaaagttaactgtatttgagcagtgtgggcagcccagccagccacagtaactgaagctggaagaattactccctacacacagggctcgtgttctctagatcaaccagacacatcacagactctgttgttgaggttctttcatttcctcaggccagttagcccttggctagtagccagagctgtacattaactgcccctacatttttaaaatcattgcttatgaatttctatgtattaacttagagaaatgtaattctagttcccatcttagaggaatggtctcttcttaatgtctttgtgttctaaatatttgatcatgtcaac

SEQ ID NO: 23974 - DNA, 2559 bp, Homo Sapiens
atgctaatcactgaaagaaaacattttcggtcaggaagaattgcacaaagtatgtctgaagcaaatttgattgacatggaagctggaaaactctcaaaaagttgcaatattacagaatgccaggacccagacttgcttcacaattggccggatgctttcacccttcgtggtaataatgcttccaaagttgcaaatccattctggaatcaactgtctgcttctaacccatttttggatgacataactcaactaagaaataacaggaagagaaataatatttccatcttaaaggaagatccttttcttttctgtagagaaatagaaaatggaaattcttttgattcctccggtgatgaacttgatgtgcatcagttacttaggcagacttcctcaagaaattctggaagatctaaaagtgtttcagaacttctggacattttagacgacacagcacatgcccatcagagtatacataactctgaccagatcctactacacgacttagagtggcttaaaaatgatcgggaggcttataaaatggcttggttaagtcaacgccagctggcccgctcctgccttgatttgaatacaattagtcagagccctggatgggcccagacacaacttgcggaggtcaccatagcttgcaaagtaaaccatcaaggagggtcagtacaattacctgaatcagacatcactgttcatgtgccccaaggtcatgtggctgtgggagaattccaagaggtgtctctaagggctttccttgatccgccacacatgcttaaccatgatctttcgtgcactgtgagcccgttgttggaaatcatgttaggcaacctcaatacaatggaagcccttttgctggagatgaaaattggggctgaagtaagaaaggatcctttcagccaagtcatgacagaaatggtgtgtttacacagcttgggtaaagaaggcccttttaaagttttaagcaactgctacatttataaagacaccatccaagtcaagctaatcgacttgagtcaggtaatgtatctagtggttgctgcacaagctaaagctcttccgtcaccagctgccaccatttgggattatatccacaaaaccacctcaattggaatttatggacccaaatatatccatcccagttttactgttgttttaacagtttgtggacacaattatatgccaggacagcttacaatttctgatattaagaagggtggaaaaaacatatctccagttgtgtttcagctctgggggaagcagtcatttttacttgacaagccacaagatttaagtatttctattttttcctgtgatcctgattttgaagtaaagacagaaggagaaaggaaagaaattaaacaaaagcagttggaagcaggtgaagtagttcatcaacaatttttattttctttagttgagcacagagagatgcacttgtttgatttttgtgttcaagtggagcctcccaatggtgaaccagttgcacagttctctatcactactcctgatccaaccccaaacctaaaaagactctcgaatctgccaggctatttgcagaagaaggaggaaatcaagtctgctcctttatcaccaaaaattcttgttaaatatcctacatttcaagataaaacattgaactttagcaactatggggtaaccctgaaggcagtgctaagacaaagcaagattgattacttccttgaatatttcaaaggggacacaatagctctcctcggggaaggtaaggtaaaagctattggtcagtccaaagtgaaagaatggtatgtaggagtcctcagaggtaagattggacttgtacactgcaaaaatgtcaaggtgatttcaaaggagcaagtaatgtttatgtcagatagtgtctttacaaccagaaatcttcttgaacagattgtcctgcctttaaaaaaattgacttatatctactcagttgtattaaccttggtgtcagaaaaagtttatgattggaaagttttagctgatgtcctgggttactcacatctgtccctggaagattttgatcaaattcaagcagacaaagaatcagagaaagtttcttatgttataaagaagttaaaggaagattgccacacagagagaaatacaaggaagtttctgtatgaacttattgtggctcttctgaaaatggattgccaagagttagtcgcacgtctcatccaagaagctgctgttctgacttcagctgtcaagcttggaaaaggctggagggaactagctgaaaagttagtacgactcacaaagcaacaaatggaggcatatgaaattcctcatcgaggaaacactggagatgttgctgttgagatgatgtggaaacctgcctatgattttctgtatacctggagtgctcactatggaaataactacagagatgtgttacaagaccttcagtcagctttggacagaatgaaaaaccctgtgactaaacactggagagaattaactggagttttaatactagtaaattctttggaggttttgagagtaactgcattctccacttctgaggaagtatag

SEQ ID NO: 23975 - DNA, 6245 bp, Homo Sapiens
tttcctccgaagctctgtggtccgatctgcggtccgcttgctttccctgcccggtcccgagcgctcagcctgaagcgccgctttcgagggcaccctgcatacactggccgcgcctcagggatctcattgcccgcgctttctcattgcctctttccgtgttcgattcggctgatctgggcccagcctccgctcccgctctctgtcggtgggcgcgggggaatccgaaacggctcagcagaatcccagcagcttgctgctactggagcgggccgcctccatggcctccaggcaggccgggctggaccgcgtgaggtcctaggagacgggattccgggaagcggggagtatggtgggggtcctggccatggcggctgcagctgctccgcctcccgtgaaggactgcgagattgagccatgcaaaaagcgaaagaaagatgatgacacatctacctgcaaaacaattacaaaatatttatcaccactagggaagactagagacagggtttttgctccaccaaaacctagtaatattctggattattttagaaagacttcacccacaaatgagaagacacaattagggaaagagtgcaagataaagtcacctgaatcagtacctgttgacagcaacaaagactgtacgacacctttggaaatgttctcaaatgtagagtttaagaagaaaagaaagagggttaatttatctcatcaactaaataatattaaaactgaaaatgaagctccaattgaaattagtagcgacgatagcaaagaagactatagtttaaataatgattttgtggaaagtagtacttctgttttacgttacaagaaacaagtagaggtacttgcagaaaacattcaagatacaaaaagtcaaccaaatactatgacctccctgcaaaattctaaaaaagtaaatcctaaacaagggaccacaaaaaatgacttcaaaaagttgagaaaaaggaaatgcagagatgtagtagatctatctgaaagcttacccttggcagaggaactaaatttgcttaaaaaagatggtaaagatactaaacagatggagaatactacaagccatgcaaactctagagataacgtaactgaagcagcccagttaaatgatagtataataactgtctcatatgaggaatttttaaaaagtcacaaggaaaataaagtggaagagataccagactctacaatgtcaatttgtgttccttctgaaactgtcgacgaaatagtcaaaagtggttatataagtgaatcagaaaactccgaaatttcccagcaggtacgctttaagacagttactgttcttgcacaggttcaccctattccgcccaaaaagacagggaaaataccccgaattttcttgaaacaaaagcaatttgaaatggaaaatagtttatctgatcctgagaatgaacagacagttcagaaaagaaaatctaatgttgttatacaggaggaagaattagaattggctgttttggaagctggaagttctgaagctgtgaaaccaaaatgcactctagaagaaagacagcaatttatgaaagcatttaggcagccagcatcagatgcacttaaaaatggagttaaaaagtcttctgataagcagaaagaccttaatgaaaaatgtctatatgaagtaggaagagatgataattctaaaaaaatcatggaaaattctggtatccaaatggtttcaaaaaatggcaatttacagttacacactgataaaggaagttttctgaaggagaaaaataaaaagctaaagaagaagaataagaaaacattagatactggggctattccaggcaaaaacagagagggaaacactcaaaagaaagaaacaacctttttcttaaaagagaaacaatatcaaaatagaatgagtttaagacaaaggaaaacagagtttttcaaaagcagcactttatttaacaatgaaagtcttgtttatgaagatatagcaaatgatgaccttctaaaggtttcctctctgtgtaacaataataaattgtcaagaaaaaccagcataccagttaaagatattaagcttacacagtctaaagctgaatctgaagccagcttgctaaatgtttccacgcccaagtcaactagaagatctggaagaattagcagcacacctactacagaaaccattagaggtattgattctgacgatgtacaagataatagtcaactaaaggcttccactcaaaaagcagccaacttatcggaaaagcacagcttatatacagcagaattaataacagtaccctttgattcagagagccctattagaatgaaattcaccagaattagtactcccaaaaaatctaagaaaaaatctaacaaaagatctgagaaatctgaagcaactgatggaggttttacttctcagattagaaaggcaagcaatacttcaaaaaacatatcaaaagcaaaacaattgattgaaaaagcaaaagctttacacatcagtaggtcaaaggtgactgaagaaatagcgatacccttaaggcgctcctctagacatcagacacttcctgaaaggaagaaattgtcagaaacagaagattctgttataataatagattcaagtcctactgctttaaagcatccagagaaaaatcagaagaaacttcagtgtttgaatgatgtgctaggaaaaaaacttaacacatccactaaaaatgtacctggaaaaatgaaagtcgctcctttatttcttgtcagaaaagcacaaaaagcagctgatcctgtccctagttttgatgaaagcagtcaagatacatctgaaaaatctcaggattgtgatgttcaatgtaaagcaaagcgtgacttcctaatgagtggtttgccagatttgttgaaacggcaaattgcaaagaaagctgctgcgctggatgtgtacaatgcagtgagtaccagtttccagagagtcgtacatgtgcaacaaaaggatgatgggtgttgtttgtggcatttgaaaccaccctcttgtcctctcttaactaaatttaaagaactgaacactaaagtaatagatctctcaaaatgtggtattgctcttggtgaattttcaacattgaattcaaagttgaaaagcggtaactctgctgctgtgttcatgaggacaaggaaggaatttactgaagaagtaagaaatcttttgcttgaggaaattaggtggtcaaatcctgaattttcattgaaaaaatattttcccttactcctaaaaaaacaaattgagcaccaagtactttcttccgagtgtcatagtaaacaagaactggaggctgatgtcagccataaagaaaccaaaaggaaactcgtagaagcagaaaattctaagtcaaaaagaaagaaaccaaatgagtattcaaaaaatctggagaagaccaataggaagtcagaagaacttagcaaaagaaacaactcttctgggataaagctagattcttccaaagattctggaactgaagacatgctttggacagaaaagtatcaacctcagactgccagtgaacttataggaaatgagttagctataaaaaagttacatagttggttgaaagactggaaaagaagagctgaattggaagaaaggcagaatctgaagggaaaaagagatgagaaacatgaagatttctcgggtggcatagactttaaaggcagttcagatgatgaagaagagagtcgtctttgcaatactgtccttataacagggccaacaggagtgggaaaaactgctgcagtgtatgcttgtgcccaggagcttggatttaagatatttgaagtgaatgcctcttcccagcgcagtggtagacaaattctatctcagttgaaggaagctactcagtcccatcaagtagacaaacaaggtgtaaactcacaaaaaccctgtttttttaatagctactacataggcaagtcaccaaaaaaaataagctcccctaagaaagttgttacatcaccaagaaaagttcctccaccatcaccaaaaagtagtggaccaaagcgagcacttcctcccaaaaccttggcaaattattttaaagtatctcccaaacctaaaaataatgaagaaataggaatgcttctggaaaataataaaggaataaaaaattcttttgaacagaaacaaattactcagactaaatctacaaatgcaactaattcaaatgtcaaagacgttggagctgaagaacccagcagaaaaaatgcaacatctcttattctttttgaggaggttgatgtaatttttgatgaagatgctgggtttttgaatgcaatcaaaacattcatggcaacaactaaacgacctgtaatccttactacaagtgacccaacatttagtttaatgtttgatggctgctttgaagaaatcaagttcagtactccttccctgctaaatgttgccagctacctacaaatgatttgcttaactgagaattttagaactgatgtaaaagactttgtaaccttgttaactgcaaatacttgtgatatcagaaaaagtatcctttacttacaattctggattagaagtggaggtggagttttagaagaacgaccattaaccctttatcgtggaaatagcagaaatgtacaactagtttgctctgaacatggccttgataacaaaatttaccctaaaaatactaaaaagaaacgtgtagaccttccaaaatgtgacagtggctgtgctgagaccttgtttggccttaagaacattttttccccatctgaagacttattttcatttttaaagcacaaaatcacaatgaaggaagaatggcataaattcatccagcttcttacagaattccaaatgcggaatgtagattttttatatagtaatcttgagtttattctaccattaccagttgataccattccagaaactaaaaacttttgtggcccatcagtaactgtggatgccagtgcagcaacaaaaagtatgaattgtcttgctaggaaacactctgaaagagaacagccattgaaaaagtcccagaaaaagaaacaaaagaaaacattggtaatattagatgatagtgatctatttgacactgacttggactttcctgatcaatctattagcctgtcctctgtatcatcttcctcaaatgcagaagaaagcaaaaccggagacgaagaaagcaaagccagagacaaaggaaacaatccagagacaaagaaatctattccttgtcctcctaaaacaactgcaggaaaaaaatgttctgcccttgtttctcattgtttaaattctctctctgagttcatggataacatgtccttcttagatgcacttttaactgatgtaagggaacaaaacaaatacggtagaaatgactttagttggacaaatggaaaggttacaagtggactttgtgatgagtttagtcttgagagtaatgatggatggacttctcaaagctctggagaattaaaggcagctgcagaagctctcagctttactaaatgttcttctgctatttcaaaagcattggaaaccttgaattcttgcaagaaattaggaagagatccaaccaacgatcttactttttatgtttcacaaaagcgcaataatgtatactttagtcagtcagcagctaatttagacaatgcttggaagaggatatcagtcattaaaagtgtattttcgagtcgatctcttctctatgtgggtaatagacaagctagtataattgaatacctgccaacccttcgaaacatctgtaagactgagaagctaaaagaacaaggaaaaagtaaaagaagattcctgcactattttgaaggaattcatcttgacattccaaaagagactgtgaatactttggcagctgacttcccttaatgttccatactaacaatgctttgtatagattatcatgtggtccttaagatacatttttatattatgtggatcttcatggaaaagtatatttctcgatgtacattttaaacaaacaatttgtatatttttttattggcgggtaaatatttaaaatatttgagttacaaattttatatatgattgtaattttttttctgaattttttgtattatctgatttagctttgttggagtattttttgtatgtgagtgaactgtttctggaaggtagagttcattaagatgaactccctatttcaagtgtttatattatatattagcttaatattcagatacattatcttggctgctaacattagtgtcac

SEQ ID NO: 23976 - DNA, 5505 bp, Homo Sapiens
cggcggcagcgttaagtgagaaaggaaaaaagacaacgaggaaaaaggaggtgtccgggtagggcaacgcggcgacacccgaggcctggtggtggcggcggatcgagatattcaaggctgaagcagctacggaacggcagcggcggcggtcggacaaactgactgaccgagccgggtggtggcgggagcagcgggagcagccggaacgatgccggccgtgagcctcccgcccaaggagaatgcgctcttcaagcggatcttgaggtgttatgaacataaacagtatagaaatggattgaaattctgtaaacaaatactttctaatcccaaatttgcagagcatggagaaaccttggctatgaaaggattaacattgaactgtttggggaaaaaggaagaagcttatgaattggttcgtagaggtttgagaaatgacttgaagagtcatgtgtgttggcacgtttatggccttcttcagaggtcagacaagaagtatgatgaagccattaagtgttacagaaatgcactaaaatgggataaagacaatcttcaaatcttaagggacctttccttactacagattcaaatgcgagatcttgagggttacagggaaacgaggtatcagttacttcagcttcgacctgcgcagagagcatcatggattggttatgctattgcttaccatttattagaagattatgaaatggcagcaaagattttagaagaatttaggaaaacacaacagacatcccctgacaaggtggattatgaatatagtgaactactcttatatcagaatcaagttcttcgggaagcaggtctctatagagaagctttggaacatctttgtacctatgaaaagcagatttgtgataaacttgctgtagaagaaaccaaaggggaacttctgttgcaactatgtcgtttggaagatgctgcagatgtttatagaggattgcaagagagaaatcctgaaaactgggcctattacaaaggcttggaaaaagcactcaagccagctaatatgttagaacggctaaaaatttatgaggaagcctggactaaatatcccaggggactggtgccaagaaggctgccgttaaactttttatctggtgagaagtttaaagaatgtttggataagttcctaaggatgaatttcagcaagggttgcccaccagtcttcaatactttaagatcattatacaaagacaaagaaaaggtggcaatcatagaagagttagtagtaggttatgaaacctctctaaaaagctgccggttatttaaccccaatgatgatggaaaggaggaaccaccaaccacattactttgggtccagtactacttggcacaacattatgacaaaattggtcagccatctattgctttggagtacataaatactgctattgaaagtacacctacattaatagaactctttctcgtgaaagctaaaatctataagcatgctggaaatattaaagaagctgcaaggtggatggatgaggcccaggccttggacacagcagacagatttatcaactccaaatgtgcaaaatacatgctaaaagccaacctgattaaagaagctgaagaaatgtgctcaaagtttacaagggaaggaacatcagcggtagagaatttgaatgaaatgcagtgcatgtggttccaaacagaatgtgcccaggcttataaagcaatgaataaatttggtgaagcacttaagaaatgtcatgagattgagagacattttatagaaatcactgatgaccagtttgactttcatacatactgtatgaggaagattacccttagatcatatgtggacttattaaaactagaagatgtacttcgacagcatccattttacttcaaggcagcaagaattgctatagagatctatttgaagcttcatgacaacccccttacagatgagaataaagaacacgaagctgatacagcaaacatgtctgacaaagagctaaagaagctacgtaataaacaaagaagagctcaaaagaaagcccagatagaagaagagaaaaaaaatgcagaaaaagaaaagcagcagagaaatcagaaaaagaagaaggatgatgatgatgaggagataggaggtccaaaagaagaacttattccagagaaactggccaaggttgaaactccattggaagaagctattaaatttttaacaccgttgaagaacttggtgaagaacaagatagagactcatctttttgcctttgagatttactttaggaaagaaaagtttcttttgatgctacaatcagtaaagagggcatttgctattgattctagtcatccctggcttcatgagtgtatgattcgtctctttaatactgcagtgtgtgaaagtaaagatttatctgatacagttagaacagtattaaaacaagaaatgaatcgtctttttggagcaacgaatccaaagaattttaatgaaacttttctgaaaaggaattctgattcattgccacacagattatcagctgccaaaatggtatattacttagatccttctagtcagaagcgagctatagagttggcaacaacacttgatgaatctctcactaacagaaacctccagacatgtatggaggtattggaagccttgtatgatggtagcctaggagactgtaaagaagctgctgaaatttatagagcaaattgtcataagcttttcccttatgctttggctttcatgcctcctggatatgaagaggatatgaagatcacagttaatggagatagttctgcagaagctgaagaactggccaatgaaatttgaacatcactaaacaagcaaatggaatgactttggaccatatctagtatataatatttttgtcacgcacctgctgcattgctctaacttacacagaatgagaggagtaaatgttcttgccttcaaatagtgttttacgttttttatcctgctgaaaaagtatatataaaatatctaacattacaggatagaggttcagtttcttaaaaaattaaagctgctaaaattgagtggttaaaaaagataccttatcctattcctccccacccacccatgtttttaaactaatttatataaaatctggaggctgttacagctaacaaagcaggtgtgtggcagaaatattactttaaatttgtcttgtgagattttactatatctcagacagcataaatgctgttttagcactggattctttcactgagcacaaagagttgttggggctttagcatctgactgattttgttacggggttgattctgaccataggaagtatgcaatgtgaatcactatttacagagaaacctacaacagatgcttgatgttgtagaaactgggacatatagataccaagcaaaattataagaaacctataaggtgttcaatacgcttgtgtttccaaaattcactgtacatgatcagtttggtgttcttgtaccacagtttttaactgaaggaaccagttgtaacagtctcaattttaactaaaacttgaagaactaaaacaacaatgcaaacctttcagcattgtttggccaaacttgttaaaactgtaatgcaagaaccaaatgcactgtgatgtggcaccaactaattagcaagcatgaatttttcacccaagagtgaaaaaaggaaaatctaccatggcttgaagttaaagagcagaactcctgactaccattctatgactgatcaaaagactaatagttaaaaacctcagcaggccttgttcacgatatgcagaaaaaaaagtgctgcagtttagatacctctggaatttttccacagtgtcacaggtttgtaatacttgaagccctacatttctaagaatatatttcttgctcagttgtttcaggcaagcccaagactttgtaatttttaaagggcccaagatttttttttttttttttttttcaaataacagaccagcttctttttcttgcagttacagatgtaatttcctttttgttgtcaaacataaggtaccaaatatgatgcaataaattgttttgaaaaacagttgtgtgaatatttcaactaatctgtgttgggcttctgtgaaatacacaggtggaaacagaggtgcaagccagaggcaatgtaatatgctgtaaggctagtgcagatgggagctttttagaaggggctaagtgctggtgtcagggaaattccataatgaagtagaatgctgctcctgcattaagatttcattgagggcaaggctggtggcaggtactatgaatgtaattcataatttaaaaggaaaactaaaaactattttgatttgggaaaatgagccttaatttgttaaacctatacactgagaactagcctcaggcttaatattctcattgcatttgcaagatctgagcaaataagattaagtaaaacaaatcaattgtatatataattgacctttttgtggaacatgtagtttatagaaagtatactctaaagggaatttgccgaagaccttttactgattgaacagttgtgctacaatcaacttttcatagtacatgacctgcattccacatctcagtctaacagtttagtagtgatgtaaagagaagtacaaaccgaactccagtgctttgttatgttttattaactggccctgtctcaggaacatcttaacagatggcaaaaaaacaaaaactttttttcaactcctatgagtggcaactgaagttcttattgttgggaaagaacactagtcctacctctgccactaatgaggtgtttggaggaggtaccagccatataatagggggtgtatgtgtgaattttgtttaaactctactgtatattgaaatgaaattcatttatttgtcttgacaatgttcaaatgatgtagattgtcttagaatgaatattcataagtactcagaactcttaagatgcagatgccacccgtgaggagctaaattcctaatgtgtattgtattccaacccaattttactggaactattgaataaatcttttattttctttcaggtttacttgatagtggatacattggtgtcagaggaccttgactgggttcattttatgtccagacatcacccctgaaacactgtactgtactatcttgctctgagtagtatcaactggatcgtctcatatttgcctcattcatcctattaatttcaaatgatactgtgggggaaaaacagggttagaaaaacaagtggaaaaaatggagtgatgttgtaatctaaacaagtgccttatgtttattgctaagaactggtgttaccaacccttttgagaagaaagggtctcttgacctgtattaacataggaaagtaaagttctttttgtttttctttataagctactcttgtcatttctcgttgaaaaactaaaatctgactaggttagtttactcagctttaattagatagttgagtcatatattttcaacatttttctgtatcgtatttattatgcacaaaaataaagtgtgatctctaat

SEQ ID NO: 23977 - DNA, 35792 bp, Homo Sapiens
actgttctgcctcctctcctgataccagttcctagcctgggggtgaccccagcctcccgtaacagcctccttgtggtggtgctgggaagaaggggcccgtgtacccggcagggccccccaggcaatgggcatgagcgcaggcagggaaatccgtcagcctccagggacgctctccctacagccccggcgaggggatcgggtcgtggcgacctctccagacgcccaggggctgggcaggagggcgggccaaggcccgcaggtgggggcgccaaagccaggcgggcgcggagtacgtgcggtgggctgcgggcggcatgaagggcgcgggcggccagctccggctccggctccggctccggctcccgcgaggccgggtagcctgggcgttcccaggggtcgcagaggacggcgaaccccggcggagccaccggagctggggaccaggacgcaggcaggcgtgtggagcgtgaggtggggacgtggcggcggctcaagtgggcggagccccggcagcggcccgaggcggagtcgccaagggaggaggcgccgagctgaccgggcgacgccgcgggaggttctggaaacgccgggagctgcgagtgtccaggtgagcgccccgcccgctcagccgccagatcaaccttagcgctggggcgcgggctggggtcgccaggcggtgcgttctgcccgcgcggggctgagagttaggggccggggccggatccggggccgggggtcgcgccgctagccgccagcagcgcagtccgggccgccaccctgcaccctccgccctgtttctgcacccgtctgggttcttgtgccgccgcccgcaagccttcccgagctcagggtggtgaggtcagcggcgcccttcgtgcagttccctcggctgtcgggcggggctgggaacttggccgctcttccctgtcaggctcccgggaagtggcggcctgaccccgggctgccggctgttgggagcgggggcgcggcgtccgcctggccctgaggggcctcttcatattggctaagcccgttctgcaccctcccaagggctgggagtcctaggtcttgtccgggcagggtccagcttggagcccatagatgggccattggatcagaaagtcttttctcccccagacatccttgtggaaccagcgttgtttttccttggcagctgcggagacccgtgataattcgttaactaattcaacaaacgggacccttctgtgtgccagaaaccgcaagcagttgctaacccagtgggacaggcggattggaagagcgggaaggtcctggcccagagcagtgtggtgagcgctgtgctggaagggaatgcgggcagtgggtacttggtagagcactgactgcctccggccagaggacttcccggaggagggtgacccatgagctggagtggtcagaggaaggctggcaaaagggcatcgtggacagaggaacagcctatgtgagtgggagcagagaccttggccaatgccattccttatggccttgtagtggaagcaaggtgatggggaaggaacactgtaggggatagctgtccacggacgctgtctacaagaccctggagtgagataacgtgcctggtactgtgccctgcatgtgtaagatgcccagttgaccttcgcagcaggagcctggatcagggcacttcctgcctcaggtattgctggacagcccaggtgggtccctggcctttgtattctatttgactttaagatggtgcaggagaatacaaaaaactatccgggcatggtggcgcgcgcctgtagtcccagctactcgggaggctaaggcaggagaatcgcttgaacctgggaggcagaggttgcagtgagccaagatcgtgccactgcactccagcctgggagacagagcgagactccatcttaaaaaaaaaataaaaaagagagatggtgcaggagagcattgggatccctcccaagactgtgactgttgtcttttgctgtagagtgacacccgagatttgtgcttcttgataatagactacctggggcctcacagccccagccctcttgtaggaaatcctgtcctaggagcaagggctggagtccgttacgttgtagcttggggcattcttaaatgtcccagactttgtggagatccattgtccacctaagaatttataggatgtttttggggtctgctgcttgttctcagcctgtgtctcatctgacattaggttccataatttagtctctgttaaatgaactaggatttcctttggcttgtacttaaactgcccctgaggtgtccaaggtgcagcctctcactgtggttctgggcctcagcgcccagtctctctggttgcttctccccactcacagaatgtttggtctttgaattcttttcttttagggcctccttgttcttacacagccgagtgtccactgtgtggcccagccaatgaagccacgtagcaaggatggagtgagttggctgggggcctcatcccaaagatgctgtcatactggatcaccctagttctctgagagctcagcaggcagacttggtgacagcttagctgaggcattgtctgtggcatgtgataggcccttgtatcctgtcgaaagctctgcattggggtactctagacagtgcttacttagtcaccggtttagactggccccagctgatctcagttcatcccttgagtgccttctgcctgtttggcttctgactggagcgtgcctggggctagaatgagggacgagagagaggaggtggccgaggcactattcttgcctgtgggtagctcgtactctgagattgctgcttcatattggcagctggccatgtgccaggggaggagcccggctgtgagtgctcatcaaaggaagagactacgtgggtgcagctctgaggaatgagtcggttgagggaatctagggtctcctcatttcctaagaaggcctccctttttcactctgccctcccacatccttgggagggtctgagactggaagcaaggccttggctgatgtgtggccacgctggctgatagtgtgcagagggctaggaggtgtgtccctggctcctggggtctgtcaagagtttactattatgcagatggaagttggcaggaaaagctgtgatgcaagtacatgcaagcccagcagagtgctggagtgagagttaaacttcgggaaagttgctcacatctagcaatttggacatttgaagttccttagggtaagacatcagcctgtcctagagcaaagagggctggaaggtcctgtggtctgtgggctttgtgttacggacatggaatgagagatagaaagacagttttttttttttttttttttcctcagagcagaggagaatgaaaagtctggatgatttactggagccctagaagagagttcttgttcagctggtgtcattgcagggcagaggattaagtgtttgggtagagtgctctccagctcagatggaatctatctgagcctggtaacaggccagcatctgctctggacctttcaggaagtgcttgcttagagtgtggcctgttttgtacctggcactctgagggccagggtgtagtggagatcctcaggcctgggtacttgtaggagcctggaatgagcaggtcagaggcatataagtacatgagttcctagagtattggtccaatcccccgccttttgctagagaacattgcttgatgagctttagagccagtgattgaccagttccagggttatcccctgatgatcaatgtactacattatacctgattccagtctctcctgaattaaatgtttcatttcttgtggtgctcctggaacatggagatcgcccaatttctgccttgtttgcatcttcactgttccctagtctggaccttctttctcacccaggaatcagctgacttgggctgggcagctggctgcctcaggtccactgatgtttctctggtgcccttggtactaatgattgacataaattatgcctagtgcagggctacctgccaacatctgtcatcacattcagtcctccaacagccctatgagatataggtcctagtattgtctctattatatacatggggaaactgaggaatcctataacttgtccaaggtcacaaagccgggaagtggtatagaattggggtttaactcttagtatgtctgaccctagggcaggtgtgcctgtccatttgactgtactgccttgccctgagctggactggctggttatttgtgagtgctgtcatgtctaaggtaggagtgactgcccatctgaacttaagggaccatgttgctgttttctgggtccatgttgcgttcctccctctggtgagatccagccaggcgtgtcatggacctgctttatgaacctttggtgtaacccatgataaagtccttaacctgggcaggcatgttcttcctgggcaaagtgtggcttccctgtttgggagtccattgcactttaaggtaacagattattgagtaggactggatagctgcaatatctagcagagtgtgttttgggtttgactcttggttctgtcattgatttgctgtcagatgtcagatatgtaggaaaccttctctcagcctcaggctgtttgtcatttgtatctatcttatatctgaaatggaggtagttatctagcttagaaggtttgggtgagaattagatagtagaaatgaaagatttttggaaacaaatagtgcttatctcagactatgttcccaggaaacagcctgagacagagcttaagtacttaatgctttattggaaggtgtaattgcagggcagccagggtgagggaaaacaaaagtgaggtgcaggcctgtgcgatggctcatgcctataatcccagcactttgggaggtcgagatggatggattgcctgaggtcaggagtttaagaccagctggccaatatggtgaaaccccatctctactaaaaatacaaaaattagctgggcatggtggcacacacctgtagtccaagctactcaggaggctgaggcaggagaatcccttgaacctgggaagtggaggttgcattgagccaatattgtgccactgcactccagcctgggcgacagagcgagactgtctcaaaaaaacaaaagaaaaaagtgaggtataaaggaggatgggaggtggtgttttagcaagctggctactctgcacagagatgtacttggttaccctatgagggccctttggtagccactggggaggccagtctggtacttcaacagagtctggagatagtgagaggagccagagattctggcgtgggcctggatagtctcctccactgggctgaggcaaagtaaataccctgggacctgggagatgggtgagaccaagaggttgcaaggtgggacgtaagatgcatccaatatagtggtatatggattttatcctcaagtgtagttcccttttgtgggttagtctcatccagactgccaagtctctgccaagactatgactgaaaacccaacttggcttttgcatgtcagttttaacagccttctctgctacttcattgtctagttactgaagcaagactttgtggtggtgatggtacccaggtggggaagtggaagtcaaccactattcatgtaccagactgagaaagtatgtggatagatacagataaacatcttggctttattaggttcttcgtgaaggagaatattttttcacataaagtagttgttgaagatacgaaacctggcatggtgagatgaggctagagagggcagtagggcctggtcacacactcaaaaggaccctttgggctaaagagtttgaactttatcttgacggcagtagagagccaaaggagggctttgataaaccatgctggctactttgtagagcagaggtgggaggaaggccagatgacatgtggagaggccagtgtagtgggggccaggatgcctgtaggggaagttaggggtggctcagatcagggtgatgactgaggctaaggagagtagggtaccccccatacttgcctagggtgccgtggcagcagcttataggcctgaatggacatccatgtgctttggtggcagggtctcctggagcctctggatcctcttaggctgaacacacaggtcctttcagccctgttatcctagagttggaggcagcggggagccgtgtccagttaggttttcccccttcacagaaggcaggcaggttcttgttcagtgccaagcaagaccagtttgttctcagcaagctcatgttctgtctctaggctgttaaatacattgttaaaactcaggctgttgcatttgggttgcagctgggagcttggcagagattctgcctgatgaggtaaggagagaagctaaggacgctgctggtttgcagctggaaacatcttttcatggccatttggccagattgtaaatgtcttttccaaagttcaggtttggtgggacctctggttgtatgtcttggaattgccctgtgtttagaaacagtgccagtcgcctgatgggtgaatcactgttgctgggatgttggcaggttttgcaggactttcctgtgggggtccaaacactagggctggcagggcccgtttggagtctgtttgagaagggcctgctttgttttctttacattttaagcatatgataaaataattttaaaaattgctatagaatttcttgtagaaagattagagaaacaagcataaaaataaaaagaaattatttcaccaagatatagccagatgtatgactcttttcttgcatctctctatatacacatatacattaatttttccttacaaaaatggaattatagagtgcatattattggggcccacttttctcacttaacagtatgcttagatctcttcatgttgatatatagtattcatttttaatatactccataaaaactcattgtatagaagaaatgtaaaatcttctattgttgtagtttcctaatttgaacaagtctgtggtgaagtattttttgttgtgttcctggtatgggacagacattgttctaaactctggggatgcagcacagataaaactcagtattggttttctgctcaagatgtcactttgtttttcataaaagtgggtttgacattgttcacctccagacttattccagttggattctgagggtttctgggagggcttttagcagcactggacactttgtaggggcactcagcaggtacacatactttcacctactctgtcttaagcaagctgtgggcatagttatgagatgggttggaggttggcctttcccacattgtggggcacagtccctctcggatgctgcctcctcccaatctgactctaattagaggactttttgtacagagccttttgagttaaggggcccaggcttgggagaaatggggtagggctccagagtacccctgccagagatgtcagtgttgatgtggtagtctgggagctgctgcttggaggtgcccagctctccaggctagcagagttagttatccccttctcccaccagagcaagactttgcaggctcttggtaggtaagtcatctgtaattacctgtgattctttgaggctctgcccaaaccccatctgtgattctttgaggctctgcccaaaccctatctgtgattctttgaggctctgcctccaggctgagattcaagaatgggctcagtctaagccagatcgcacattccagagaaatcacagctggtattcatgtaatgaagaaacctggctttccctgagtgttgtgaggtatgaaccgtagatgataggagcagaatgatttgaaaggaatggacagacttcctccctggaatttatctggcctctaaaaaggtatgcaactgcaactggagacacacctgggtagagatgctgggttccccacttccaaccatgtctggtttggaacctgcctgggccctgttctcccaccaccccagctctgaggagcagtcagctggtccctttctgatcacagatacatcctcccagctctatgttttcactgtcccctccctacatacatacagaaggtgctgagcctgagccagtcaagccttttgaggaacaagaaacagacacccaatcccttaggtataaggggcttgtgtaagcaagagagaagccttctgaaatcctgggatagagaagacagtatagtaaggccttggagcagacctgtggctagaaccaggagggcctggactctgcctcagggcaagcccaggcttactcactttctcttgatgacttgctctcttctgctgctctaactccctaatggaccccttagcacaatacgccctaccctgcagcaggttccaggttggaagataattgtcctgtgtgtcttgggacccccacacctagactatgacaggaagactgtcagctctgcagacatttggcataggcatgaacacatggcgccattcacttatgctttccttctgatagaggatccatttgcagatgggagttgtggttggccttctctgagcctaacctggaatctcaatggattaggatttcttctgaaagagtaagatgaggaatggtgggtgtgctgtgtgtctaatcaagtatggcgggcaaaaaactgatgaactggcattatcttagacttagaattctgtcagataaggcttatgtttttttgggaaagcatttgtatttcctttgttttgcttgctttgtcttagtgaatttccatttgagcactccagtggggtgctcaaaagcagggcaggaagaagaccggcagagctggggtacagatgggtgctaatcctccagcacagtctaggctgcatggctgagctgggagacggtatcggaggcttctgttgtggactgaggtttactgccagtggggtttgtctcaggttgtgcctatttctgggctgatgagaagacagtagctggcccctttcccatgtcagcagcccagcctgaggttttggccatgtgtgccatattcatttttgtatcctgagtgcctagatcagtgcctggcatctgcaggtcttcagtaaatatttgtgaatgaatggtgacgggccagtgagaacagtgtctgccaaggagccttactacaggaagaacactgtctacctaggagactgtctcctctgactgctctttctctggcaggtgcagactgacaagggttagttttattcctcttctggctggccatctgttgtacaccttagtttgggtgttggtactctggaggatattgtgtcaaattatctttctgttattgtctctcatgtactgttgcctccttgtgggcagggactggttccccaaaacctggcactgtcctggcatatgtgttggaaggtaagatagaaacaaacagcagtctgtgaaataagaaggagtgggccagaatcttggactgacagaccattggaacccgagctgactgtaccccactgcgattccgccttctcatggtacaggtggttgctgggagttgagaggatgggctctctccgcagggcacgtgacttcccagagcagggaccagaattgagcacacatcactggctgcacgctctttgttctttctgctgtttgtcctttttagcttctgtgtgctaggccaggattttgatatgtttgattatctgcatatgtgtgtacatgcctatgtgtctcctcacctaaattagtctttttcactttgttgatccagtgattgtcattgaatgcctttcagacacttccctctgtgaccatgaaactctgggtgtctgcattgctgatggcctggtttggtgtcctgagctgtgtgcaggccgaattcttcacctctattggtacgtgccaacaggactgtcgtctccctgacaccttggctcacatgccacggatgtctctggctgcagcctgttctcatttagagtgggatagccttaactactggttttggccagttctgaggagagtggaactggcagagttgctgttttcccctataagatcccaatgatctggatgttcagggagccagatgtctgaattgggtctttcttcctgggaagtgcaggctgcacttgggctctctggtctttttgaccaccttgcccatggaccagagagtggttctgagcagcaaatcctttgtatcctgaggatcaagcttttcctatccttccgacctaaagttcagagctttttatcctgtggtgagcccccaggatatccatgccccagtgtcatgaccagctatgtaacagtcggagaatgagatttagggctgcttcttgagtgacatccagtgcacttatctcaaacatccccttggtgcctctgcctctttcttcctgaagttgcgagatagagccccatgagtgcctaggccccctttaactccaagtccccataatcctcagagagctgacatgttcttatcccaggggacttgcttctgtgctggtattctgtgccccaaggaaggaggctggacatccctcatctgtttctcactggtgtctttcttctctcccttgcagggcacatgactgacctgatttatgcagagaaagagctggtgcagtctctgaaagagtacatccttgtggaggaagccaagctttccaagattaagaggtgtcctaagtccccaaccatccttagttggccttccttcccttctgcccctcaaggaacaaggaagccatccaggtgcctataagaggaaacctttgagagggtgatgtggggctggcctggttacttcatgccagtgcttgagaggagctaagtacatgggctaaggagtcactgtttattttctatttaagaccttttcccttacattgggggtcccagctgttatctagattaaggggctagaagtatctgtggggagttactgtattcatttttcattgcctcttgatgaaaagggccccagaacctggcaccagggaattctcactaggaaaattgtcacaggtcaagacctatgtgggtggacgcattagtcttccttttcctctggttccacagctgggccaacaaaatggaagccttgactagcaagtcagctgctgatgctgagggctacctggctcaccctgtgaatgcctacaaactggtgaagcggctaaacacagactggcctgcgctggaggaccttgtcctgcaggactcagctgcaggtgagggacggtgagcaggtgcttgagtgagcccatatgtttgtgtgctcatgcctgggttgttgtgtctgagcctgtcttgggtctgggtgttggtgggcaagtacattgtggaaacaggaccctgctggtctcatggctctctcccttctctgtggggacctggaagttggctggccttggtttttaacatgtaatgatgttcagttctttttttagcgtcttttttttagtgtctgtcttttcttattttttgctaatgacatttttccaattatactttagtgatacatgtttatagaaaagtcggaaaacacaaaaacaagagaattataattcttaatccagttgcccagtggtgagcattattaaaattgtagtttttctacctatgcatatacatttaaaaaatggaactatacatacataccagggcatgcaaactcagttgcttggagggacaatgaatttacaagtgtcaagtgggctggatggtggggccagggcaagttggggagcataggtctgatctaaattcattcctattcatatgttttacaaacaaagcatatctgttggtagatttgtgacagaagaaaaaattctgtgaatttctcagcttctttatatgccattcaatgttcttctgcaacatgattttaatggctggatggtgattacctgtcagatggtgataatctgtcatactgataatactgtcaaatgggtcaagtcattggatatgggattttttctgaattatcagcacctttttacatatttcttggtgtatacttctgattacttttttagggtaagttcctagaagtgatattaccgatgagagtgtgaactttttaaaagctttaaactatacttggtgcttttattgtgataatactttttatgccctaatacttttctgtcaataagaagagatggtacggtgggcctggaggtgggctctcctaactcctagccctgggtttagtcccctggactcactgactttttttttttttttttttttttttgagactgagtctcactctgtcaccaggctggagtgtagtggcgggatctcggctcactgcaacctctgcctccgggttcaagcaattcttctgcctcagcctcctgactagctgggactataggcacatgccaccatgcccagctaatttttttttggtatttttagtagagacagggtttcaccatgttggctaggatgttcttgatctcttgacctcgtgatccacccatctccacctcccaaagtgctgggattacaggtgtgagccaccatgcccgctgcctttttttttttttttttttttttttttaaagggacagggtctcactatattagcctagactggagtgcagtggctattcacaggtgcgattgtagcacactgcaaccttggactcctggcctcacgtgatcctcctgcctcagcctcctgagtagctgggactataggcacagtgccattgtacccagctcttcactgcctcttttccctgagctgtgagtgctgattaacttcagactagctgtctctctggctgagacattttagcccatgtggccagactgggttgggcctgggggcagggtggcctctggagagggattggtgagctcagccaggctggagctgtgcccagtgagctcactgcctccagaaaccacggctgcctttcccagactcccgcctctccgcctgggcctgcagctcgggacaggctgttctgcctgcacggcaggagactaagcctacccagatgacctcctctctccaatcttgttctccacaccctacactcccaccatcatctggttcctttggaaaaccttatgattacctggaaggagatagggcaggcccagagaataattggttgttttcatctctgactttgagttcttgcccctgaaacgagcagggcatgctgacagtgtggcttttcctggcagcatgttcccctactcccaccccaccagattctaaactctttagagtccctgaccatgtagctatgaagacaaggaaggcagggttacagcttcttggtccctgtccccagttatggctgaagtggatgtttaggtctgaagtcataggtggcagtggatacagctactcttgggaagaggttggggaaggaatggccttgttgttcccctctcacttctcagcttagaggcagaattgaaggccctaagtcagcctgggaaggcttggctcccacctgggattgtaggaggtacacatcttactttacagctagggcttggagtcccagaaaagcctccttggagtacttctgtggtcaaaagctctcccacgcttcaggctgtggtcttgagcaccataactggagagcccatgccctgaactcattgaaggtctgagtggtgggagtacagaggagaacaggcccaccgtggtctcttaggggacggaccttgctgggttggtgcaaccccaccttggtccttggcctgtctaggtggtccttcagctgtcaacctagggggagggggatgacttccaggactttcatcatcacctttctggatgataagtgccagtggtcagtaatgagtggccagctcggcttcattagttaactgtcattgtcccttggactcctcaacttgaaatgtgtgctggaagtctgtgtttacctgactagcccaattaccctggatcaaggttttccatgggatttattttccactgagtggttgacagttcttcctgagtcctctcccgtgctcttctcagttaccctctctatcctctgtttcttctgtctccaccagctctgactgaatgatttggagccaagacttctggactcctaaatattaaccaatatggggggctgcttctacttagttccaaagagcaacacaggcagtaggtatggtgaggagtaagaaaggaaaagtccccatagactggagtcatcagggacaacttcctggtggaagggggcaacagcctttgagggagggggcggggaaatttcactagccagagaccctctttgtggctgcctctctggtcccaagtggaattctgcccctggatcaagggtaatctcttgttctgactctcatttggaaggttttatcgccaacctctctgtgcagcggcagttcttccccactgatgaggacgagataggagctgccaaagccctgatgagacttcaggacacatacaggctggacccaggcacaatttccagaggggaacttccaggtaactcaccactccaggcgttgcctgtcccgcatgtgtctctttagtggcgggacaggttggagccaccaccaacttgtggcctttaacctcgggtgcacctctggtgcacctcttggctcaccagtttgtgctggactccctctcccatgacaggtttctccctcagcccctgccctgccacctccctccatgtattagccaaggccctctcctcttgcatctcagagaaagccaaagttgctgctcaggaaccccctccacgtctgtccccagagcaccacacagatctgcattcagacctgcttcttgtctcccaccctccaatgtcttttcatctaaggctgatctgggcttactatccccctgtcttgagtcctcttagttacagtctctgctcctatacattctgtctccacctctctgggttctacccttgagctcccatataggctctattcttgctcatcttaacacttgcctccctcggtatctgagagtctttcgagtctttgctgctgattcatctcttctcccctcctggttaggctactggatagagtaatctacactctgtccattttcctggttcccatatactcctgaactcacagtatctggcctttttccccactgtcactgatgctgttcttacaaggtcatcagtggccgcttggctggtaaacccagcgaacaaggttcacacataatgttctttaacttcccagcagcatttgacagatagattgcctcattctttgtgatgttctctcctcctttgaattctggcatactgatatctgcttctcttttagcctctctggtcattttctctcaagtggcccctctcccactgacttcccagtgttagtgtttataagaagatgttttgagggctgctggagacaagtaaccccagcgattcactgtgtgaggctcatgcagacccagcttattccagctccagaacctcagctgccccctttagactccattagagagagggcagttcagggcacctgcaagatctgttcactctgtagccttgagattggttgcttggaggagggaaccataccctggcgttgacctctcacgttcactcagcaaacccatgagtgtcctgaatagggttatggggcagaaaggaattactccctaggactccatccttacctcatcttctccctgagcaccttccccaggtgagcacagccatttccatcacctgaggtggatgacatccagatctgtgtttcttgccaaggcttgtctcccgagcttctaaccagtgtagacggatgcctttgggacatctgtacttgaatgtcccatggacttctcgaacttcatgtgtcctgaactgaaatcctcatctccttgtaaacactttaccttccccctcatccttctatctcagcaaaaaggacctccatcctctggctgcctaagccagaagcctaaggcctatggattctacctccttctctcatgtcttccgtgcttatcccctgactccagcctcacagctacttttttctcaatttgattatcaaaataccattctgacttgtctcctacctccagcttactgcttaagaccatcctccatgtggtcttaagcacacatttgttcacatgagttcctgattactgtgcttaatttccaaagctaaacccaaactcctcctgtgtgtggtctttggggtcctgcatgactccattttcctggcttccttgcccattgtactcagctttccctatcactcagctcttttgtctcaacccctctataggaatacctttacccatgtcagctaggctactccatgtctgattgcctatcagcactcagctcagctgtcactctcccaaatgctctccagggagtagacattcgagttggctctggggaggatgctgagtgccagggagccattcttagcattcttggcatctgggagacatgttgataatagctactggtcattagcatcctggggagcataggagacatcttcatatgtcatcttattgaattcttgccacaagctctttaaaattgatgatattatctttatttagagataaggggactgagacttagatatggtaacttgtctatagtcacacagctggttggcgccctagtgaggccaacacaaacctagtttagttcagctccagagccccagctcagtcagctatgttactctgccccagcaatgtaggttcctgggcctgcagagccagaggagacctgtggagaaggaaaaggggctccaggagccccccagtccctggcctacctagggacttcatcttgtgtttactgtccccaacttcctattcctcgttattggttcctgagccaccggggttagcagaccctggtctctgaagcatttagcctactgtgtagtggtttcattccaggcagaaagagccttctctgagttcttttgtgtcagccatgcccaggttgctgttaatggggctgtggggagtcttccttgctttccagggagagtcacagcccccacttcccctccatggtatctgctttctcattattctctgaggaaccacacacatagtctttcccatcttgagctcaccctaaatcctgcatctccctatagctgcttcttcatattggcttgaaactatcttcatggtcactttccagcactccctctacagcagatgacctttggtcataagacccactgaactgatactcagcaaggtccctgccacttaacagccaaagctggcactgcaaccttggctcttggcctcccttggtgtctctcacaccactcccgctccctctgtttctcctatctttagttcattctcagggttattcattgtctgttctttctgggtaggtgctccctggagctctggccttagtcatcttctccattctttcctcagagttcctgcaagctattttcctcacccatggcttggttgccacctaaatttatgttttttatattcagctaatttttccatcctctagactcatatggcaaactgcccaccagacatcttcttctctgtggtccacaggaccttcccactgtcctcaacaatgcttcctggtgggtttctggggctccccctaaaaaggccccttcccacttgggagatggggaatctgaggctaagaggtggctgtgaaccccagtccagggcagggctgggccatctgtctgtgctcactgtgtcagtggccctttaggatatgcagtctaaatgtccgatggagttctgcttggtgatgccccctatccagtggctcaggctttccttgaagtgggaatctctttccctaatccagaggctctttggagcctgacaatttacttcccctgctgtaggaaccaagtaccaggcaatgctgagtgtggatgactgctttgggatgggccgctcggcctacaatgaaggggactattatcatacggtgttgtggatggagcaggtgctaaagcagcttgatgccggggaggaggccaccacaaccaagtcacaggtgctggactacctcagctatgctgtcttccagttgggtgatctgcaccgtgccctggagctcacccgccgcctgctctcccttggtaaggagattctaggggaaggtaagatgggaatggagagtggcagaggaactgcactgtgctggcatctgcctgacccctctcctgggactgagtcagtttaccctgtcacttggccagtgactaatgccttactgactttaggaccagtccagcttcttactagctccttacccacctcaatcctggccttaggtttgcgcagtcgctgatagatacgctcaggcctgtggcacttgtgggcctttttaataaggactctgttatggtgtatctgtcaccatgcaggactacacagggtggaacctttactacatcaggagcagctcaggagtcaggttgtactttaggattgttacagtgacaaacagtagcggtgctattagaggcctgaggtctaatagtaggacttcatatggcattgatactttgtgtgccttgtgctgttggactgaagaaggccaaaagcactgtgcctttaaaactcatctacctttttttttttttttttttgagacagagtctcactcatccagcctggagagcagtggcacgatctcagctcactgtaacctccgcctcccgggttgatgagattttcctgcctcagcctcccaggtggctgggattacagaggcacatgccccatgttgtattttctttagtagagatgaggttttaccatgttggtcaggctggtctcgaactcgtgacctcacgtgatccacccgcctcggcctcccaaagtgctgggattgcaggtatgagccaccgcacctggcctctgttggttttccagttacgaccagcgtactctggttagatgctgtggaaggtagaatgcagcatgcaggtgagctgctgggagagaaacccttacagaataatttctctaaatgacctaacagatgtttgtggtttccttttccttctcattccttgcattttctagacccaagccacgaacgagctggagggaatctgcggtactttgagcagttattggaggaagagagagaaaaaacgttaacaaatcagacagaagctgagctagcaaccccagaaggcatctatgagaggcctgtggactacctgcctgagagggatgtttacgagagcctctgtcgtggggagggtgtcaaactggtgagatgtgtgagggggctagggtgccaaagctgtggacctggactctggctctgggcaggcagatttggggaaggtgttctttattctgtaggtacttttctcagtatatcccccagtttttcatggcatctcctgaggctgacatgtggatattctctgaggtgtaggaaaggagactctctcccctcgtgccccaggtagagtgttgctcctctaagttaccagtgagctcgcctccttaccccaatatgtcccactttttgcttcactcactgttgggaagaaaacaatgggtggacgtacctcaggccccaaaagaagtcatggtataagtggagagtaagtctctgtggtaaagacaccagcgtgtactagagcttggtatcgagcctttgagagccctgggatcctagtgcttcctgaggaggcccaggtgtgacaggctctgagccttttccatgcccctgtctgcatggcttctactggctcctccaccaagaaaggtttctcccctgtcccagcccttcagacctactcaagtcttcacgaaaagggtcaggaattactttctgccatgggacttgaggatgtgaggtgattttgggagagaagaaaaattgcatgatttgtggggtgttatttcatgccagttaagctgaaggggctctcctctcctctcccctccccccattgcccccctctcctcccctccccccctcccctgccccctgcccctccccctgcccctgcccccttctcctcctctctcctcccctccctccctcccttcctttcttccttcctttttcttctctttttcctgtttcctctttttccttttcttttctttctttcgtctcaccctgtcgcccaggctggtgtgcagtggtataatcatagctcactgcagctttgacctcccagccttgagcaatcctcctgcctcagtctcctgagtagctgggactacaggtatgcaccatcatgcctggctaattttttagagacaggtctatgtcatctaggctggtcccaaactcctggtctcaagctatcctttggccccccagagttctcggattacaggcatgagccactgtgcatgcccacctgctgggacttttgttttcttctgtggtgtggtgggagggagcagctgctggccatgaggtgagtccagtgtctgcagacagccagactgggaccgaggattaggactcactcagctcagggcctgttactctgtgctttccagacaccccgtagacagaagaggcttttctgtaggtaccaccatggcaacagggccccacagctgctcattgcccccttcaaagaggaggacgagtgggacagcccgcacatcgtcaggtactacgatgtcatgtctgatgaggaaatcgagaggatcaaggagatcgcaaaacctaaagtaggtgtcactgtaggtccttctcgggtcactgaagggggaaggtcctttttctcatccctagcactatgggtggttggtttgcccatctagccaccctttatccatatctagcatgggcctaccgtggggatacagagatgcttcagactcagcctgaccttgtgagttcatggtccagtggaagaagaacagggtaaccaatgtggacagccaagtgctatcatagaaggtcacgctgggaacagggcaggtctacactggtgtgtcagttcacctggttgggagactggtgcgtgggtgagttttttggaaatgttccataggatgctatgaagctgggtcctgtggagctcctgattaggactgtaaatgaggtgaatgacttagaggagaatgtatatctttataatattgggtcttctcatccaagggcatgacaggtctctccatatctttttaagttttcttcatataagccttgaacatttcttaagtttattccttggtagtttctttgttactgttaatttactttatttcttcattattatttttaactggttacattattttattagtttactattatatgccaaactattgattttacaaatacatttcatagtaagagctaatgtttactgaattcttaactgtggcaggaacttctaagtgcttaacatatatattaagtgttatgtcacagttatgaacagctgctcataatgatgtcactgtctctgttttacctatgaaaaagcaaactcatacagattgcagctagtggttgaatttacttatttcttttttggtttttagctgatttctctttggttgcctggatagcattaacacctggaaataaggaaaattttattttctcctgatacttgtagttcctttgtttttataaccttattgaattgcccagaacttctagagcataattacgtagaataggcatccttgtctcattcctgaatttcctggaaattcctatggtattttactgctaagaatgcagttggctgttggttttgtatatatgccatgttttaaaattattcttctgtttctagttcataaaagatttgttccccatttgacatctttcaaagagacctatttgctgccatatcccatcactgatgattgggagggaggatttagctcgattctctattgctctgctcctaatagaattgtaggggccgaggtgaccaggaggcccgacactcatggagagacctgaaataggttcctatcctggcccctggacctcatcttggaacagctttggcttgaggtactaggacatctagggctttgagtcagtggttggcatcatcgatgtggctgaggaagggggctagccagatatatggagaatggggactaggactcccctttctactcagctccagagtcctccaggaaagaaaactactttgttggttgtgccaggatttcctgagagatttcttacccgttcttcagttccagacactgagaacatttctctgtgcatgtgtgcatatgtgtacacatgtgtgtggctggccagggggtagtgttaggaaaagatatatttgaatagaagccatgcaaagagccaaacaaggttggcaaacatgtttggctcttaacatggcttctattcaaagataagctgacccctcctttccggagactgtgagggacagatgctattctggctttgaagtagagccaatgagcttaacttggcctgtggggaatgcctggcagctgtctgtggggtctctggcctgctttcaaaatagccctgtgcttcccctggggcagagcacagctgctcagagcctctttgtgggtgtcaggccaatgctgaggcacagatgtttggatggggtctggctgtggctgcagttttcagggagggactgacatgagctgaagctcaggaagggccatgagtaggagcttgggagccgtctgtcctgcttgtgctggccatcttaccagatcatgccatagcagcacagtgtccaagttggtccatctcacccccttactagccttctggtccatctactcctctccatcccttctgccaccacctggcccgggccaccatcatctcttgccctgacctctgtcgtggcctcactagcctcccagtccccactctggcccctcattagtcaactctccatgaggtattcacagtgatccattttacattcacattttgagtgtccctcccctgcataaagccttccccatttctcgttggccacaaggttgcatctagttcctagcccctgcttgtctcttcagcctgttctctcttactacttcccataacctttaatccacacctactgcaacacccattttcattcccaggcctctggattgctgctctttccctgttcctgtaatgttcctctacttggataactcatgttaacccttcaggcctcagctaggtggtctcctcccctaggaagctattcttgacactataccctgagcttccaaaggatggtaagttcacccatgctgtgctgcagttacctgactggttttctgctttccccacttgactgagttgtaagagtgcaggggccatgtctcagttacctagcatagtgccaggcacaaagtaggcactcatcaatatttattgaaatcaaggggaagtgtgttggggtgggagtacctgggcctatggccccacccatgtgaggtcatgaggacagtccacagctgaagcacatggacctttgccatgttggctggctctgggcggcgagtcccccttggggtttcactaagcctaactgtggaggctgggggagatgaagtagatgcagggagtgcatgtgtagtgtgtacctgtatgagtgggtggcttccaggcagtggttcacttattttaacttacagaatcttttcctggttttatcatctgacttgtaaggatcccaagggagcgaaaactgtgccatctgtctttgcttcttgaggctgtgggaacccagtgtgaggtggtgcagcaggagagtgtttggatgggtttcttggcagaggagcccactgaggttcggaaggatggtggaacttgactcaattgagagaagtacataaggcggaggctcaggcatggtggcacagtctgaaaatggtgggagtagctaagctcaggcaggctgtgctcaggcaggggtggtatgtgggcctggcaaggaaaggggctagtcaggcagatgcatgggtagacaaggcaggcataattctgcaggcaaagcggacctggggaggagaagggatgagcagtgaccgagcagggcaatagccagaaactgattgcggattgggaatgtggaggcctcagactcttgccctcaactggcctgcaggatcttggggccttggctagagccattggctgcaaagcttcctccactagcatggcagtaaatctggtcccagtgctctctgggaaaatattcaaggcaaaacaaacaaacaaacaaatcaagtcttccctctcctccttccttctagcttgcacgagccaccgttcgtgatcccaagacaggagtcctcactgtcgccagctaccgggtttccaaaaggtaagcaaagagcaggggttcgtagctgctcaagccccaacttcaggacttctcagtgcctaccctagggatgggtggcttgccttttcctgcctgctggcacctcctcacccccttgcagcaggcatcctgtactgcctgttcatgctggccctgactctggggacagagttcaggacctcatggaagcctgcccttccgtcttcttttctctgcccttttctttttgcccagctcctggctagaggaagatgatgaccctgttgtggcccgagtaaatcgtcggatgcagcatatcacagggttaacagtaaagactgcagaattgttacaggtacagatagtacctgggactgtaggagttgggaagtgggtatttgtggctagatggtctcacagggtgtccagaactgggccaagaggcccaactgtatgactactgcctgatgctatgaatatggagtgatctcattttaggaaaccagaattaatcatgcctgctggctttcaacaattagtgttcaacaaatatctattgagcatctgctgtgtgcccaagtgtgctgcaagctagggatcaggggtagttatggtaggttcgttcatgtcttcttgacaacagaagctcaaatcctgaatggtctcagggacatctctaagagagctaaaaatgacttcagaggccatggttctgtgtcataatcaaatacatttgaaggtcaaagtattctgtgtgttttctcctgctgaaccacaactgaagttgctccaaaagcagcagcaggggacttcccatgagggactgccaagatggggtcagttgagaattcaaagaaagcggcactaaacccctgggtcttcagtccacagcatttattagggaacttgcagagtgggctgcagcaatcctcaaaatggacagcaagagacaagaattgttttacctaagtatttccacagtgagggagtcagagtgtggagtttatttgagggtttagggaatttggttcagggctggggctagtttctttcagtgttatgggcaacaacctaaacaccttcatcagtgcctgggaatgttgaagactccagcttgtgttccagcctgaagggaaaaacctgcagctggctgggtcacagagctgtcaagggagtctgattttcagtcagaacaaagaaagaaaggcggggtgggtctgggggaccttacactgtgatatgtaggtggaagtgagaggcctggactggttaagctggtgcaggtggaatgttcttgtccaagtactcccactgggaccctggcttcctgcctttattcagaggtgattttgaagaaatgtggcagcaccctgctgaaaggttttgggtaaagctccttattaaagtatcctcttgggtaaagcttagtaaagtgtcctcttgggtattgagtccaaatcagcactggctatgttcccttataaatattggaacttctgtgttctgttgtaaaattgatgacctgagacaccatcagagaagtttcactggcatctttctagaggcctctgggtctctctgtttggccaaagtttctgtatacttaaagatagcagcctttacctttaggattggcatttgggtctgatctaccatagatctcattagaatattgattaaagatcatttggaaaagattttttgaacttttgcttggacacgcctaagcaaatcagccttctttttgttgttttttctgtgtagctgcatcagcaattggaaaatcaattttgaaggtcatctttatggattggtgtgaagtctaccagagttttaaaaagcatactgattaccttgcaaatagtactgtgaaattttaatttttttttcagttcagctcaacttagtgttttgtaatttttaaataaattctgcagataagcacatccatggaggacttctgcctcatctcccacttgctgcgtatgtgtaagagcaccaccatttcaagagtgataggcactcttgatgtgctagatgagtccctgttggcattgtcttgattcatatcttcttggagcaggtttttgtttttgtttttaaagacatctgccactgcttcctctgtgttagagccagtcttcaggactttcatggtcctgatcaaagaccacagtctgcttggctgatttcataccctggaccaagaggctgagtagacaggacctgtggctctgttgctttcctggctagctgtgcggctgtactcactgtatccctgtcttacactcacccgtggaagatagcagcttcttgcctatggactgacttctctgctacaattcagcctttatcttgtctggcctctcattgtgttgtagctcaattgtctggggcccgaatgccagacctcttggtagaggggctcttatagttaaggatcttctggaaattcagaccacagctgccaagtggttgagatgccatttttgtttgtattcttctcctaggaactgtctcgacatttcctttgccagtcagtggtattgaaggctttgatccttcatggtctggggaacaggaacctgggtttcagcatgtatccctaagtgcttactccatatgaaatgcttgtggtatgatacatgcctaggcaccagcaacagccctcacaccaggtcctttaggaaatgctgcaggcctctggaaaggagctggttcttctatctgttgacattctttcagctgtagctcacatgtttgctgtagatcatttgaaggaaaaaggtaattgaggctttctggtgaattggatgagggcttatctgatagagaggaagagatgctacacctctaggattctaaagattgaagactttggctgcatgatgtctcagcctcaccagaaaagtgatttctgacctttttaattttgcctttactctgtccttagcattgtaaatacccacatctttcaaataactgaccccactcttacaatagtaagtctaaagatttaagtgaatacctcctcacatgaatcggtcttgacgtacagtttcttgttattaaaggcgtgagcctggggacttgagtatgcctggatagggaatcttactgctgcaaatctagatggtcctatgcattttgtacttatttgggaactgtattaaagaaagtaggtacggtggcttcagaaccataatcaaatataattctccaaacctaaaagatgagccagctctcgcaatgcagcttctttcactgcctgggatttgtaaatttaagcaatccatttaacaagtggaagtattggaaaatgcagtcatactttgcagctccagcaacaagcactaattgaattttcctgagtgtacctgcacagcagtcacagttgtgtttaaaattttcttccatgccaggtgtcgtggcttacatctgtaactcagtacttggggagaccaaggcaggaggattgctcgaagccaggagtttgagaccagtctgggcaacatagtgagactctgtctctacccccactccccccaaaaaaaaggagagagaaaaaaattttcttcaagctcttgactacaaaaagagatatgctttctcagctgctctggcacttctctccttagatgcatctccagccttagggccacctgctgaaccaggcttccttgtgctgttgacaggatttccaggtatttttggtacaggaatcttaaaggctgaagcaatggatgacaacatgttttcatccatgctttgtattaaaatttttatttttgtagacatggaaaatgatactgccaacattttgtgctctaataagaggatttcatctcttataaagtccactgtccctttctttcttgcatttctttttttgtgtgtatgtgaaacagggtctcactctgttgcccaggctggagtgcagtggcacagtcatagctcagtgcaaccttgaactcctgtgctcaagcaatcctcctgcctcagcttcctgagtagctgggactacaggtgcacgccactgtgcccagctaattttttcattagtagagacagatggggtcttgctatgttgcccaggctggtctcaaacttctgagctcaagcagtcctctcacttcagcctcccaaagtgctgggattacaggcgtgagccaacacgcctggcttctgtcccacgtttttataggtctctgttattgctagttttgtagcatctctcacctgactgttgggattgcagaaaaggatatacaaaaaataccaactttctgagaacttatggcctagccccagaggtttttatgttttcagtgagacacaatagccaactgttcccagatggacattggtggtgctacttgatccatcagcttccatgtcagattctgtgcttcatctttaaccttgtctctcattctgtctactgacgctgagacaataattgtgatttaggacttcccattgtgctgataagctgtccacaaaggcatttacaatttctaatccaatttatgacacctggtagttgctcagatgttacttcaggtccagggtcacactggggttgctgatgtagcacggtaattcttgactgcctggcagctggccacccatgttgtgctgtttcactccatgcagtagaccactgtgggagtctgccccactcagtctcaccaggaatagcagaggtggtaggaacagtgccaggtgctgagtacctccaaaactagtttaaaaaagaaaatcctcgtcttaaatttgttactcactttcctctggattactttcttaatatgtcccaaacaaactgggtccaggccagggcccgcctcaagcagtgttccctttgctgctgtctgagtgtccatgaagggctggtgcttttcctcagtgatcatatgcagttcacccatcttgttttgtttgggaaaccacatttgtgccgcagccttactcttggacagaactgtagacttgtttgtgatgtttgctctgcctgtgctgccagggcatggttgtcttccaccttagagaggctgctcttgggagttctggttgttttcaggcctgggaagatggtatccctagagtgattggctgctacagagctgttcatgctgcttacaaggtctaatgctgttatttcccacaggttgcaaattatggagtgggaggacagtatgaaccgcacttcgacttctctagggtaaggcctaaatcacaggtgctttcaaagggccctgctctagctgatttgagaagggtggagcttctaggagcatttcagcctccacatcagtacccccaccccttgtcctccctccacctctgcatcaccaggggaaactcttcgttactggtgaatcccaaatctggaaccaagggtcctgcagaatgcagtggagcctggctgtctcccctgtagatgtggggcgttcgtcccctgccctaattctgtcaccctttgccctgattctaaagcaaagagcctcactaggtctttgtgaaaactgttcttgtcccttttcctcttccccgtctactccatgccctagccagaatttactttgcagctttggcacatattccaggctgatttatggaacacacacttattacttttccctgacccttttggtcctagtcttgtgggtggtggatgaagcctgttgtaaacttgggtgaaagttgttgtctgttgcagcgaccttttgacagcggcctcaaaacagaggggaataggttagcgacgtttcttaactacgtaagtactgggtccaggcccacctgttcattctcacttaattttgtagaatgatgagcgagatactttcaagcatttagggacggggaatcgtgtggctactttcttaaactacgtgagtatgatgtgtgctgatgagccctaaggggaccctgggtccagagggctgccttatatcccacccccatcagggctgatctcatctgctgttaagtaatggtcaggtccttctggctctcagcacccttcttggctgcagtagggagagttggcctctgtttctattcattttccccactgccaccagcaggactttaacattcctggctcctatttttttccccagtgtttaaaattgtgataaaacagacataacataaaacttaccatcttaaccattttttaaatgtacggttcagtggtattaaatacattcatagtgcgcaagcatcaccaccattcatttccatctattttcatcatctaaaactgaaactctacccattaagcaataattccagattcccctcctgcagctcctggcagccaccattctgctttctgtcgctgtgattttggttacttaaataaatggaatcaaagtattaacacttgtctttttgtgtggctggtgcataatgtcctcaaggtttatccatgttgtagcatattctggcttcttcttcttctttttttttttttttttttttttggagatggagtcttgctctgtcacccagactggagtgcagtggtgggatctcggctcactgcaacctcagcctcccaggttcgagtgattctcatacctcagccttccaagcagctgggattataggcgctagccacaacgcctggctaatttttgtatttttagtagagatagggtttcaccatgttggccaggctggtctcaaactcccgacctcaggtgatccgcccccctcggcctcccaaagtgctgggattacaggcgtgagccactgcgccctgccattctggttcctttttgatgggcccagtgctagtctggacttttgggatgggtgccctggagggttccctccttggcatcagagtgaggagatagccttagctctctctagatgagagctgcctttgtgttctccaaggcttaatggcctgattcccacctcttgcctctgttttatccataggttgtagggtttatctttcacatgaggagcagtttcctctcccctctgctgagagccagctctaaagaggcatagaggcagtaaagtaacttggagacagaagcctgtgtccattttttccctttatgcttttattgtgtggttattacatgctggggattgtgctgtgtacatgctggtgagcagaacatatgtggtctctcttgtgcttgaggtccaatatgagagacttattttaaacatcagagagattcttctttatctttttttttttttttttttgagacagactctccctctgttgcccaggctggagtgcagtggcgctatctcagcttactgcaaactctgcctcccaggttcaagcgattctcctgcctcagcctcccaagtagctgggattataggcgtgcaccaccatgcccagctaatttttgtatttttagtagagatgaggtttcaccatcttggccagactggtctcaagctcctgacctcaagtgatccacccgccttggcctcccaaagtgctggcattacaggcgtgagccaccatgcccagcctaaacatcagagagattattatgtagttatggagacaggtgctgtgaaccccaggcttggggttcagtggaggcctctctttggaagtaacatatcagttgagacttaaaagttgagtggaaattagctggtagaacatggtttctggcagaagagagagtgtatgtagtcctgtaagagaaaaggaacttgggatgttggaaaggtagaaaaaggctggtgtgtctggagagaggctagtgagactgacagggccttggggttctagaaaagaatctgagtttgatccacagggctgtgagaagccatcagagcttttgtcttattcatttaccatatgtctgtcaagtacccttcagtgagtctggtatgtgtcctgtggaaatattttttacctccaatttttattaaattatggacaaaaaaagtaagagagccagatgggaaagaagtagtgctttggccatgagtcaaggcatgctctgtgggcatgagtacagccttgctagtgtggaacttgtgttcaatgtagtttaaggccttaccataggagaaagcagggcctctagagacacagtgccccacccttccactcagttggccccaggaagggtggctactctgggaaggtgaaggtctgactagagcagcaaactactagagccagagaaacagagctgcagtggggactgcacatggtgttggaaacagtacagagctcctggtcagggcactttgcagagtacagtggcttaggcaaggccaaggctagatggggattcaaagggtggggtcagaacaggcattttctgagtacagactcagattattttcatccagggacagcccggatgtgggtctcctgtgggcctcaactcttgaacactcatgacatggagactgttctaatgaatcacactggttaagtaggcatgggaagagcctttcttggctaaagggctggccatggagcagacaccaagtagtgtcactcatgctgagaggagggcaatctatataccttgtcatgtcctttgtggctcaattgctctgagagccttgggtaggagggtcaagctctatgtcttatatttccagatgagtgatgtagaagctggtggtgccaccgtcttccctgatctgggggctgcaatttggcctaagaaggtaagttctgattcttgtgggtcagaggttgaagcaaggctcagactttactttgtccatgtcccccagtaccattacctggcctgcctgattgtcactgtgatgtgccttagcccacctggggtctgacctggtagcccagcttctccctgtgaagaaaggacagggagggaagtcccttcaggggcgggtgagttcccagacttctacctcagaaaggtaggtgctttctgggaaatgtctctgttgctggagtcccagagccctatcccctgtccatgggaaaatgagggtgtttctgctcagggcagagcttctgtgatgcttgcagtcaggtccctgagcacagtctcttaagaatgtgttctgaaaggccatctctttcccagggtacagctgtgttctggtacaacctcttgcggagcggggaaggtgactaccgaacaagacatgctgcctgccctgtgcttgtgggctgcaagtggggtgagtgtcttaaggggtagtgttggtgttggtggcctcagcttgggctttgcttattggccttagattctgagctgggaggcaactgctgccaaatttgctgagactgtctcccttcttaggtttttttctgctgttattaccatccagccatgtaatgtccatgcagctggtaaatgccaaggcagctggttggaaacactcagagatacacaggaagctgaagaaggcctgaggacgaatagctgcataagcaccataggtccaggaccctctggcaaggcttctgagggagcagagtggagagctggaagcagtgaggggaaagagtgtctcaggcaaacaaggcccatatggatggaggcacaggctaaaaccagcatacgggtgtgggggctggctcccttgtcacttgaagaaagggaggcctgtggcacaggggccagaagatgaggctggaggctgggaccaaactgcagaggctcaagcttgagccttatcctgggagcagttgtggtgagcctcggagaggctcaaaccaggatatgacaggaagtgtttgtaaggagatgagtgtgtagcccccttggagagttttgaagataaatagtgataggtttgcagataattaagcaaatggaaaagaaaacaaggcagttgctgaattcaggggaaaaaaagttgtacaagaaaggaaatgtaagtataatctactagatggctcaggtgtaacacatgatataattatgtacacactgagtattactttaactaaaacttatgatttacctgtactggaaaggtgggaggggatgagtttgtgttttaggggtagaataaaagaattccaaagttgaaagtcaaggaatagaactataagcatcttatctagaaaaatgaggttaaatatcagaagaaacagctagaggagtttaatgttccctgggagtggagattagggatgggaaggagaggcttaggaggagtgctatttatcattataagccttgcgacaattttatttttttcaatgaagtacatgttattactttatattttaaaagctctgtgacttcagtagtgcattgaaataaaatttttattcattatgagagagtctgtgaggaacagaatcatggttcctgtgtgtttgaagatatggcgtggggtgatagtgctggcagcagctctgttgctcttgtgcccatggcatacagactggatctgctggtccacggctcctgaggttaatgtccaagccctctgcaatgctgacagtcttcctcatcctcacaccctacctctcagtttctacctgccacctcccagtaatattaggcctcttgagtccccaacacacgtcagggtggcttctgccttgattactttctcatcctgttgtcactcctgggaccctcttggtgagagaaccatctgggtatgcccatcttcttcccaggataacttctatgtagctttatattctagccctaggatttcctcttccctctaagagcaagaaacatgtgtgcaggttgccatgggaatagagccaaagggcatcaaaggtcatgggcatgaaagggcatgattagatgcccttgggtgctattcccatggcaacctgcacacatgtatcttgtcccactggcagaatttcatacaattatctgtttacatgtgtcttccttaccaattcttcagcaaattgaggcctgagatcatgtcttgtcttatttgtgtctgattccagggcacagtgcagggggtcatcatgaaggagtcattcattcaggctactaaactgaccaataggattgtaacatgcttgctttcttttcacagtctccaataagtggttccatgaacgaggacaggagttcttgagaccttgtggatcaacagaagttgactgacatccttttctgtccttccccttcctggtccttcagcccatgtcaacgtgacagacacctttgtatgttcctttgtatgttcctatcaggctgatttttggagaaatgaatgtttgtctggagcagagggagaccatactagggcgactcctgtgtgactgaagtcccagcccttccattcagcctgtgccatccctggccccaaggctaggatcaaagtggctgcagcagagttagctgtctagcgcctagcaaggtgcctttgtacctcaggtgttttaggtgtgagatgtttcagtgaaccaaagttctgataccttgtttacatgtttgtttttatggcatttctatctattgtggctttaccaaaaaataaaatgtccctaccagaagccttaaa

SEQ ID NO: 23978 - DNA, 557 bp, Homo Sapiens
atgcagaccttcccagttgctggggcgctggaccctgctatactggacacaaggtttcttccccagggaacagagcttgagcggggggccacccccccgtcctaccggagttctgaggtgcggtcaggcgcggagagcggacgcccagcgccagattctgtgggctccggagttcaggcccactgagccgcagctgagcacaggcggggcaggaaaaaggatgaggtaagtttgttcctgtcaattgggaaccccctcaaccacttccattccccaaatacctgcgctgctaccgatgcctcttggagaccaaggagttagggtgccttctgggatctgacatctgcctcaccccagctggcagcagctgcatcactctccacaaaaagaacagcagcggttctgacgtcatggtgagtgactgccgaagtaaggagcagatgagtgattgttcaaatacccgaacttctccggtgtctggcttctggatattctctcaatactgcttcctggatttctgcaatgaccctcaaaacagagggctctatactccttag

SEQ ID NO: 23979 - DNA, 1644 bp, Homo Sapiens
  misc_feature (942)..(946): n is a, c, g, or t
gtaagtggagaaagagttgaagggaaagtgttgggatttggacatggagttcctgaccctggagcctggcctagtgactggaggaggggcccccaagaggctgtggcccgggagaagctgaaattggaagaagagaagaagaataaacttgaaagatttaacagtaccagatttaatctggataacctggctgacttggaaaacttggttcaaagacggaaaaagcgactgagacacagagtcccccccaggaaacctgagcccctggttaagccgcagtcccaggcccaggtggagcctgtgggcctggagatgttcctgaaggcagctgctgagaaccaggagtacctgattgacaagtacttgacagacggaggggaccccaatgcccatgacaagctccaccgcaccgccttgcactgggcctgtctgaagggtcacagccagctggtgaacaagctgctggtggcaggtgccacagtggacgcgcgagacttgctggacaggacacctgtgttctgggcctgccgcggaggacatctggtcatcctcaaacagctgcttaaccagggagcccgggtcaatgcccgggacaagatcgggagcacccccctgcacgtggcagtgcgcacccggcaccccgactgcctggagcacctcatcgagtgtggcgcccacctgaacgcacaggataaggaaggggacacggctctgcacgaggccgtgcggcacggcagctacaaagccatgaagctactgctgctctatggggccgagctgggggtgcggaacgcggcctccgtgaccccggtgcagctggctcgagactggcagcgcggcatccgggaggccctgcaggcccacgtggcgcatccccgcacccggtgctgaccgcagcaccgccccccgccgcgcctttcgcactgccaccattccatcctnnnnnagcttgagctcttgcctggaacgctgcagctgcacccaccctgcttgatcccacctgggaggccaggacactgaggagctctgaacccagcccacagggaagcagaggaaggtgagcccccgccgccccccagcccttcccatcccttccctgctccctggtggtctaaggacccaagctccctagacttcctcttccaccgtctgtacgtttcaaattacactggtgtaggcctgtactgctggtggggctgggcccctaaacgccagaaagtgaatcttaagaagctctgccctaaactgagaaccacatgctgagggaagggctgaaaggtgaaggctcagcctccctcacatgggtcctgggttacattaggtaccgggctgattgataggcatttggccatggttccttttcgtctacctttgggggccttctcaggcccagaacaaggctgttgttactatgtggaaaagctgaccagtgctgcacactaggggcacacacctttccatgagcagctcctgccctgtggcgacagccagcgtgcacccagacgctggtgccatggcgaagcaggcgttcaagaccatggagaagacaactcctcatctagaaaatgaggacacctcagtgacaaacacacctttttataccaatcagtatcctctgttcattaaaactggctatccattaca

SEQ ID NO: 23980 - DNA, 42790 bp, Homo Sapiens
atttcaagaccgtactaggtagatggtcaattagagttcccagggtttgaagcctgtaactgctgccgccgctcaagccctccagagcattgctacggctgctgcccttgtactactacctccaaatacgttcttgctggtagtggcggcagcaggaccaattacctcttttttgctctccctcgagaagctccagatggcgtcttccgtgggcaacgtggccgacagcacaggtaccggtgtcccgttctaccttggcagatgcccccttggggtctcgcgccgtcctctaccttgtatcactccttccctcccttccctcgaaccatccccattacatcagtgacattgctaagcttttcgtggtctactggcatctgatcacatcgggttttccgctgttgtccgcttcccgaacatttcctcctcctcccttgcttgctttttgctgcctttcttgctttgtttttatttcgtaaatgttctagcattccactctctccaggcgcttttatcacacgtgcgcgcttagaatgtcgtggaatggactgcattggaatccctgccctttcactcctttgcagcggttttctcccctaattccagctcatcgcctctcctttttcccctccatctcctccttcatctccccccccagtcttttccccttagccagatttggtccttctctgccaatctagggcgggggtgccgttccgatgtaatcatatcctcactttgcatcacccgaggacgatcaaaagctcgtcgatggtgccacaagtcacctcgagaagaggggacattgagcagcaccctgctaggcagtgcctttctggtgttctttcggttgagcggtcccggtttagattggaaatttccaggggtttcctttgccatcgcccaattccaccgctgccctcagcctggatttcccaccctgtccgcggggaaccacacccttcccttcgcgaggttgccagccctgttcacttcctatccttgggggagaaaccaccccgatgctgctgctttggcgttgaccaccctgcccgcccaattctcgctttgtgttactttctcgatgtattcctccgccgccgcctctgggtctgccatccccattcttcagcccagtatctctttattcacagggtgtaatattcttttaagtttccatccctgcttgaagagtttgtaaagcaactggagtgtagctgcacaagtacaaggcggttgcccttttagacacttcagtcgcgagcatttggtactgaaaatacgaaaacaaccaaattgtaggagtgtccttcagctgcctttccatattgaggcgatttgggcggaagggggtggggaattgggctgcgcttctgaggtttcccgcgaggttattttttggttgtttctcagttgagatgtgtggagggttttagctactgttcctggaagttgtgctgtaagtagtaggtgaatcgtcaatagtgtcttatccgtaattgtagggagtgggattaataattagtccgtgctcctctccccacgtctccaccgtgattttcaaaggtttaagattctgtactggattctgtactagcttgccctttttaatgtgttatttatttgagaaagctgtcgtttcaagtgttaaaatagcagataagcggcattgaaaagtgacaaagtaatgtgtgaaaacaaggagctaggaagttctagagacttagctaaaatgtaattttagtttctattaaagatataacctctcccagatgtggatgcaagtctcaatgctctttgtgttggtggtcagctgtgcattctgtcaggaaatttactttgctttcctcagtatccggaacgctcatcagctctgatgattggggagctgggctcaaatttgaactagtcaccttaaccttggtagaattaaataatttgtccatggtttcccatttcaaccagctagtgaagtgctacggtcgaattcccagtttaagtatttacagttgtgacaagcagttttttttttttttttttccctctctgggctttagctatatcctttaaagatctttatgtatctggattaagtcacttgcagcgaagtgcttttatttattcattatgttgcgctttatcaaatatattttagcgtccatcctccctccctcccaacgttttgaccattgcagttgcaggtaactgcctggcttatataggcttgtttgcaatgtcttaatcctttagtcaataccagagctgtttggaaaatgttagtgctaaaccaacgtgggtgggatttagccaatttagtctccttttgagtttgggatggtagaggagcagtgtaatcttgggtctttatttaaaatgtttgatgacccctttaactattttggctgttgtcaaatgacaaacatcttgtttatcagctgttttaaaaatagcactttgactttttggtttttcccttaggctcgtttctacttgtccttttaaagaattaaattctgaaatatacaaaaattgatataatttaaagaattaacacatctggtgtcctcactgaggttaagattgatagattgttaccagtactccacctcaacaaatccaacctgaaatatggcacaaaatattacgtttcccaatatgttattctgatattattaagtctttgtgaccttgcaaatcacacgtttaatattttgtttctgtatgttaactaaggtataaggaataatgttcagtgaatccttagatgctacctatgatttataatttaaaagtacaaagtatttttggtcataaaatgtaatctcatatggaagtaaatattcctttctagtttgggaaagaaagtattaatgggtgaattctaaaaatgccaattctgcacttgatgttaacttgaagatatacataacgtgcagaacactctagtgctttacatagtttcaagcatttccatttttaagttaaatataccatatttttacatttttttggtttacatttctaactttttgttttcccccctccttccctcaaatgttttgatgattctccagaaccaacgaaacgtatgctttccttccaagggttagctgagttggcacatcgagaatatcaggcaggagattttgaggcagctgagagacactgcatgcagctctggagacaagagccagacaatactggtgtgcttttattactttcatctatacacttccagtgtcgaaggctggacaggtaggagatgttggggtacctgctcgtgattgctgcctctgggtgctgagcttgaaaaatgatacttaaatatttgaacttgaaatttttccagtaccgggtttcaactgagccgccaacgcacatctgctctcttgcccacttgtgacatgcccagctgccagtttttctccttccttttgtggtggtggttatattatcagtatgactagggaccttttctagatttttctatctgggtctgctgctttctagactctgttcaggtaataaattattatcaatgtatatctgagcatccagtctccctttcatgagacctgtcagtttgagggactgaaatgctcagaaatgatggttatgtatgctgtggcaggagatgcatacctggagtttcattaagttgttatggtgtgttgcttttagttaatcagttgaattaatcaaaagggaagaatttgtgttcctgtccttttaataattgttattctggcatatttagacacttaaagatgtgcatcattaaatcttaaatggaaaatgagactcgtgcacatagctttccattttttatcttaatgatcatgatttccaatgtggtgggtttttttttttttttttttttttgagacggagtttcgctcttgttgcctaggctggagtgcagcggcgccatctcggctcactgcaactctgcctcctgggttcaagcgattcttctgcctcagcctcctgagtagctgggattacaggcatgtgccaccacgcccagctaatttttgtatttttagtagaaacggggtttctccatgttggtcaggctggtctcaaactcccgacctcaggtgatctgctcgcattggcttcccaaagtgctgggattacagacatcagccaccgcgcccggccaatgtggtagttttgtaacaagactctagttagaatttttttcttttttttgaggtggagttttgctcttgtcacccaggctggagtgcagtggcgcaatctcagctcactgcaacctccgcctcccgggttcaagcgattctcctgcctcagcctcctgagtagttgagattacaggcgcctgccatcatgcgtggctaaatttttgtatttttagtggagacggggtttcaccatattggccaggctggtctcgaacacctgacctcaggtgatcctcccgcctcagcctcccaaagtgctgggattacaggcgtgagccactgcgcccagccaataattttatttaataagaaaaagcttttcattttgaaatctagaatacctccacttttgaaaatctttgatttcccaaatttttcttgctatgcactagttaaaagataaggtattatataatgagcaatagcacagatctcaaactgtttgagttgcatatgggccataccttcttttctgtaacgtgcatacccatgcattaacacttgtcgccttttccagatctgctcactttagcactctggcaattaaacagaacccccttctggcagaagcttattcgaatttggggaatgtgtacaaggaaagagggcagttgcaggaggcaattgagcattatcgacatgcattgcgtctcaaacctgatttcatcgatggttatattaacctggcagccgccttggtagcagcgggtgacatggaaggggcagtacaagcttacgtctctgctcttcagtacaatcctgtgagtaaaattttaatggttactttcccttcctagaaacccagaaagaaacatagtgtgatatttcagacactaaagtaggttttcacatggaataaagtcaaaagtttagaaatgcgtatgtacttaaaatggtgaaattgcttttagctggtctgcgttatgctaaaatatttgttttatttagcaagttatattaaaaagcataaaaattcttattgcaagaaactacatcaattttaaaataacacgtataaagtacagagcacatgacttttttctgttgtgattaactttggataaattctgataagtgtttgcaagttaattgattttcaaggaatggtggataatgggtcttaatctgtaaaatctgtaatataaaatagtttgaaacaagatgccactatatggaatgatgtgaaaattaggctacaaaatttcttcctcaatatcctattctcttctctttcaatgtaattagaagtcatagaatttagatgatactacttatactgggcttttgattagtttaaaaattttttttgtctaagttgcagatgtgttctgggaacaagtaaggctcagctggcagaccttaaattcatactgtgtttaggatctccgaaagatacaaaaacataagactttccctcagaacttatgatgtagttagagaaagtagatgtaaacttaagaggtaaatgatagtggggttatagaaatctagaaaaagttcccaagttacattgtcaacattcagttttgtaaccaacctggaaatggctaatagtttattttagctaccgtttactgaaagtctgtgtggtcagacactctactgacagctttaaatgattggtcttagttaatcctcacaataattcttcaaaatagatgatattatttctgatttttatcaattaaaaaaaaaccatggactcagggttatgtggctttcatggggacaaagctagtaatgaagtattaatagatattaaaacctgagtctgaatatcctcaaagcaaatgttgaagtgaaaagaaataaaagtgggatgatgtgcccagagggcactcacccatcaaagcagcccttgagcacagttaaaaaaccattgatcatattttgctgtcccttattttttggttaggaaactgaaactaaatttagtagtttgttcaaagatccgaagtcacttctcatgatgatatctattaacaatttttgtagttaattttgagagtttaaacgtgtcctttttagaaaatccattgctttaaaaaacatttttttttaagagatggagtcttgctatgttgcccaggctgtactcatactcctgggctcaagcagtcctcctgcctcagcctccagagtagctgggactataggtgtgtgccaccacacccagcttctaaatttattggtttttgaatggatacagtgaatacctccagttagcactcttggaggtagcaaatgaaactaatttcttgtctatcttttctgagacactcagtgtatatatatgtacatttgagtgactttttgtaagttttattgcaatactaatctagctagttacccacataaagttttagggagcctggtatgtactgccactgggccttggaccccatttttcccagggctcagggctcacctctgtacccagttgtcacagtaagttctttacctttattaatcaggttgattctactcttattgatagtgtaccctcttacacagctgtggttcttgccatctttaactctaatgcccttggctcaggtttccagttgcctatgtgtgtagcagagcagtcattgctactgatagtgtacccaagcagtaggactatgctgagaaggaaaactaaagtgagagatggaaccttgctatttaatatctaacctgctgttagcaggaagcttattgttgtaccctaccaaggaagtgagatagtactaaaataaatcatgggattacctcttgaatgcattgaatggccatgtgttgtcatctggttctatgtttcttctagtggaaggtgctgctttacttatttattactgtttttaccaataagaatgaaaatgggattgtgcaagttcccttgatttcaactaaacatgccatagtgatcatattttaatttatttcaggatatctaaagtcttaactagatttaaacttactgtcaaatgcccgttgtcagttcagtactggtagaaccttgcgtctgttccttatgttcttgttgacagtgcttaaatgcatcattagtacattgtgtacctgaatcatagatgtagttggcattctatgaaaaatggttaaagaaactcaggttattttggttttgcagcagtgaaagagtagaatgttaaggtggtatctttggtaaccttggtaactgttttcaacagtgtttatctttttaagttaatagatatgtcaatttagaagttgttctctgtgacttgattatagaaattatctttgagacagctatctcatttttttcattctgaattatcttctataattataatgttgggtgttttcataattttggtaagattttagtctgtcattttttttttttttttggagacggagttttgcccttgtcacccaggctggagtgcagtggcgcgatctcggctcactgcaacctctgcctcctgggttcaaacgattcttctgcctcagcctccgaagtagctgggatcacaggtgcccaccaccatgcctggctaattttttgtatttttacaaaaacaggctttcaccatgttggccaggcttgtcttgaactcctggcctcaacagatccgcctgcttcagcctcccaaagtgctgggattacaggcgtgaaccactgtgcctggcagtctgttgtatttgaaggtgttattgcagatagcaccttgcagtgacagcacatgttctttgacatggtgactcactagagttgcctatacctggcaattccttttgcaaattatgtataaaattgtcctttctgtaacggctataaccctgagttgttttaaacaggtctgtttctgaatctataggttgttgaattgttgcttgtgctttgattgtggatgcacagaatggagagctgctggcatcctggccatcatgtgtgttcctgtcatgttatttgttacttgttactgctgagcctctcttatacagctgcactgtagaaaaccatatatttcgattcttctctgttctgctttctgttgtatatttcgattcttctctgttctgctttttgttaaggttgctgtgcaaatgtcacatttaaatatgtgagtgcttattgtgcatacaatgctttgttaggaaatggggagatgtgttgtgggggaagttgcgggttataatataagacaggacctgacccgtaaaggaaaaaatggtgtaagttccttggatgataattgttggagagtattaatcagaagatttcctcgagtgggtgcttatgacctaagcattctgtaggaaggtaaatagcaagtagacttccttggctgaagtggtgagtcaagtagtaacaagaagtgaatgtagtagaggagagtcaattggaagatttataaagaatagagaggctgaggagtttgaatttaatttgagaggcaattgagaattactgtaggtttttatcgacctgattttacttcatatgtatgtacgtgtctagatgttgtggctggtgggggtgggaggctctaggaggaaaggcaggaaactgatgcaatcttaggagaaatagttctacaggaaaatcttgctcatttctatctccttttattctcacgattttcccttgtatacagtgccctcctcctttgtctattaaaaccctactcatccttcaaggcccagcttaaacttctcttatgagctcatcatctagttctcttaaaattctttactactgagtgggcatttagtgtgtgccttgtcttttcacatagattgtaagccccttgatgataaggattctatatcttttccctatagttccaggcatgttattgaattgagtaacagtttgcctgaaatgtattaacctgggatggataaaatgggctagttttgagaaatataattgtcaaaaacattttgatttgacagatgaagcagaagtgatgtcttgggttttgaacttttgggagaatggtggtgcccgtgcgttttctagaaattagctgttcatgcacataggtttggatccccaaacaggagaattggatttcaccgttacatttaatatgatgttttagcttttcctaaaactgccttattgattatcttatagtaatcttgaagataatgtatttttaactatgagcattgtgttaacttgatatagtatactgtaatggatctagatgataacaaaatatagatatgctgtcaggacttaagtggcatccatccaagagttcatagaaactagagggtaataaaattacgcaacagctggctactatgtatggccattacagtcattgttggagaattattgcaagacttctgattattatgacttagaaaaggcataggaattggtaaaagtccaaacatgtataaccacaattatcaagtagtagaaggagcttgtatgcatggattggattatgcagtcatggtctgccaaaacaggggtaaccctttcagtttagaaaaaaacataaccatacaaagtagatagcaagattatataattcattacttctgagagtatagtgttaaaaagtgctcaggctaattagaggagaagtcaaataagattaatggtacctttgatgttttgaggattagtattagccttttgtgcttgaagtgatgggagacaaccttactctctagaacatcagtcattgcttgaaggacagtattgagtcagggagatgatggaactgacccagtatggctgaccgtaagattgttgtgtggcagcctgtactttgttggcagactttttggttcacctgatggatgatactatacaaccacaaaagctgtttatcagtagaattaagtgattttggaaaccataatatagttccagagcaaatcatatatatgatgatttttcggcacagttgacaaaatttcactttctaggacttaagtctctttcacccatggaacagtttggaataataagcatacttcctgttgtcattgtttctgcctgttgactggtagatgtgactgacaatggcaaaatagggcaaataaaaatttaagctcactgttgtgatgagtgtctcatccagatgaatggactgatgagtcagatgactagcagcacaattgagctgctaataaaaagcagagtcaactgcttttcattattcacccactcaactctaatggcacttaatactaatgagtaatctagtggcaggtgccaggattgaggctttggttggataattcttctgcccgatagtgaaatgaagtcagagtttctaaatatgcctgacagcctaagggtaggtttgctcataggtagtcatttgctaaatatgtttttttccactctggaaaattttcggtccttgatacagaagtgattcatcataaccttgaataacatagttggacaaatatttgagatgtgtgtgtgtgtgtgtgtgtgtgtgtgtgtgtatatatatatatatatatatatatatttccttttttttttgagacaagagtctctgtcgcccaggctggagtgcagtggcacgatctcggctaactgcagtcactgcctcctgggttcaaccgattctcctgcttaagcctcccaaatagctgggattacaggcacacgccaccatgcccagctaatttcatatttttagtagagatggggtttcgccatgttggccaggttgatctcgaactcctgacctcaggtgatcctcccacctcgccctcccaaagtgtggggattacaggcatgagccaccacgcccggcctgatatatatatttttaatgtgactgacatttggggaggagagaaagaagctctagtaaggtcccatagtattttatgtgaagctaatggggccaaatgcatttcaacattcagaatttttaggatattagaaagataataccatatataaaacacccagaaaagtctggagcagcaccttttagtaaaacacatttatatttctgcagcaaaagacagtattcatactaagtgagataattaaattctataaatagtttcatgtcacctcaagtcaggtttaaccctcaaatgagtttttggaactttttgggatttggaattgtggatgaggggttgtggtcctgcactgaagtttgtcaggcagtatctttagttgatagaataaaatggcagggagctagatgcttaaaagtgatttcaagatatttttaattgacaaagcagagtataattaatgacagcgtctctgggtttctaggatttgtactgtgttcgcagtgacctggggaacctgctcaaagccctgggtcgcttggaagaagccaaggtaggtgtttgatagaacacatttaaacatcagtattatgaaaacttgtactttttgccaagtcttcaactcttcattgagctatcttcacaaaacagtcctttgaaactgaggaaaactgacggcacgaatcgcctcagaatagagcagggccaggctttggcatatctgttctaaatctgggggtaaagcaagaacctgaacattttggagcctttctgctgagctagaccatctttataacactgggctccgtcatgatcttatgtgggaataaataacattccttcaaatctgaggcttgcctgctggtgacaagcagagcgcctgtgatttggctcaagactcctatatgatgcaggtgccattgaaaatgctgctcttctaagtcctttgtggcttgtaagtggagaagaatttcatccaaatgttaccctgtaatactggcatttaaaattcttatttaaccttcctcccttcatcttcctcaccctttttacagtggaagaaaggctgttaaaatgattacaaattaataattggaacatcctgtcccttgtccccactcccttcccaagttcctttttcctcttttccaatcctagttgtctaccttcttttcttcctcatttccttcttttattcctccccaccccaaccccttaaaaaaaaggtcagaaggacaaagctggtttgtttgggaaatggactgatcgaaagaaaacttgccaaagtggaaaggtggcttttagcattctgtgtttccaaataatgaatttgaacaccaggttgggttaattaaagcttttggtataatttaaaattaaatttataaatgcagttgtcttgttacaagccaccttacgcaaccgcgctgcaggggtgaggagtggggagaaaccagaatgcttctgaaactcccacctgttgctctgagccccacgcgcatgctaatgcgtggagtgtatgcgcagagtagctgtctgtttgactgcttcatccagggagggagaaggcttttcagcaccatctaatgttttaaaaggcactagttttaagtgcacagctcataaattctgctgacattttggattaaccttatgtaggttgccagctaatgaattgtaattgatttcaatcttagctgataaatctaattggtaatttatagaacaaatatttgataagctcctattaattgtcaccccaccaagcggacagctaacatgaattgcacttcactgcagctttagagatcggtttaggctgagacattgcgcctgccttaggttgctgacttctttatttcagagctctggagacacctagtttgaaaaatgttattctgtttttttgtgagaacttagtaaacaagaaaatactcttgagtgaaatgcaatgtatttcttttgtaatcagtgcatttgaaaattcaagccagcatattcctagtagatggaagcaaaattaagttgtctttgtagaaaatgaagagcctttcttccagcaaaaatccctgctgtatgcaatagccctgattaaccctctcccttctgcatgtttcccatattacagacttgagactgtcctcattcccatatgtaatagacatccaaagaatttcaattgctttgttgaacttttactaatgatcttgtttttattttctctcttgtttttggtttttcaccattgatattgtatttagaaggtttcaggtgggtgaaacctcctattccatgcgtaaggtgcctcgctgaagggagctcgaggcctggatctagggcagacacacaacctcctcctcctcttccagcaaggaacgcaccgaaaagtcacatgatgagaaatatggtaacgggtttgtaactgccacagcaaaacaatttgcctccatgcctgaatcttctgtcttgtggcttcagaaacagcttaaaataattttatttacaagcaagttatgtaagagaatgttttatactatagccacaattctgtcaaagataagtaaaagttaattgatattaaaaattattagagataatttacttagtaaaagcttctaactcttcttgttgttcattttttttccttttttcttctttgtttggattgcagcattctgctcttctgatgatgcgctgtgaccctgcagtagcgcaaaggctgcgcagcgttaatgcgcattgcgtgcgaatgaacccctgtgaacggttgactagatgagtaatctgattgactggctccctcagtcctattctgtagcctttttggataaaattgggttttaacatacctcgagtccaactaatctcattaaacaaatattctccatgggcctgtctagtagattaatggatctggttggccgtttgctgcgtctaggggtgttctatgtagcgcagcagttcgcagcgattgcgcagtgcgatgctgttaggttgcgcaagcgatgtttgcgctcgcattacagggacctcaacctaggtgcaatcctgtcatgtgaggtttcagcttcagtcctccttgggagacggggcattgtgagaatgtaacttaaagcctggctttatgatatcctacttggcagaaagacatttttctcctcagtagcatagttttgatgttagtgaggaacattgttgaagagcagcatttcccaaaatgtgtttcatagtattctaataaaatgcccaatgaaagaagagttccatggtcaactaagttcagggaaccctgttacactattaaaggcttagggaagtccagtaaagaaacctattttccgaatttatttgatcatgaactcctttttttttcagccatacctcttaacacctcatagaacacactttgggaaacagtgggggtaggaaaactcggcctcaagttgcgccctctaggtagcacttgaaaacatgacaagggcccgtagttgtttggataagagaactccagcatagagccttatagcaactgacttcccagttaagtcccagtgtaagggttggtctttggttggcagaactgaacatggtggtttgcacttgggttctggtggcgcaggcgcaggagcagccagctgtggcagcgcattagttttggcgcaagcgagcctatgctgcagggtcacttttggctggtcagagaaggaataatgatatcaccttcttccccccctccccccaatcttttttttttccctttacaaattttcccctttccctttacctcctttccctcccatcttctttcattaacccctcctaaggcatgttatttgaaagcaattgagacgcaaccgaactttgcagtagcttggagtaatcttggctgtgttttcaatgcacaaggggaaatttggcttgcaattcatcactttgaaaaggttagtcattaaattaataattggtatttttgaagtgcttacgcatgtagtgtttttactagaactaaataataggtcttagccagtgacattatatctttgtttctctggcggtataggcagtatgtgacttacagagaacaatgatttgacttaaatattttttcaacttgacaatggtgcaaaagacatacatattcaatagaaatcatacttcgagtacccatgcagccattctggttttccctttcagtacaagattcagtaaattacatgagatgcccaacacactattataaaataagaaggaggctgaggcaggaggatcacttgagcccaggagtttgaggctgcagtgagctgtgaccatgccactgtacttagcctgagtgacagagtgagaccctgtctctaagattaaaaaataaaaaggtaccataaagacacatgcatgcgtatgttcatcacttcacaatagcaaagacatggaatcaacctagatgcccatcaacggtgggctaaagaaaatgtacatatatgccatggaataccatgtagccatcaaaaatgaaatcatgtcctttgcagcaacatggatgcagctggagtttattatcttaagtgaattaatgcaggaacagaaaaccaaatattgcatgttctcacaagtgggagctaagcattgggtacacatggacacaaaggggaacaatagacagtggggcttacttgagggtggagggtgggaggagtgtgagggtacaaaaactacttaccaggtactatgttcactacctgagtgacaaaatcatttgtataccaaattgctgtgacacaatttacccatttaacaaacctgcatgtgtaccccaaacctaaaataaatgttggaattaaaataaaactcatattaaagttttaaaaaagggctttgtattaggtaattttacctaaacgtaggctaatgtgttctgagcatgtttaaaatgagactagccgggccaggtgtgatagctcacatctgtgatcccagtgctttgggaggccgaggcgggcagattgcttgagcttaggagttgaaaaccagcctggacaacataacgagaccctgtctctacaaaaatgagctgggtgtggcagtgtgctcctgtagtcccagccatttgtagggctgaggtgggaggattgcttgggcctgggagctggaggttgcagtgaaccaagattgcaccactgcactccagcctgggtgacaaagtgaggccctgtctcaaaaaaaaaaaaaaaaaaaaaaaaaaaattaggctaagctaggatgttcactaagtgttacagatgcattttgacttaagatattttcaacttatgatgggtgtatcgggacataaccccatcctaagttgagaaacatctttattgcagcatttgctggatagtacatggtatggcagtttccaattttgtgttgaaaatgtactttaggctgcgtgctgtggctcacacctgtaatccagcactttgcgaggctgaggtgggaggattgcttgagcctagtagtttgagaccagcctgggcaacatagtaagaccctgtctctacaaaaaatacaaaaagtagctatgcgtggtgacacacacacagctactggggaggctgagatgggagtttgagtctgcagtgagctgtgatcatgcaactgcactccagcctgggtgatggtgtgagaccctgtctcaaaaaaaatgtactttagtaattaaaaatgatttttataaatgggctttaaagaagcagggcttcttggtgaaaaggcagattccaggtctggggcaggaatttaaaaaaaatttttggaatgtcttgtcataccagaaagcaaggaagctttgacatattactttgcatcaaaaggactcaggaagcaacttgaggaggctcccactggctaaagatgcagacttgagcatcaataggaataataactgaaatatactaaaacttatcaagtatgtttaaatctatgagcttataattatgctaaaaaattcattggtcatctttggaagacttacaaggaacaattaatttggaaaactggttaaaaagagaagaataaagtttttgaggaacctctatactagttcccaaaatggctgtgccaatttatacttcccccatcagttacaaggcttccctttctttacatcctcactaacacttgttattattcgtccttttgatgatagctatactaacaagtgtgagatgctaactcatggttttattttgcatttccttgatgattagtgatgttgagcatattttttatatatctgcttgccatttgttttttttgttttgttttgttttgtttttttgagatgaggtcctgctctgttgcccaggctggagtgcagtggcgccataatagctcactgcaacctcgaactcctgggctcaagtgatcctcccaccttggtctccccaagtgataggattacagacatgagccactgtgtctggcctgtacctcttcttttgagaaatgtctgtttagatcctttgcccgtattttaatgggcgtatttgctactgagttgagcttcttaaccctttatcagttgtatagtttgcaaatgctttctcctaatccggggttgcctattcactctgtgtaattgtttcctttactgtgcagaagctttttagtttgatgcaatctcattgcatatttttgcttttgttatctgtgctttatgctaagtgaaataaaccaggcacagaaagtagatactgtattatgtcacctatttgtggaatctaaaaaagttgatttcatagaaacagagagtagaagggtggtgaggcttgggggggtggaggagggatggggaaaagggagatattgatcaaagtttcagttagactggaggaataagttttagtgatctgtagtactgcatggtgaccacagttgttaataatgtatatttcaaaattgcaaaaagaataggtttttaatgtcctcaaccacaaaaaaataagttagtgaggtgatggctatgttaattagcttggttgactctttctaaaatgtatacgtggatcaaaccatcacattgtatgccataaatatacacaattatatatcaactttaaatttaaaaattaaaagaataaagcatatgtcttccctctcctgtatgaactagaccatagagtaacccaatagttgatgggggaagcttttctttataaaagcattctagctaataagtgaagaaggaatgatagaatatcaccattaatagtgaaagcatttattaggccgggcttggtggctcacgcctgtaatcccagcacttcgggaggccatggcaggtggatcacctgaggtcaggagttcgagaccagcctggccaacatggcaaaaccccatctctactaaaaatacaaaaattagccaggcatggtagcaggagcctgtaatcccagctactcaggaggcggaggcaggagaatctcttgaacctgggaggtggaggttgcagtgagctgagattgcaccattgcattccagcctgggcgacagagcaagactccatctcaaaaaataaaaaaaaagttaaagcatttatcagtgacaaaaacgagatacaatcaggtattaagtaccttgtggtaaacaatttcaccagtgaagtagtcttgcacaaagagaaaagaacacaaacctaattaagcttctggttctacctaccaatttacaggagatatacacgggacaggaaacatgttaaaggacaccatagggatgcagtcagcaaaattcaaactttgggaagctgaccttcttacttcaacaaattgtaataaaaatggagatttaaattaaacttttaggccgggtgcggtagctcacccctgtaatctcagcactttgggaggctgaggcgagtggatcacttgaggtcaggagttcgagaccagcctggccaacatggtgcaaccccatctctactcaaaatacaaaagaaaaaaaaaacagctgggtgcggtgcggtggcgtgtgcctgtaatcccagctacttaggaggctgaggcaggagaattgcctgaacccgggaggaggaggaggttgcggtgagccaagatcgtgccactgcactccagcctgggcgacagagtgagtgacactccgtctccaaaaataaataatgagtgacactccgtctccaaaaataaataaataaacacacaaacttttaaaggattaaaagaaactcagagaggcacattgacaaattatatctgtcttatttggatcctgactcagttaatgagaaattggagcactgaatggatttttttttttttttttttgagacagggtctcacttgatcgcccaggctgaagtgcagtggtgtgatcttggctcactgcaaccttcacctcccaggctcaagggattcacttgcctcagcctccggagtaggtgggactacaggcgtgcgccatcatgcccggctagctttttgtatttttagtggagacagggctttgccatgttcccaggtcttgaactcctgagctcaggcagtctgcctgcctcggcctctcaaagtgctaggattacaggcatgagccaccacgcccagctgatatttaatatgaaggaattgctgtcttttttttttttttttctgttaggtatgataatggtattgtggttaggttgggaggaaaaagcattcttgtgttgtccctgagatacatattgaagtatttttgaatggaatatgtctgggctttgcttcaaaatgatctgcgaagagggggagtaagttggagtatagattaaataagatcaaacatgatatatgaattgttgaaaatggataatggagacttggacgtaatgttcctctgcttttgtatatgtttaaacatttctattataaagtttaaaagttcttggggtggacatctatcactatagacaatctaaattaaatgcatcatgccgtgtttactacagagttgtcatctaagtgaagatgaagtgttctttctttatttttttttgagacagagtctcgctctgtcgcccaggctggagtgcagtggcacgatctcagctcactgcagcttccgcctcccaggttcaagcaattctcctgcctcggcctcctgagtagctgggattacaggcgtgagccaccatgcccggctaattttttgtattttttagtagagacggggtttcgccatgttggccagggtggtcttgaactccgggcctcaagtgatctgcccgccttggcctcccaaagtgctgggattacaggcatgagccaccgcgcccagcagatgaagtgttctttatcagtctttaataaacatacaattactcagtgtcttaatcaaataccttttcggtgtgtgtgtttttttttgtttttgttttttgtttttggagacacagtcttgctctgttgcccaggctggagtgcagtggcgcaatcttggctcactgtaacctctgcctctcgggttcaagccattctcatgcctcagcctctcgagtagctgggactacagttgcacatcaccatgcccaggtaatttttgtatttttagtagagatggggtttcaccatgttggccaggctggtcttgaactcctgacctcaagtggtccgacctcggcctcccaaagtactgggattacatgtgtgagccactgcacctggccggtgttttgattgaagtttgcatttaccatgctgtaggagtatctttcttgatcagtgtttctcttccttggttatacatgaggagcttataaaagatctgaatatcctgaccctatcttcagagggtctgatttaactggcctgtgatagagcctcggtaccttttctaggaggtaaattcttaatatattgccaaggttgagaatcactgctctagacaacatgacagctatttggatgacaccgtgtaatggttagtatttccttgaagtattgtatcttactgtgtatacagctctaattgcatgtcttaataaggtcttgctgagcatgtagtttgtatgcatacaactgaggtatatatttaccttttcagtaagagtttgctgcctcttttgccactatttttcagaagagttagactggttaattgtgaataaaatagggccaatcattagaagtgttcagtttaatgaaattggagcaggcccaatatttaatttttctcttcaggacccattttgctcatgagaacatgaggcatgagaagttattttgataatgttgaggtttgtaaaaataatgagaagacactaaataaataattggtttattaaaatgaaatgtaattgaaagtctgcaaggaccttggagtaaaaaaattgtaattgggaagttgatctggtgaaatcctaacttgctctgagtaactaactgtcttgaaatttttaggctgtcacccttgacccaaactttctggatgcttatatcaatttaggaaatgtcttgaaagaggcacgcatttttgacaggtgagagaatgttctgtttaataaattttcttgaatctttgttgtattgacacttgacagtttggaccgaaatgatgacaatagtccattgaagcatatttgccttttctagcacgttgttctctgcccatgtcctgtgttgccttttatttatagatgttgttcgttgcctgactttttgttgttggctttcctcaaagccgttatccttctcattgggagtttagttgaaatttttttattgttaaaatggttgaaatgattctttcttagactaaattattcctttgacctgattttagaaagcaaagtaaatccagacttttaaattttttgttgttgtcaaaggaaagcctattttttatgtgggagtagaaaacttcccagtgtaaagacacattttataaaggtgtgattttggtttgaggttaaaatataatacagcatgaattatgtaattaattacaattacttgatatattttgatatagtacagcttgaatgagttgtaacaaaccatccattaagcatgagttacattttgtgtgtgtgtgtgtgtgtgtgtgtgtgtgtgtgtgtgtgtgtgtttatttacagagctgtggcagcttatcttcgtgccctaagtttgagtccaaatcacgcagtggtgcacggcaacctggcttgtgtatactatgagcaaggcctgatagatctggcaatagacacctacaggcgggctatcgaactacaaccacatttccctgatgcttactgcaacctagccaatgctctcaaagagaagggcagtgtaaggatttttactcattctatttgttatctggtaggattaagagtcttttctggccaggtgtggtggctcacacttgtaatgccagcacttcgggaggccgagatcagaggattgcttgagcttagggtttcgagaccagcctaggcaacatgacgaaaccctgtctctacaagaaatacaaaaattagccgggcatggtggcacacacctgtagtcccagctccttgggaggccgaggtgggaggatcgattgagtcctgggaggttgaggctgcagtgggccatgattgtgccacagcactccagcctgggcaacagagcacgagactctgtctcaaaaaaatcacaaaaaccaaaaaacagcaaaaaaggaaagtcttttgtacaagtattgagatggtatattggtttactttagagttttggttgagggtaagaataccaaaaaatatcaattttctgtagcattaccagccattaggcttaattaaacaattattagaacagtatcagtggaggctttatgattctgtacagtttttgaagactttgttttgttttctaggttgctgaagcagaagattgttataatacagctctccgtctgtgtcccacccatgcagactctctgaataacctagccaatatcaaacgagaacagggaaacattgaagaggcagttcgcttgtatcgtaaagcattagaagtatgtgagggtggtgtagctgggcatttagcatgatagtagagggaaagcagttaagtttaccatcatccacctcttttgtaaaaatagtggttgaatcatttacaagaggattattcattgaagtaacaattgagtacctaaggtatgatgtgaggccctatgtgacattccagaaaatccctgcattcagagttcattattctgtggataagatctgtacaaaaaaattaaacattaacccacagttcaagagaagttacttataagtatataatcttagtgcctgatggctgtatggtagtggttagtagatgtggtaggagtttagcagagagagatttcagtggtgttggagtggtcaggataaactaagaggagaagaggtgtacctcattatgtttgaaacaagaagaggtataaaatagaggaagaggtagaatttgagaatgaatagacttggaaaaagtagagacaaatttaggggtttaaatgtacttgagcaaagttcttaaggttgtggtgaattattactgctgctttagcaatttttttaacctcagttctgatcttgactctttataggtcttcccagagtttgctgctgcccattcaaatttagcaagtgtactgcagcagcagggaaaactgcaggaagctctgatgcattataaggaggctattcggtaagagacactaacagccttatttttaaaattatttttaattttaaaatgtttgacattcggcacattgcagatgctaaaatggctttaaataacaacggaataagttagcattacagtgggttaaagatttttgtattggagaaataaaacctttggcttctcttttagaatcagtcctacctttgctgatgcctactctaatatgggaaacactctaaaggagatgcaggatgttcagggagccttgcagtgttatacgcgtgccatccaaattaatcctgcatttgcagatgcacatagcaatctggcttccattcataaggtactactgtttattataatatgtgcagtttaacacctaaaatttaacttttggaaattttttaccatcctgctttatttattttccaggattcagggaatattccagaagccatagcttcttaccgcacggctctgaaacttaagcctgattttcctgatgcttattgtaacttggctcattgcctgcaggtaaagaataacaggccagtaattggctctcagtgttgtaatagctttttaattgttgtatgccataagaatccaagcctgactggaaatagtatttttaataggctatctgacattactttaggccaaagacatatcaaatattaaatcctgggataggactttctggataataacttgtttttgctttctctagattgtctgtgattggacagactatgatgagcgaatgaagaagttggtcagtattgtggctgaccagttagagaagaataggttgccttctgtgcatcctcatcatagtatgctatatcctctttctcatggcttcaggaaggctattgctgagaggcacggcaacctgtgcttagataaggtgtgattcttttgttttaatctttttgttgtaaactaaaacacaaatacagaaaactgtaaaaatcaaatctgtggcttaatgaacgattataaagtgaacaccacccaagtcgagaaataaaacttttgtgggccacttcagaaccccttccattgtgtcctgagtataaccccctgcacttcataagacggaatccttaactccttcacttaaacactaatgatagactgatggtacttttctttaagttgaaagccataatttttttttcttttatcttttttttcttttttttttgagacggggtcttgctctgtcgcccaggctggagtgcagcggtgtgatcatggcttactgcagccttgacctccccgagcttaggtgatcctcccacctcagcctcctgagtagctgggactacaggcgcatgccaccacacctaattttgtgttttttgtagagatggggttttgctatgttgcccaagctggtcttgaacctctgggctcaagtgatctgcccacctcgcccggccaaagtgctgggattacgggtgtgagccaccgcgcctggccagccatcatgtttaatggagtgcttggtattttgtattcacctttgagaattagagcagtacttgatcaaggattggatcaaaggttggataatagattggagtgctaggtgtactttttttttttttttgagacatagtgtctctgtcatccagactgcagtgcagtggtgccatctcagctcattgcaacctctgtctcccaggttaaagtgatgctcgtgccttagcttcccgaggagctaggattacaggcgtgtgccaccacgcctggctaatttttgtatttttagtagagatagggctttgccatgctaggctggtctcgaaatcctgacctcaggtgatccacctgcctcagcctcccaaagtgctgggattacaggcatgagccactgcccccagccataattttgtttttagaaaatgtttccctatagaattttctaaaatgcgggaggaaaccatgctctgtccatactgcttcatacctacaagtgttagatttgctcgtacttttttttttttttttttttttttttgagacagggtcttgctctgttgcccaggctggagtgcagtggcacaaccttggcttactgcaacctccacctcccaggtttgggcgattctcccacctcagcctcccaggtagctgggactacaagcatgtgccaccacgcccagctaattttttttttttttttttttttagtagagattggatttcactgtgttggccaggctggtctcgaactcctgacctcaagcgatccacctccttggcttcccagagcgctgggatttgctcatgctttatagatctcaggagcaggtcaaagtatgaagcatattacataaagtgctgaggttgcatctctctggcaatattaactaaatgctctgggcagacctttttcaacaggtgtgaggtataggtttggtgtgtttttcgtcagttttcctagatgaaaatttatgtagattttactaacaagcattggattctgttgatagattaatgttcttcataaaccaccatatgaacatccaaaagacttgaagctcagtgatggtcggctgcgtgtaggatatgtgagttccgactttgggaatcatcctacttctcaccttatgcagtctattccaggcatgcacaatcctgataaatttgaggtaagactagtgtttctctagaatcactatttgtttaaaaaagaaaaaacccacaatgttggcttgtcaccatgaggcatggaaacctagtgtcttttggaaagatttgagccagaaagatttgagccaatgttattaaatatgccatgtgctgcctttcaggtgttctgttatgccctgagcccagacgatggcacaaacttccgagtgaaggtgatggcagaagccaatcatttcattgatctttctcaggtagatgaaactctcatactttaactttttattttgagcaagtttaaataaaactattagcatatagtttatttttgatgataagtattaaatgctgtagtaccacatataggcaattgtgttgatcttatttccttgatcatttgtgttaatcagcatggctttttccgaggttgcaaatgaaactgaaatgtgttatgcttgtgcttggacatacaacttttctggagattgagccagcacttgtgacagaagatacttaataaatattgacaaaatggtgacttgggagaagaataaataggtcttttaaagaaaatagggccgggtgtggtgactcatgcctgtaatcccagcactttgggaggtcgaggcgggcagatcatgaggtcaggagatgagaccatcttgactaacatggtgaaaccccgtctctactaaaatacaaaaaattagctgggtgtggtggtgcattcctgtaatccccgctacttgggaggctgaggcaggggaatcgcttgaacccgggaggcggaggttgcagtaagctgagatcgcaccactgcactccagcctggcaagagcaagactctgtctcaaaaaaaaaaaaaaaaaaagaaaaaatagatgaactatggttcatcagtttccatgggcctttgcctttggttatctttatttctgtacttgttctattgttgtatcctctaggagagtaagttttatgataaattaagattgaaacctatgggggaattaatttgctgagtatgtaggctacagtgttttctttgtagactctattagccactttgactaatagagataatatactctttatatgtgtgtgtacacacatgtatgtatgtacatacacatgcaggtatgatatgtatgcatatatgtataaatatacatgtgtatgtgtatatatatatgaatcactgaagtcctagcagaaaggttttgagacttctcatttaataaatagtatgtactaacaaattttgcagtatagctgttgcttcaaaagtatacctggccatttttgatacacagttggactctttgtgaccaagaagcatacctctttctacctctgagacctttagggactcactgctgattgattgcagtctaaactcttcagcatagcttttgtaacctttctctgtttgccacaactttgtcaatactttaactcaccattcaacatcttgtataccctatactaaatagaagtgaattactcaccctttttttttttgagatggagttttgctcttgtcgcccagggtggaatgcagtggcacgatctcggctcactgcaatctttgcctcccaggttcaagcgattctcttgcctcagcctcccgagtagctgggattacaggcgcctgccaccacacccggctaatttttgtatttttagtagagacggggtctcaccacattggccaggctggtctcgaactcctgacctcaggtgatccacctgcctcggcctcccaaagggctgggattacagatgtgagccaccatgcccggcctactcaccattttctaaactccctcacactttactctagttcttcattcatactgttctctactgagattgtattctgttaaactccttcaaactcctattcgtctttgaagacctattttcaaataccaattctaggctgggtgctgtggctcacgtgtataatcctttgggaggctgaggtggaaggattgcttgagaccatcatgggcaacatagtgagaccccatccctaccaaaaaaaaaaaaaagattacaaatttcaaataccaatttctctgtgatatgttgttattcatacattcaatccagaagtgaactctccttcctttgtgttctgtttctttaatgctttgggcccattttaatgacagtcaaccatatttgtgcccgaattaatgtagttaatttgtgttcttacctcttttccatctgggaatctgaattatgttaaatgccattaaaactaaatgccattaaaactaaatgtcattaaaactaattgatctgagattatacatagtgagttcttattttgtattctgtagattccatgcaatggaaaagcagctgatcgcatccatcaggatggaattcatatccttgtaaatatgaatggctatactaagggcgctcgaaatgagctttttgctctcaggccagctcctattcaggtaaacaaattaacagtcatcacttataacatgtatttggctaagaatacagtgaggtgctgcttttcctccctctggttaactgatatttgaaactgtagggcagacatacttttaatttttttaagttgttgaaatgcacaggacaaaaagagtgtagagcacagtgcttataggtacatgtatatagagacatgcaattcatggttggctatgaacagttactctgtcttgcaaatttgaagaacattttagcattttgaaagttagtctgaaatacaggccgggtatggtggctcacgcctgtaatcccagcactttgggatgcttaggcaggaggatctcttgaaaccaggagtttgagtcctgcctgggcaacaaagcaaaacaccctatctctacaaaaaattaaaaaattagccagagtggtggtgtgcctctgtgatcccagctatttgggaggctaaggtggaaggattgcttaagcttaggagtttgaggctgcagtgaactatcactatgccactgcactccagcccaggtgacagagtaagagtctctcttatagaactgcttcattgctttcggctaaagaagtcagccttgctgtgcgtgtggcaagtgcctgtaatcctggctactctggaggctgaggcagaaggattgcttgagcccaggagtttgaggctgtagtgatctacgattgcaccactgtattccagcctagggaacagagtgagatcctgtctctaaaaaagagttagacctccttgtttatttacttatttaattttggcacctttaggttctttttttaaaaaccactttattgaggtacagttgacatacaaaaagttgtacatatttaatgtatgtgacttgatgaatttagaggtaagtgtactgataaaagttcttaatcagtttttgatctgatttttttaaggcaatgtggctgggataccctgggacgagtggtgcgcttttcatggattatattatcactgatcaggaaacttcgccagctgaagttgctgagcagtattccgagaaattggcttatatgccccacactttttttattggtgatcatgctaatatgttccctcacctgaaggtaggtatgaaacagtgctatggacgaatttcaaagaactgtagctttttatttccttgctattgtctatgtaaatcctaaaagacatgtctgaaactattttttccattagaaaaaagcagtcatcgattttaagtccaatgggcacatttatgacaatcggatagttctgaatggcatcgacctcaaagcatttcttgatagtctaccagatgtgaaaattgtcaaggtcagaacctagtcagtattgtcattgaaataaagttaactgcattcacgatcttttccctaatgatgcatttttttttcagatgaagtgtcctgatggaggagacaatgcagatagcagtaacacagctcttaatatgcctgttattcctatgaatactattgcagaagcagttattgaaatgattaaccgaggacagattcaaataacaattaatggattcagtattagcaatggactggcaactactcaggtgagaagataataatacaccattatatgtcccgccaagtatgcatttatttcccttaacctcatgataactctaggaggcaagtatcattatcaccatttttatggatgaggaaatgagtttagtggaaacgtgcatcttatataggtgtgtctgattttaaaagtctcctggattcagccagcagattattacttactgagaaactgctgtgttaatatcttgttattccctgcctgtggctttactctcttacatgatgaactatgtgtagattccatacagtttcttgcttctgtaaacccatcctttccctagctaaatcctactcaaacgttcagttcagacagctcttccaggaatccatttccgtacttaccgctaacgtctccatccctacttcattggtacctgtcttttatacctctgtaatgtttggaatatatcattacatacagcacaacagatgataattccctgtgtttgtatcctctactgaattgaattactgagcccatgtcttaatcacagtaatgtagtatgtactcaataaataatatattgcatgcttaaataagtagctctatcaagagagtgtaaggcaaagatctctgacctctagaggtcatagatgtccttgcacacctggaatagttatataacaatgtaaggcagtactcaaatgtgtgagaattacaagatgaaactaattatgtatgtagaagctcagaaacggtgaggatcaatgtgaagagagacactcttgggagaagagaccatttggaggagtaatttagccttgaagagtagatgtgatttagaaaaggacatttcattcatgaagaaaagagtgatcaaaagctgttggaacgttaataggattttgagaccttttttggttagagcaagaagtttcatagtgcagtctcccccaacttaagataatgctgcaacggtttgccttttcttaaacttcatatatcatgaatattttctcatggttcagtgacttttaatggttataccattttggatcttatggattgaaatattggactccttttgcctttaaatataaccatcatttttttcttgttctagatcaacaataaggctgcaactggagaggaggttccccgtaccattattgtaaccacccgttctcagtacgggttaccagaagatgccatcgtatactgtaactttaatcagttgtataaaattgacccttctactttgcagatgtgggcaaacgtgagtatgcaagtatgttagagactaataaagattttgtatctagagcttcttgctgaagatggtccttccactcccatttaggagctgttctgctcatttctttttaaaatttttttttggctgggtgcagtggctcacgcctgtaatcccagcactttgggaggctgatgcgggtggatcacctgaggtcaggagcttgagaccagcctgaccaacattgcaaaaccccgtctctattaaaaataccaaaaaattagccggacatggtggtaggcacctgtaatcccagctactcgggaggctgagacaggagaatcacttgaacccgggaggtggaggttgcagtgagccaagatcgtgccattgcactccagactgggcaacaagagcaaacctccatctcaaaaaaattttttttaaaaatactttttaaaaaatttattttatttatttacatgtgactcaactgggttatgccctttttttaaaaaacagaatctcactctgttgttcgggctgcagtgtagtggtgtgatcttggctcatggcaacctttgcatcccaggttcgagttattcttgtgcctcagccttccaagtagctgggattacaggcatgtgccaccatgtctgggtaatttttttttgtatttttagtagacggggtttcaccatgttggctaggctggcctccaactcctggcctcaagagatctgcccgccttggcctcccaaaatgctaggatgacatgtgtgagccaccgcacctggccttgtgctcatttataatcttcaagagatgtagatttttcaggcatttttggtttctccttccagtgtctaaatatgacattgtgaaccttttaaatttacatattcaaagcattcttctgtctaaagggtcagcaaactttttcttaaagggccagatggtaaatattttcagttttgtggtccatgctgtttcacgtctactcagctttgccgttgtagcacgaaaataaccataggcattttgtaaatgatgagtgtggctgtgttccaataaaattttatttatacgaactggcagtatgccagatttggctcacaggctgtgtagttcgccaactcctggtctaaactgatagcatatgctgtcatgtacatccacccatttttaacattcttgtagtattgtagagttataaccaagaaggagtcgatctgtacatatgattatctctcagttcatcagacaagtttgcataagtgggatatcggatagctataactggctcttaatccatagaactaaaataaaatggcatgttttacctttaggtaatctggagataattccttggttaattttttccccgatatctgttttgttttatgtttagaggagaggggaggatagaagagaagaggaagcagatgagtacaggtctactgtccttaatccttacttcctgatgttcacaaaaactctgaaaatcaaaagctttttcataagtgtgtggcaaatttgtttggcagcaaaactacctgaactaacattagggtatatattagtccgttttcatgctgctataaaggactgcccgagactgggtaatttataaaggaaagaggtttaattgactcacagttccgcgtggctatggaggcctcaggaaacttagagttacggcggaaaagggagcaaacatgtccttcttcgcgtgatggcaggaagaagggctgagccaaagcggggaaagccccttataaagccatccgatcttgtgagaactcactctctatcacaagaacagcagcattggaaataactgtccatgattcaattacctaccactgggtccctcccatgacacatggggcttatgggaactgcagttcaagaagagagatttgggtgggggacacagtcaaactatgtcagggtatttgtagtcttttatttatttcatttagtatgactgttcctgcatctcaatgcagaggtactaatatgtttataggaagttgctgctgagggtgttaatgtgatacatacacacacagtactacttttttaaaatctgaaatattctgaatttggaaattcatctgttctcatagctttcagagaaagggattttgaacttacatggtacatagagtagatgtaaatctaaatcaggagttggcaaactatgacctgtgggtcaaatccagcccactgcttgtttttgtaaataaaacttaatggacacatagctatgcctacttgtttacacattgtctgtggctgctttcaagctacagcagaagaactgagcagctatgacagtccatgtggccacagaaccaaaaatatttgctatctggccctttacagaaaagaccgatttatattaggcaaagaaagttaggcaagtgtgaggtaactttcttggttgtatcatagtgggggatttgaaatttggaatgcaaaattcctctctcagcaaaacccactgcctgtgtcaattcccgcaggaggtagctgcctcagattttgcctgtctttctttgaactcactttgaggacagctaagcagaagagggataattcaattgatctcattcatctctgtgaaggaaagacttaagtccacagcaggcttctatctggatggaaagaatagagtgtggtagaattattagagacctctgggagtctttgttgaaaaaggcagatctgctattaataattattcttattttccctattttagattctgaagcgtgttcccaatagtgtactctggctgttgcgttttccagcagtaggagaacctaatattcaacagtatgcacaaaacatgggcctgccccagaaccgtatcattttttcacctgttgctcctaaagaggaacacgtcaggagaggccagctggctgatgtctgcttggacactccactctgtaatgggcacaccacagggatggatgtcctctgggcagggacccccatggtgactatgccaggtaagttgctgataaatcactggaatcttccttgttcctttgaaaatctccgtttgggggagaaacttccaggtgaaattatatgtactaggagcaacattaaaggaaaggtgatagaaagtgagacttgttctcacttcattctcttcatctgcgttgtgtggaggcttaacataaataacattaactctgtgctgttttacgttctcagatgtgcagttgttatcttttgtattacaggagagactcttgcttctcgagttgcagcatcccagctcacttgcttaggttgtcttgagcttattgctaaaaacagacaagaatatgaagacatagctgtgaagctgggaactgatctagaatagtaagtaaacttttccttgaacaaattatttggtaaagtagagagaatatagctgttataaaatgaaaccataaaataagtgtaatataaaataggtgaactagttgtatgccctctggatgggagaagtacttctaaactcttagaaatgaagtgatcaataggttttactatgtaaaaagtaaatggctgaataaaaaatattcaagaaaattaaaaagcaaacgaggggaaaaaatcttttgtctcagataacaaagtattaattacctggcaatgtaaagactgcagaacatttaaattttataatcccctaataggaaagtaaaaatggaaatgaccagacacctcactgaagtggaaatacaaaaggttaacaagaaagtgtttcaggctctgtagtagaaatgccaattaaaatggaattgaggctgggtgtggtggcttatgcctgtaatctcagcactttgggaggcttaggcgggcggatcacttgagatcaggagttcgagaccagcctggccaacatggtgaaaccctgtttctactaaaaatacaaaaattagttgggtgtggtggcatgtgcctgtagtcccagctactcaggaggctgaggcaggagaatcgcttgaacccgggaggcagaggttgcagtgagccgagatcgcaccattgcactccagcctgggtgacatagtgagactctatctcaaaaacaaaaacaaaaacaaaaacaaacaaacaaaaaaaaaaccaaacaaacaaaaaaaaccaaaaaaagaacctgaggtatatccattatttgcctatacaataaaaagattttttgtatcagtgaggtagcattgaggactagcctttttatgcattggtgaataaattggtacagcccttcctcagagtttttagagccttaaaagttagatctttgggccaggtgcggtggctcacgcctgtaatcccagcactttgggagggcgaggtgggcggatcacgaggtcaggagatggagaccatcctggctaacacggtgaaacccccctctactaaaaatacaaaaaattagccaggcatggtggcgggcgtctgtagtcccagctacttgggaggctgaggcaggagaatggcatgagcccaggagacggagcttgcagtgagctgagattgcgtcactgcactccagcctgggcaacagagcgagactctgtctcaaaagaaaaagttagatctttgaccctaatactgtcacttcttcactacggtcggtgtaagaaataaacaaagcataacttaaatgcctgaaaatgagtaggaattagaggggtgatgcttagatgaggaggatttatccatacaataaactagtatttctttcattcttttattttttttgagataggattttactctgttgcctaggttggaatgcagtggggtgatcttggctcactgcagcctccacgtcctgggctcaggtgatcctcccacctcagccacctgagtagcagggaccataggactataggtacatgccaccatgtcccatgcctggctaatttttaaatttttttgtagagattaagtttcaatatgttgcccaggctggatatttcttttttcttttccttttttttttctggacggagtctcgctctgtcgcccaggctggagtgcagtggcgcgatctcggctcactgcaacctccacctcccgggttcaagcaattctcctgcttcagcctcccgagtagctgggactacaggtgcacgccaccacgcccggctaatttttgtatttttagtagagacggggtttcaccatgttggccaggctggtcttgaactcctgacctcgtgatccacccaccttggcctcccaaagtgctgcgattacaggagtgagccactgtgcctggcgtttttttttttttttttttttttttggagacagcctcgcactgttgcccgggctgaagtgcaatggcacgatctcggctcactgcaacctctgcctcccgggttcaagcgattctcctgcctcagcctcctgagtagctgggattacaggcatccaccaccacatccagctaatttttgtatttttagtggaggctggatttcactatgctggccaggctggtctcgaactcctgacctcgtgatccacccaccttggcctcccaaagtgctgggattacaggcataagccaccgtgcctgacgggtatttcttaaatgaggtttttctttcggtataatgggtgatgttttttctttgtgtttttctgagaagtagcatattacataataattaaagaaacatactttttgagtcagactacctgagtgaacccaagctctcctacttatgagttttgagactttgggcaaataaatctctgtgttgtgccttggtttcttcttctgcaaaatggagcataatgctagtgcctactttgcagagatgatgtgaggattaaaaaaggcattccatgtaaagtacttagaatagttgttggtatctggtaaacattcagcagatgttagctacttattattttcagaatttcctccatagaacatcacatacgtctaagaaaagtgagaaatttgaacccaggcattaaaaaaaaaataagattcatgtccattagcccagagataactatagtaaaaaatgtagtgcgttttattttcagacagggtctcactctgttaactcaggctggagtgcagtggcatgatcacggctcactgcaacctctgcctcctgggatcgagtgatcctcccaccttagccttccagtagctgggactacaggcacatgccaccatgcctggcttttttttttttttaatttaatattttgtggagacagggtctcaccaatattgcccaggctggtaactcctgggcccaagcagtccacccacctcggcctcccaaagtggcgggattacaggcgcgtgagacactgcacccagcctgtggtgcattttaaaatttttattagactctttggtacttagtttggttcatacaatgcttttcctcaacatttttgttctcaaaatttttaattttataataaacacatctatacctactgcttagaatctaccattagcattttactattcttgctttattacatatctattcatccatttattccctttattcatctgccaatccatcttattggacacattttgaaataaattgcagacatcagtacacttctccttaaatacttaagattggctgtcattaactggagttcagtacacatatatttttttgaggtagggtctccctctgtttcccaggctggagtacagtgatacgatctccgctcactgcaacttccgcctcccgggctcaagcagtcttcccctcaaactcctgaatagctggaaatacaagcatgagccaccacacctagctaatttttgtatttttagtagaggcagggttttggcaggttgcccaggctggtctcaaactcctgacctcaagtgatccacctgccttggcctcctgaagtgttgggattacaggcgtgagccactgcgcctggccatttttttcttttgaggcggaagttatatacagtgaaatacacaaatattcagtgagttttgagaaataacccttttttttttcgttttgaaacggagtcttgctctgtcgcccaagttggagtgcagtggtgtgatcttggctcactgcagcctctgcctcctgggttcaagcgattctcctgcctcagcctcttgagtagctgggactacaggcacgtaccaccacacccggctaatttttcatatttttagtagagatggggtttcaccgtgttagccaggatggtcttgatctcctgaccttgtgatccacctgcctcggcctcccaaagtgctgggattacaggtgtgagccacagtgcccaaccgagaaatacctttgtaacccaaattcctatgaagacaaaaaacattatcactccagagagtttcttcatgctccttatcagtcagtctttttcaccaacccccagagacaaccactgttctggagggtttttttcccttccataaattagttttgcttttctagaattttatccaaatggaactatgtcaatatgcactctaaaggcttctttcatcaagtttatttcttttgctgagtagtatttcactgtatgaatgcactacagtttattttcctattggcatagaattttaaaaaaatagagtgcacaggtctttctctttggagggtagcattaatatggacatggttgtattgagaccaacagatatgcacaaccattttactgcttctgtcacaacaaacattaaaacaaagttgggcgtggtggcgcatgcctataatcccggcgctttaagaggctgagggaggaggattgcttgagcccaggagttcgagaccagcctggacaacatggcgagaccccatctctacaaaaaatacaaaaatagctgagtgtggtgatgcgtgcctgtagtctcagcttcccgggaggctggggcaggaggattgcttgagctaaggaggttcagtctgcagtgagccatcatcgttccattgcactccagcctgggcaacagagtgagactctatttcaaaaattaaaagaaaataaataaaaattattgcttttaaaaatgcacagaaatgttctggcttctggttctaaagtatttatcccttcatctaagaataatctcatgaaaaatatattcaaaagggaagtagaaatcttttcccctgtgtttcctgaagaatcaattacttcttttttatttttctgaacagaaccatactcttggtgatattagcaatttttaaaaatctgaactcagttcaggtacaagtggaaaattacgagagtagacttattgtatttcttttccccttgagtggttttctgtttcatcaaaatgaccataaatcgaatacttcatcttatgtttatgctttaacttttgtaaatgatgcttcaatgaatatctttgcatggtcctgtatgtttttgcatctgattatttctttttaatagattttaaagtgttactgttaggccagagggttatgaacatttaaggttaatacatacttgctaaattgcttaccaaaaaggtaagcaacagtacataggaatagtcatgtgccgttgtcaattcttgttattttaaaggtagaaacaagacgaaatggagaacgcgtggtatcccttggatatacttgtttaggaaagaactaagttttttcagagtatatggagttgagctcatttcagtgttagcattatgcaagatgtgacccttccctttttagcacgaagccaatcaagaaatgagatagcgtagagtttggtcatgcattttttgccacaaatgcgactaggtatttatagggtgtgtttctgagtttctgctctgatttgtaaactgggttcttgttttttattacccagcctgaagaaagttcgtggcaaagtctggaagcaaagaatatctagccctctgttcaacaccaaacaatacacaatggaactagagcggctctatctacagatgtgggagcattatgcagctggcaacaaacctgaccacatgattaagcctgttgaagtcactgagtcagcataaataaagactgcacaggagaattacccctatacctgagcctcaaccttctgggggaaagggaactagataacatacttcttacttgtctgtacagtaccttgttgcagatgggtgatatataatggtaatagaatagcacagccagacttgcttcctgcatggtagggagagacacaaaagatgggaaactgcttttccacaaggaatctccgtagaattttgcggcgaccagatggtgcataggtctggaaggtctgatctcccttggtcttccatgggatggttagtgtggaggggagatatagattgtccggccgctttgtgattccatggattgattcagtcttctggatttttttttctttatattttgggtactggagcttttaaaaatgtttggtttcaggtatttttattcatgtgaagtgtatatgattctcttgagataaggttttaagctaaaatgttactccctgttttagtttctgaactctgacagattgacagggactttgctggtgtagtctttttataggttttataaaccacttgagcctatatcagtcgttttagtgtctgacctaatatttggagctatcagtgctttgttgatttagatgatgactcaagattttttctggtccatttcccatttccttttcttccctgacccccataccctcacccttaaaattctcctgtaactcaactaacaaaatcaagcctgattcaaaacatcctagggtgttttaaacacaccatctggtgccaaatgaagatttttaggagtgattactaattatcaagggcacagttgtggtactgtcattgataataatatagtttttttttttttcctaattttgacctgtttcaccagtgttttacccttgactgccccttctatgctgcttccaaaagtgatagtgtgtgtaagatttttaccttcctttctaaagttttttttttttttttttaagtgagtcctgttcttcctatttctttcagcagaaatgaaatcccaggtaagtataagtattcaagtatttgatcagtaagtcacagttatctccagtgcattaaataaccttcatcaagaaataggttataggtaaaatctctgaaggatcatctatgtattcaagtaattattttttagataataactgtcttctggacttggtcttgaagtctgtacagattcagcctcagtagtagcgaactgcactgctgtttggtttggagtacaaattagacttatagtcctcctggaacttgagttattaaaatcataggaataaaattatgggatctcaacaaagggtcgagggtttgaggcttaaacaagccaacatatgaatatatgttttgtctcgctatactgcacttacgctatccagttgcaggtaattttttgtctgctagtagtgttctagattatgtctttccaaagcgctgaggctgtgcacctattctgtagttgcagctgatgcctgaatgtatcctagctgacaaattattgattaataagaacttgaatttctggaagattcttactgttaaccaaattttgagcaaggagtctcaaaggtaattctgaaccagaattacatgttaatgaacagtgtaccttttaacagtgtaaatcacggaatatccgtgaagggatttcttaatttattttttaccggttgattgaaatatcagttaaaggttgccagcatggttgcagataaactgatgtttgaaattcgctgaaatacttaatgtggaataggataatatacttccaatgccctcaaggctgtgaccttacagccattttacatagcacatcattcctcctatagggatgaactttttcctggcacgaaaagtagccgctctggttgaagctttgcttattgtaacaggcttttatttccaggtaatatgtcttggaagacttaattctgattagagatatagatattactggaaactaattgttttttttctattgtactctgctttatcaaagaagtaaaacatttaaatcgtactacagaaattaagatgttgtcttgcgatccttaataaatgaatgatttccctttaata

SEQ ID NO: 23981 - DNA, 6536 bp, Homo Sapiens
cccaaagaggaaacatacccagcaaactcagttgattaaacatcaaacagacatacagacagatcccaaatcttctgttcaactggaaaggtcttttctctggagtcctgggaggcaagttatgggcagcactgcttctggccgcaccatgaagcctgagtctgcttgcgctctgcccagggccctgctctgtctgagcattgggcttctagctgcccccctccccacagcctgccgctgctaggaggtagaactttaggagtggtccttggcctgtttctacctgtcacctggctcacctcaccactcactcctcctccatcacagcaccccggccctccctgtccctggcctccctggctggggcatttgggggtccgctgggaggagtgcatcgctgaaggcttcttcctactctcctgcaccttctcctccttgagtcaaggcctccggatccacatggatagctgagatcttttcttggagaaagacgctttcctctttactccagtccctcacttccccacctgattttcctcctcttctgctggtcctgtctttttctactgcctctttattcaatttcttgcttgtgtgcccctctgggactctcttgtacactttcctccatctccactatctcaggatctgtgtgtgtgctgccttcctcctgtgtgctttctgtccccccatctctgtcttgtctttcccacttctattgccaaagggagagatcctctccgggctgttccctggcctgtctgctcctccgggctctgtcccagcagcgacaatgagctccacactccactcggttttcttcaccctgaaggtcagcatcctgctggggtccctgctggggctctgcctgggccttgagttcatgggcctccccaaccagtgggcccgctacctccgctgggatgccagcacacgcagtgacctgagtttccagttcaagaccaacgtctctacggggctgctcctctacctggatgatggcggcgtctgcgacttcctatgcctctccctggtggatggccgcgttcagctccgcttcagcatggactgtgccgagactgccgtgctgtccaacaagcaggtgaatgacagcagctggcacttcctcatggtgagccgtgaccgcctgcgcacggtgctgatgcttgatggcgagggccagtctggggagctgcagccccagcggccctacatggatgtggtcagtgacttgttccttggtggagtccctactgacatacgaccttctgccctgacccttgatggagttcaggccatgcccggcttcaaggggttaattctggatctcaagtatggaaactcggagcctcggcttctggggagccggggtgtccagatggatgccgagggaccctgtggtgagcgtccctgtgaaaatggtgggatctgctttctcctggacggccaccccacctgtgactgttctaccactggctatggtggcaagctctgctcagaaggcctctcccacctcatgatgagtgaacaaggtagaagtaaagctcgagaggagaatgtggccactttccgaggctcagagtatctgtgctacgacctgtctcagaacccgatccagagcagcagtgatgaaatcaccctctcctttaagacctggcagcgtaacggcctcatcctgcacacgggcaagtcggctgactatgtcaacctggctctgaaggatggtgcggtctccttggtcattaacctggggtccggggcctttgaggccattgtggagccagtgaatggaaaattcaacgacaacgcctggcatgatgtcaaagtgacacgcaacctccggcaggtgacaatctctgtggatggcattcttaccacgacgggctacactcaagaggactataccatgctgggctcggacgacttcttctatgtaggaggaagcccaagtaccgctgacttgcctggctcccctgtcagcaacaacttcatgggctgccttaaagaggttgtttataagaataatgacatccgtctggagctgtctcgcctggcccggattgcggacaccaagatgaaaatctatggcgaagttgtgtttaagtgtgagaatgtggccacactggaccccatcaactttgagaccccagaggcttacatcagcttgcccaagtggaacactaaacgtatgggctccatctcctttgacttccgcaccacagagcccaatggcctgatcctcttcactcatggaaagccccaagagaggaaggatgctcggagccagaagaatacaaaagtagacttctttgccgtggaactcctcgatggcaacctgtacttgctgcttgacatgggctctggcaccatcaaagtgaaagccactcagaagaaagccaatgatggggaatggtaccatgtggacattcagcgagatggcagatcaggtactatatcagtgaacagcaggcgcacgccattcaccgccagtggggagagcgagatcctggacctggaaggagacatgtacctgggagggctgccggagaaccgtgctggccttattctccccaccgagctgtggactgccatgctcaactatggctacgtgggctgcatccgcgacctattcattgatgggcgcagcaagaacattcgacagctggcagagatgcagaatgctgcgggtgtcaagtcctcctgttcacggatgagtgccaagcagtgtgacagctacccctgcaagaataatgctgtgtgcaaggacggctggaaccgcttcatctgcgactgcaccggcaccggatactggggaagaacctgcgaaagggaggcatccatcctgagctatgatggtagcatgtacatgaagatcatcatgcccatggtcatgcatactgaggcagaggatgtgtccttccgcttcatgtcccagcgagcttatgggctgctggtggctacgacctccagggactctgccgacaccctgcgtctggagctggatggggggcgtgtcaagctcatggttaacttaggcaaaggaccagagaccttgtatgcagggcagaagctcaatgacaacgagtggcacaccgttcgggtggtgcggagaggaaaaagccttaagttaaccgtggatgatgatgtggctgagggtacaatggtgggagaccatacccgtttggagttccacaacattgaaacgggaatcatgactgagaaacgctacatctccgttgtcccctccagctttattggccatctgcagagcctcatgtttaatggccttctctacattgacttgtgcaaaaatggtgacattgattattgtgagctgaaggctcgttttggactgaggaacatcatcgctgaccctgtcacctttaagaccaagagcagctacctgagccttgccactcttcaggcttacacctccatgcacctcttcttccagttcaagaccacctcaccagatggcttcattctcttcaatagtggtgatggcaatgacttcattgcagtcgagcttgtcaaggggtatatacactacgtttttgacctcggaaacggtcccaatgtgatcaaaggcaacagtgaccgccccctgaatgacaaccagtggcacaatgtcgtcatcactcgggacaatagtaacactcatagcctgaaagtggacaccaaagtggtcactcaggttatcaatggtgccaaaaatctggatttgaaaggtgatctctatatggctggtctggcccaaggcatgtacagcaacctcccaaagctcgtggcctctcgagatggctttcagggctgtctagcatcagtggacttgaatggacgcctgccagacctcatcaatgatgctcttcatcggagcggacagatcgagcgtggctgtgaaggacccagtaccacctgccaggaagattcatgtgccaaccagggggtctgcatgcaacaatgggagggcttcacctgtgattgttctatgacctcttattctggaaaccagtgcaatgatcctggcgctacgtacatctttgggaaaagtggtgggcttatcctctacacctggccagccaatgacaggcccagcacgcggtctgaccgccttgccgtgggcttcagcaccactgtgaaggatggcatcttggtccgcatcgacagtgctccaggacttggtgacttcctccagcttcacatagaacaggggaaaattggagttgtcttcaacattggcacagttgacatctccatcaaagaggagagaacccctgtaaatgacggcaaataccatgtggtacgcttcaccaggaacggcggcaacgccaccctgcaggtggacaactggccagtgaatgaacattatcctacaggcaacactgataatgaacgcttccaaatggtaaaacagaaaatccccttcaaatataatcggcctgtagaggagtggctgcaggaaaaaggccggcagttaaccatcttcaacactcaggcgcaaatagccattggtggaaaggacaaaggacgcctcttccaaggccaactctctgggctctattatgatggtttgaaagtactgaacatggcggctgagaacaaccccaatattaaaatcaatggaagtgttcggctggttggagaagtcccatcaattttgggaacaacacagacgacctccatgccaccagaaatgtctactactgtcatggaaaccactactacaatggcgactaccacaacccgtaagaatcgctctacagccagcattcagccaacatcagatgatcttgtttcatctgctgaatgttcaagtgatgatgaagactttgttgaatgtgagccgagtacaggtaggtcagccagaagctctaatgcagctagatcactccgtgccgcccttacatggacatggcgactcacttacacatttactcctatcatcttcatctcctgtgtagttcactcatagatatgaccctccccttcctgcatctttccttcccattctccccctttctttagcattgttaaaatttatgtgctgtcatccatctccctaaattaaagaaagcctaaaatttgtcaaaaagacaaaaaaatatatatatctgaaaacttataaatgcagaaattcattcaaaacccgttagagtcatagaattttttgaaaggcaaattataaaagtaaacaggtttttttgtttggtttttcaatcatagcaatcggaattattttaaattcaaaaattgatgccctcccaaaccccccaaagtaaaaatttgttaaagtgcagattttttttttctttttatgttatgtggtgtggatgtatgtgttgttgcctccctgtatcatcctctgttgtaaattattatatttgaaaaattagacattttgctcaaaagtttttaagaaatgacaacaaaaaaagcaagttacaagaatgtggcaattctatttgtccaagagcattcttacacaactttcttttgtaaatttttctttcatgccaaaaaacatgcgggcaatttgttgatgaggtgaattagttatccctcttcttgtagaagaccctttagctacccctcctattgctactcgtgcaccttccattacactcccccctacctttcgccccctcctcaccattattgagaccaccaaagattccctgtccatgacctctgaggcggggttaccttgcttgtcggaccaaggcagcgatggttgtgatgatgatggcttggtgatatctgggtatggctcaggggaaacctttgactctaacctgccccctactgatgatgaagatttttacaccaccttctccttggtaacagataagagtctttccacttcaatcttcgaaggtggctacaaagcacatgcgcccaagtgggaatccaaggactttagacctaacaaagtctccgaaactagtaggactactaccacatctttatcccctgagctgatccgcttcacagcttcctcctcgtctgggatggtgcccaaattgccagctggcaaaatgaataaccgtgatctcaaaccccagcctgatatagtcttgcttccgttgcccactgcctatgagctagacagcaccaaactgaagagcccactaattacttcccccatgttccgtaatgtgcccacagcaaaccccacggagccgggaatcagacgggttccgggggcctcagaggtgatccgggagtcgagcagcacaacagggatggtcgtcggcattgtggctgctgccgccctctgcatcttgatcctcctgtacgccatgtacaagtacaggaacagggacgaggggtcctatcaagtggacgagacgcggaactacatcagcaactccgcccagagcaacggcacgctcatgaaggagaagcagcagagctcgaagagcggccacaagaaacagaaaaacaaggacagggagtattacgtgtaaacatgcgaacactgctcacacgcgagttttcacagttatttctatccacgcctatgaatctttggacgg

SEQ ID NO: 23982 - DNA, 3781 bp, Homo Sapiens
tccgcggtcttctctctccacccccgacaccgcggggctccccccgcccgcccacggcgggccccggctgcccgatccccctcgcttcccgcgctctccagcggggccccagccccggccccctctctccctcccttctctctaattccccttccggacgctgccatcatgttgaagcctcagccgctacaacagccctcccagccccagcagccgccccccacgcaacaggccgtggcccgtcggccccccgggggcaccagccctcccaacggcggcctcccggggccgctggccacctctgcggctcctcccgggcctccagcggccgcctccccctgcctggggcctgtggccgctgccgggagcgggctccgccggggagccgaaggcatcttggcgccgcagccgccgccgccgcagcaacaccaggagaggccgggggcagccgccatcggcagcgccaggggacagagcacaggaaagggacccccacagtcacctgtgtttgaaggcgtctacaacaattccagaatgctgcatttccttacagctgttgtgggctccacttgtgatgtaaaggtgaaaaatggtaccacttatgagggtatcttcaagacgctaagctcaaagtttgaactagccgtggatgctgtgcaccggaaagcatctgagccagcaggtggccctcgtcgggaggacattgtggacaccatggtgtttaagccaagtgatgtcatgcttgttcacttccgaaatgttgacttcaactatgctactaaagacaagttcaccgattcagccattgccatgaactcgaaagtgaatggggaacacaaagagaaggtgcttcagcgctgggaggggggtgacagcaacagcgacgattatgacctcgagtctgacatgtccaatggatgggaccccaatgaaatgttcaagttcaatgaggagaactacggtgtgaagactacctatgatagcagtctttcttcttatacggtgcccttagaaaaggacaactcagaagagtttcgtcagcgagagctgcgtgcggcccagttggctcgagagattgaatcaagcccccagtaccgcctacggatcgccatggagaacgacgatgggcgcactgaagaggagaagcacagtgcagtccagcggcagggctcagggcgggagagccccagcttggcatccagggaggggaagtatatccctctgcctcaacgagtccgggaaggtccccggggaggagttcgatgcagcagctctcggggcggtcggcctggccttagctctttgccacctcgtggccctcaccatctggacaacagcagccctggcccaggttctgaggcccgtggtatcaatggaggcccttcccgcatgtccccaaaggcacagcggcctctgagaggtgccaagactctgtcttcgcccagtaataggccttctggagaaacttctgttccacctcctcctgcagtgggccggatgtatcccccgcgttctcccaagtctgctgcccctgccccaatctcagcttcctgtccagagcctcccatcggctcggcagtgccaacctcttcagcctccatccctgtgacctcatcagtctcagatcctggagtgggctccatttctccagcttctccaaagatctccctggcccccacagatgtaaaagaactctctaccaaggaacctgggagaactctggagccccaggagctggctcggatagctgggaaagtccctggtcttcagaatgaacagaaacgattccaactggaagaactgagaaagtttggggcccagtttaagcttcagcccagtagctcccctgagaacagcctggatccttttcctccccggatcttaaaggaggagcccaaaggaaaggagaaagaggttgatggtctgttgacttcagagcccatggggtctcccgtttcctccaagacagagtccgtatcggataaggaggacaaaccacccctggcaccatcaggaggcactgaggggccagagcagcccccaccaccttgtccaagccaaactggcagccccccggtgggcctcatcaagggagaagacaaagatgagggccctgttgctgaacaagtaaagaaatcaacgttgaaccctaatgctaaggagttcaatcctacaaagcctctgctgtctgtgaataaatccaccagtaccccaacttctccggggccccggagtcattcaactccctccatcccggtgctgacagcaggccagagtgggctatacagcccccagtacatctcctacatacctcagatccacatgggaccagctgtgcaggcaactcagatgtatccatatcctgtatccaattcagtgcctgggcagcagggcaagtaccggggagcaaaaggctcccttcctccgcagcgctcggaccaacaccagccagcctcagccccgccgatgatgcaggccgccgcggctgctggcccgcctctggtggctgccacgccctattcttcctacatcccctacaaccctcagcagttcccaggccagccagccatgatgcagcccatggcccactacccctcacagccggtgtttgcccccatgcttcagagcaacccacgcatgctgacgtcgggcagccatccccaggccatcgtgtcatcctctacccctcagtacccttctgcagagcagcctaccccccaagccctttatgccactgttcaccagtcctacccacaccatgccacacagctccatgcccaccagccgcagccggctaccacgcctactggaagccagccgcagtcccagcatgcggcccccagtcctgtccagcatcaggcggggcaggccccacacttgggcagtggacagccacagcagaatctgtaccacccaggggccctgacaggcacgccgccctctctgccaccgggaccttctgcccagtcccctcagagcagcttcccccagccagccgctgtgtatgccatccaccaccagcagctgccccacggcttcaccaacatggcccatgttacccaggcccatgtccaaactggaatcacagcagccccgccccctcaccctggggctccccacccgccccaggtgatgctgctgcacccaccccagagtcatggggggcccccccaaggcgcggtgccccagagtggggtgcctgcactctcagcttccacaccctcaccctacccctacatcggacacccccaagttcaatctcatccctcccagcagctccctttccaccccccggggaactgaagattgtcctggccgcgacctgagacctccatgagtggagggaagagtgatctatgtctcttcccccagcagctcggaccactcccagccccccatccccccgttccccaggggagctggggaattcctgccaagcaccttgaatgggaggggcctcacagagggcagggccagggtccagcaggggtggggggttcctgttctgcccctgcccgtccccacccagtcttgccctcccatcctctcatctattcccccgctggagacggaagatcttttattttctattatttataacttcagacttgggccccctgttctttctttcccattaacttgagtgacctgtgtgagagacagacagatgccccacgaggatggctggacaaggacttttactttttattacataaaaatattaaaaaataaataaaaaaaataaaattttaaactaacttaaaaaaaaaaaaaaaaaaaa

SEQ ID NO: 23983 - DNA, 4834 bp, Homo Sapiens
gagccccgcatcccgccgcagctgccgcctcgccgcggccgggccggagagcacggcggcgggagcgcggccttaggaggcggccggagcggtgggcacagctcggcgcggagcgtcctgtcaggcggcggccgagggcgtcgcggactctccccgcgatgatgccgatgatattaactgttttcttgagcaacaatgaacagattttaacagaagttcctataacaccggaaacaacctgtcgagatgttgtagaattttgcaaggaacctggagaaggcagctgccatttagctgaagtgtggaggggaaatgaacgtcccataccctttgatcatatgatgtacgaacatcttcagatatggggtccacggagggaagaagtgaaatttttccttcgacacgaggactccccaactgagaacagtgaacaaggtggccgtcagacccaagagcaacgaactcagagaaatgtaataaatgtacctggagataaacgtactgaatatggggttgggaatccacgtgttgaacttaccctctcagagctccaagatatggcagctaggcaacagcagcagattgaaaatcagcagcagatgttggttgccaaggaacagcgtttacattttctaaagcaacaggagcgccgtcagcagcagtctatttctgaaaatgaaaagcttcagaaattgaaagaacgagttgaagcccaggagaacaagctgaagaaaattcgtgcaatgagaggacaagtcgactacagcaaaatcatgaacggcaatctgtctgctgaaatagaaaggttcagtgccatgttccaggaaaagaagcaggaagtacagactgcaattttaagggttgatcagcttagtcagcaattggaagatttaaagaaaggaaaactgaatgggttccagtcttacaatggcaaattgacgggaccagcggcggtggagttaaaaagactgtaccaagaactacagattcgtaaccaacttaaccaggaacaaaattcaaaacttcagcagcagaaggaactcttaaataagcgcaacatggaggtggccatgatggacaagcgaatcagtgaactgcgtgaacgtctctatgggaaaaaaattcagctgaaccgtgtgaatggcacgtcatcaccacagtcccctctgagcacatcgggcagggtcgctgctgtggggccttatatccaggttcccagtgccggaagctttcctgtgctgggggaccctataaagccccagtctctcagtattgcctcaaatgctgctcatggaagatccaaatccgctaatgatggaaactggccaacattaaaacagaattctagctcttccgtgaaaccagtgcaggtggccggtgcagactggaaggatccgagcgtggaggggtctgtcaagcagggcactgtctccagccagcctgtgcccttctcagcactgggacccacggagaagccgggcatcgagattggtaaagtgccacctcccatcccgggtgtaggcaagcagctgcctccaagctatgggacatacccaagtcctacacctctgggtcctgggtcgacaagctccctggaaaggaggaaggaaggcagcttgcccaggcccagtgcaggcctgccaagtcgacagaggcccaccctgctgcccgccacaggcagcaccccccagccaggctcctcacaacagattcagcagaggatttccgtaccgccaagtcccacgtacccgccagcgggaccacctgcatttccagctggggacagcaagcctgaactcccactgacagtggccattaggcctttcctggctgataaagggtcaaggccacagtctcccaggaaaggaccccagacagtgaattcaagttccatatactccatgtacctccagcaagccacaccacctaagaattaccagccggcagcacacagcgccttaaataagtcagttaaagcagtgtatggtaagcccgttttaccttcgggttcaacctctccatcgccgctgccgtttcttcacgggtcactgtccacgggcacaccacagcctcagccaccttcagaaagtactgagaaagagcctgagcaggatggccccgccgcccccgcagatggcagcaccgtggagagcctgccacggccactcagccccaccaagctcacgcccatcgtgcattcgccactgcgctaccagagtgatgcagacctggaggccctccgcaggaagctggccaacgcgccccggcccctgaaaaagcgcagctccatcacagagcccgagggccccggcgggcccaacatccagaagctgctgtaccagcgcttcaacaccctggccggtggcatggagggcacccctttctaccagcccagcccctcccaggacttcatgggcaccttggccgatgtggacaatggaaacaccaatgccaatggaaacctggaagagctcccccctgcccagcccacagccccactccccgctgagcctgccccgtcatcagatgccaatgataatgagttaccttcccccgaaccagaggagctcatctgtccccaaaccacccaccaaactgccgagccggcagaggacaataacaacaacgtggccacggtccccaccacggagcagatcccgagtcctgtggctgaggccccatctccaggggaagagcaggtccctccagcacctcttccccctgccagccaccctcctgccacctccacgaacaagcggaccaacttgaagaagcccaactcggagcggacggggcacgggctgagagtccggtttaaccccctggcactgctcctagacgcgtctctggaaggagagttcgatctggtgcagaggatcatctatgaggtggaagatcccagcaagcccaacgatgaagggatcaccccactgcacaacgccgtctgcgccggccaccatcacatcgtgaagttcctgctggattttggtgtcaacgtgaatgctgctgatagtgatggatggacgccgctgcactgcgctgcctcttgtaacagcgttcacctctgcaaacagctggtggagagtggtgccgccatttttgcctcaaccataagcgacattgaaactgctgcagacaagtgtgaggagatggaggaaggctacatccagtgctcccagtttctatatggggtgcaggaaaagctgggtgtgatgaacaaaggtgtggcgtatgctctgtgggactacgaggcccagaacagtgacgagctgtccttccacgaaggggacgccctcaccatcctgaggcgcaaggacgaaagcgagactgagtggtggtgggctcgccttggagaccgggagggctatgtgcccaaaaacctgctggggctgtatccacggatcaaaccccgacagcgaacactcgcctgaacttccttttggagcaccgcatggtcttgccagctaccaggagccacttaagagattattgtgctgttttccaggaaagctgcagctagaaaatggtcttaatggtgctcactttagcagacagcgtccacaatgtgaatcctacagtttccaggtgaggccctttctccagtttgcccattaactgggagaggtactttcgcctccaaggactgaattttgccaattactataaatccaaataaatacccactttcaaaacacccacccctcttgccattaagaagtcccataacccccggttggttgccagtgaagacagaagctcttactgacttggccccgaggccatcaccccctccagcagtgaacactgtccgccgctgtgaggcctgctcccctgcgaccgccctgccccccgtcaccgaatcggacactcatcctttctcacacttcccacacatgatccttcttcccttcatcaccaaaggagcctctgtatggaaacatgtccagtgttgctgcccagtgtgtatgcctcccagtacccactctgctcggccgccttgggggttccgcttcctgttccagttcacctaaaggctgattgtgcaggcccagcactgtggctggactgccgcgccacgggcaccaggacccctaagaccaagtgacaactgggagagcctcagcatatactcttctcctccgatctcacagcctgtcatgctgctcagtgtggttctcacccctgcaagctcaaattcagttccctgaatggagtcaggtgctggaggccgtggcagcggagggtggttggggttggggctgggggtggactggtgtgagggcagaccagggccaggtagacggggctgtttggtgcctgaaggatggcagacgcctggtgtcaggaggggccgccaccaaggagcagcagctggggcagaggagctggggtcaggggccacccctctctgccgatctccctgcctgggctggctgtgaggccacctttgtcccaggcccagcctcaaggcaaggagggcgcttcactgaggtgtgaattgtacgtacaggctttttatataccaaaagtattttttgactagaccattcaaagctacccgaactatgttggaaatttttttttttctcattaaaatacaggcccttaggctctatttttcatgtatgagtcgtgtgtaatttatgtaaaaatgtgtgtacagactcactgatgcagcactgtagcccatcaccttggagcactgactgtacatagtgtggtgaagaaaagtgaacgcccttgtagagcagcccgaccacaggagcatggccgctgccagcccagacgctgctgacgctgtgtaaatgtgcacaataaacccgtctcaccccgg

SEQ ID NO: 23984 - DNA, 1555 bp, Homo Sapiens
tggtgtttcgtccagaagtttcccccttggcggtggtggaggtggtaaccgtgatagtagcagctccggcggcagcaacagcgactacgagggatggcggcggctgcagcaggaactgcaacatcccagaggtttttccagagcttctcggatgccctaatcgacgaggacccccaggcggcgttagaggagctgactaaggctttggaacagaaaccagatgatgcacagtattattgtcaaagagcttattgtcacattcttcttgggaattactgtgttgctgttgctgatgcaaagaagtctctagaactcaatccaaataattccactgctatgctgagaaaaggaatatgtgaataccatgaaaaaaactatgctgctgccctagaaacttttacagaaggacaaaaattagatagtgcagatgctaatttcagtgtctggattaaaaggtgtcaagaagctcagaatggctcagaatctgaggtgtggactcatcagtcaaaaatcaagtatgactggtatcaaacagaatctcaagtagtcattacacttatgatcaagaatgttcagaagaatgatgtaaatgtggaattttcagaaaaagagttgtctgctttggttaaacttccttctggagaggattacaatttgaaactggaacttcttcatcctataataccagaacagagcacgtttaaagtactttcaacaaagattgaaattaaactgaaaaagccagaggctgtgagatgggaaaagctagaggggcaaggagatgtgcctacgccaaaacaattcgtagcagatgtaaagaacctatatccatcatcatctccttatacaagaaattgggataaattggttggtgagatcaaagaagaagaaaagaatgaaaagttggagggagatgcagctttaaacagattatttcagcagatctattcagatggttctgatgaagtgaaacgtgccatgaacaaatcctttatggagtcgggtggtacagttttgagtaccaactggtctgatgtaggtaaaaggaaagttgaaatcaatcctcctgatgatatggaatggaaaaagtactaaataaattaatttgctctcatcgtattgtgtatattcacctaatgcccattgtgtattgatattgcattcttgaattttgaacactgaatatctttttgaaagattatacttctttacctctttgtgctttagaaattattttccttcaagtgttcaagtctaatgaagaatgaagataacattttatcacttctgtccttaaagatttcagacatggtgaaactgaataaagcatgtcatttgctcctagatagattcattctatctagttgtggggatggagaaatctttaatggtatagttgtggggatggagaaatctttaatggtatattttcggttattgccttatttttgatacagtattctgtcagtaatttattagacctggcagctttgggtgagcttagatttttcaccttcagtgttacattgtgtttgcttttaaaaactgcttttga

SEQ ID NO: 23985 - DNA, 2843 bp, Homo Sapiens
gggccccagctgtctgcagttcttgcagttctgtagcgtttgtgcccagagctaaagtcccactggactcggtgttattatgtatgggagcacatggaagcggcctcttctctagaccagcgagattaggaaaggcttcccagaggaggggacacctgagccaaattctgcagggtgacaggagtagccagcagagggatgtggacaggggagcacgcggagcatatgcctctattccaggcagagagcacatcatgtccaaaggcccaaatttaagacatagattgggctgtggtttaagttcattttggtgaagtgtgggtgaaaaggttaatggcgctagatccccaagtgggagtcagattctgtaaggccttgtgaagagtttggactccatccagagtccacttgcgtttggatgtgtcagtcatgggggtgacctagtttgtgatacgagaaaataaaaaggtggctgtgtggagactgtattatggggataagactggaaaaaagaatacctgcctggaggaaatcactgaagctctctggtgtttgtgccttggtgcccaagctggttgtacctccctgactgccggagatgaccagcaccgaaaccgactgtcctgtaggatcccgagtgatcagtgtcacttgaggatggggtgctattccgtgttctgtaatgccttcctttctgtgaggccagcaggaactgtggttcgtttcagatgacgtgtctaaggtggcattcctgaccgtgaccctacaccaaggcggagccactcgcgtgtacgcactcatatctgacgcgcagcctctgctgctcagcaccttcagcggagaccgccgcttctcccgatttggtggcgttctgcacttgagtgacctggatgatgatggcttaggtaagaaaggaacaggaccctttgacaagaattgagtccctttgcccagggggtgggtcccctaattgggtcatctgggctctgcccttataattgacagcccagtggcccaaggacctttagacagatcttgaatgaggcaagaccagagagggagttgcacttcttgaagctggtaatatgagaatcacctgtagtaattgctattgatgaatgaagtaggaaacaaaagcctttgccaggatgaaatcacagccgactaaaggagatactaatattatttgtaagaggttgggttaggatccagtagcggaacaaggaaaagatgacagtgaggagtcaaatacttccttctgtcggtttttattgttttcagatgaaatcatcatggcagcccccctgaggatagcagatgtaacctctggactgattgggggagaagacggccgagtatatgtatataatggcaaagagaccacccttggtgacatgactggcaaatgcaaatcatggataactccatgtccagaagaaaaggtaagtgttctacaaaattctataacttattgggaaaggatcactaattgctgattccttgttaactcatgtccactataaagtgcttacctgaattcatacctcctagggtcaggacaccatcatctgtccatgttttgtgggccccagctgcctgcagttcttacagttctgcaacatttgtgcccagagctaaagtcccactggacttggtgttatgtaggtccctggtcacacagcctgccactgcttggttaggcacccacagcacagaagaaagaaaacaggccatggccattggagtttctctttttaaaatagagacgggttcctgttccattgcccaggctggagtgcagtggtgtgatcatggcccactgcagcctcaaactcctgggctcaggtgattctcttgtctcagcctcccgagtagctaggactacaggcatgtgccaccacacccggctaatctttttattatttgtagagatggggcctcactatgttgcccaggctggtattgaactcttgggctcaagcagttcttctacctggcctcacaaagtgctgggattacaggcatgagccaccatgctcggccagccactggagtttcattaaaacgtcctctcttttgctttttgtttcatttctttgtttattccttttttgggtgagtttccttaagttacatttcctgggcctaaagcatttggccattatttaactttttttttttttttttttttttgagacagagtctggctctattgcccaggctggagtgcagtggcacggtctcggctcactgcaacctcctcctcccaggttcaagccattttcctgcttcagcctcccgaatagctgggactacaggcatgcaccaccacgcctggctaattttttgtatttttagtagagacagggtttcaccatgtcggccaggctgggattacagcccaaagtgctgggataacaggcatgagccaccgtaccccacctattttaaaaaatttaaaattattttttaaattgcaaaattagtgaaagtttattatggaaattttagaaaatacaaaaatgtacaaagagaattaaaaattatctacctaaaattccactctgcagagctaatacctgcttacctttagagcggatcctgctagtatttttcctatgaatttaattactaccatttattgtgcatttagtatgcatatgctaagaactatgtatcatttaatccccataaaagctatgaaattggccgggcgcagtggctcacgcctgtaatcccagcactttgggaggctgaggcgggcggatcacaaggtcagaagatcgagaccatcctggctaacactgtgaaaccctgtccctactaaagatacaaaaaattag

SEQ ID NO: 23986 - DNA, 275434 bp, Homo Sapiens
gatcacaaggtcaggagattgagaccatcctggctaacatggtgaaaccctgtttctactaaaaatacaaaaaaaattagctgggcatggtggtgggcacctgtagtcccagctactcgggaggctaaggcaggagaatggcatgaacccgggaggtggagcttgcagtgagccgagatcgcaccactgcactccagcctgggcaacagagtgagagtccgtctcaaaaaaaaaaaaaaaaaaaaaagtatcttcaagcccatgagagaaggaagaaggatgacttagcaagacagaggagtgaggggaccatccaggttggatgagcctttctgagcttgtctcctgtccgtctaaaggccacctgacatctctcatttactctcagatccagcctgcccagcatcagcagtcaagctgccttattactttcttttcttttctttctttcttttttttttttttgagacggaatcttgctctgtcgcccaggctgatgtgcagtggcacaatcttggctcactgcaacctctgcctccggagttcaagcaattctccctgtcttagcttcccaagtagctgggattacaggtgctcgctaccatgcttggctaatttttgtattttttagaagagacggggtttcaccatgttggccaggctggtcttgaactcctgacctcaggtgataggcccaccttggcctcccaaagtgctgggattacaggcatgagcccctgtactttatctaaatgagtattagacagcttgctatctggaacaaaaccccaaacaacatagcaggataaaatcaaataaatggattggagtgaacctttttgtgagctgatatagaaagagaactttgattggatgtatcctgtcttctgtacacttagtagggagggaacaaaaggcactgcatggtatccaaggcaggaaatataatctactataaaaaagacataagtaacacaattcagtttacttattccttatatattttaagaaaatgaataatttatttttaattttatattaaaacctcagtaatacttgaaatccaaatgagatttaccagcttgacaagattaaagtatatatatgtactttagtataatatagagatggggtcttgctatgttgcccaggctggtcttgaactcttgggctcaaacgatcctcctgtctcagcctatcaaagtgctaggattacaggtatgagccaccatgcccggcctatagtatatcttaattcttctcttaagatcttgattaataaccctgtaacttatgttaatgatattaaccaggagtactacatttatttttctcctttaattctgtgtagatctaactaaaataataaagtgttgaatatctcatgtaatttattgaatactgtaccgaaactgaaaaacagaatgctgtatggggactcaacgtatgctttctactgaaggaatattggttttgcaccatggtaaagtcaaaagattgtaagttgaaccaccatatattggggatcatttatatatttttaaactgtttctgaagtttttacctggtgtatatcttacctacatataaaaaattttttttaggtcaaaatgtcagctaggtgtggtggcttatgtctataatcccagcactttgggaggctgaagtgggaggatcacttgaagccaggagtttgagaccagcctgggcaacacagtgagactcctatctctatagaatagagatttttaaaaatctctattttaaaagattagccatgtgttgtggtatgtgcttgtagtcccagccactggggaggctaaggtgggaggctgcagtgagctctgattgtgccactgcactccagcctgggcaacagagactctttctcaaaaaaaataagaatagtaaaattaaaaaaaaaaatcacagtgtcaaaaatttttgcatgcaaattttggtttctgggcttcctactcagtgcaatttagaaaatttagtagttttttttttttttctttgagactgagtctcactctgtagcccaggctggagtgcagtggcgcgatctgggctcactgcaagctctgcctcctggattcacgccattctcctgcctcagcctcccaagtagctgggactacaggtgcccaccaccacgcccggctaattttttgtatctttagtagagacgaggtttcaccgtcttagccaggatggtctccatctcctgaccttgtgatctgccctcctcggcctcccaaagtgctgggattactggcatgagccacggcgcccggcctagaacacttaaagtcatctaggctaaccacctttcccagttgtctgctttagagaaaactggttgtttggatcatgaagcataaataaggccccacagccccaataccttttctttgagacagggtctcactttgccgcccaggctgaagtgcagtggtgcaatcataattcactggagccaggacctcctgggctcaagcaatcctcccacctcaatgtcttgagtagctgggactagaggtgtacataaaccaccatgctcagctaatttttttttttttttaaagactggggtctcactatgttgctcaggctggtctcaaactcgtgagctcaagaggtcctcctgccttgacttcccaaaataatggcattataggaatgagccactgaacccaaccctcactgcccctttaatgaatacatataatattacaggcagagtacctaggaagaaatcattgtttcgtgagtgctagacctgcaaacctgaaaatcttcctagaaaatcttaacccttctgtccttcaaaggaaaaaacaaaacatgccaaagcaaaatccatgaaccagaaaacccagacaactcaccatgcttaagtgcaggatttaaaatagcaaaaggaagtaaagctcatctttgtgatgtcaagttctattttggtatataacaaagtagttgaattataaggctctcaaggttaaaatattaaacagacccttagctacaagatgtgttgccaggcatctgtatggaatataaccatgtaatcagggcatattgtacttctctgcacaaagagaaccaaagctactgcttctaaagattaggaaactttcattagactgacagaagaccgtacagaggaaatggcttgcgggtggaggagacgtatgagagaggatgaaaggaacagtattcataactatccaaattagagccaggatgtttatgctcaaatcttgtcttggctctgtgttgatgggactgaataatggaacatgggaaagtatatctcagacccctaaattaggcagtaaatttaccaaattcctcctacaagcgcttcctattttcagcagtctctgcacatttctcaatatatgctgtgattaaagtccaaagctggctaatgctaatgatcccttcctcttttttgttgctagtatccttccatggcgatttcattctgttgtttataagtcacatgtctctacaacaggattgtaaccttatgaggagtgtttttatttatctttcatttattcagacagcatatatttactgtgcgcttatttcatgctgggcactgtgctaggcagataggatgtaattattagcaagacaggctaggttgctgtcctcaaagagcttgccatctcttatacatagtcgaccttgtttgtcaagtgatgtgaacattacgttaacgcaaattactaaattactactatttaaaatatagcattaacaccatttctgatgtcagtgtctctaataaatatttggccagtattaagatgaactaatagtcacatatatgaagtttagactcaaggctatatttagactatatttagacaatttaagggatgttaacttttctttctgagagagcagatctaatgaagtttttttcctaagaattaaaacagttccatgcataacttacaatggaattggccaacaaaaagaacaagtatttatatctaattattgccctcttacattgcttcagcacatataagaggcagcagcagcagctgccaatgatgaaaataattattgtcctgggtctgattagagaaaatcttgatgctgtctgttgagttgtctttccttagagatgttacaagaaaaacgggactttagtagtagaggttctaatagttttgaaagtgggagacttaagaacctccttacagagctcagagagctgcaggtagaatttacctggaggctggctaaattctgtggcttgcctttacattcatgagttctcttgttccacgtttggggcagaaccatcctaatttgagattggagagattggaaaagactggagagggctaagttcatccaaatatggcccaggtctcctgaggtgttcaagcacttcagtgaactagagtagaaactcacttagattgtgagtttggagaaaaacttgttctgattaaagtaaaactgttctgatttttggagtaaaacctgtgctgatttttggcctttgtgttttcaatgtgcctcaacaacagctgaaatcttgggctttcctaatgtagaagcaactcaacgaggaattgatttatttttcatgcgcagactgcatcacaccgcatataaggccttctgctagaaaggccaaactgtcctttggcctcagtattttggagacaaagagttaatactagtaattcctgtgtaatatccttttttggcaaaggaacagtagactttatcagtttggttcttgccattacttgtgttcgatcttgaccaagttaaattatttccaggatgtatctttttttttcttttttttttttttttttagacggagtctcactctgttgcccaggctggaatgcagtggtgcgatcttggcttactgcaatctctgcctcctgggttcaagggattctcctgcctcaaggctccctagtagctgagattacaggcgcctgccaccactcctgctaactttcgtatttttagtagagatggggtttcaccatgttggccaggctggtcttgaactcttgacctgaagtgatccgcccaccttggcctccaaagtgctgggattacaggcctgagccaccgcgcccggcctcaggatgtatcttaaactcattatttttgatgcttgccctgcagctgagtaaatacctctttaggatatgtgacaattgaactggcttggattttggaacatgtcctggccttggagcctgcttatgttcatacacactggttccttagaaatgtaaatttgtaaagtcaatgtaaaactgaaacttcaaaagtcaattttcattgctgctgttgtgcatttctattatcaaattttatttacagtgatttacgtgagtaaaaaatggattacacgatttcctaacatctcactaagtatgggtttggatcttaagtaatttacatttttcttttccaagttgattgttatactgggctaatgatttccttcaaattccactaataaatcacagattctcagtgctgttattccattgctttattattaaatggcacccttttctagtttttggttttgcaaaccagtggagtatttaaagtaaaatttcagaatcccttttggagctttcggttgagaccaggctccttggaaccctagtgctttgggagttctgctactgctgcagtaccaaaagtagcttctttgaatttcatttgggttttgtagggctcccccgaggcccgagaactgggagaagggaaagagctcatcggtttgtttgaaggccggcgggcggtgcaggcagcttttcccagactctcccagctccggcttttcacgcataccagaagagccgcttttttcctccagtgattgaaaccatctggactccaggggggtcacgtgtgtatgagaaaatgacataaagtttcagaccccgttgtgctttgctccagacccagacaactcttggtcggatggtgaggaggtgagggccgtccagtttgggggccaacttctcctccctgctgcccccggcccccgcctccctcacccctgtcccccaccctccctcgcacactctcggcgcggctttctcgctgcctccggcgcctccgagcgctcccctccgccgggctccagcagcccaccctctctgtcttgggtggaggcgcacatcctccacgccccctccactcaaatctgcgctccctcccctctctctccctgcagcccggccgcagcccggggcgcggatgcctgcccgccgcccgccctctctgcaggagcggctcctcctccgggccgcgcggctcccggcgagaccccatccaggcgccgcgcccggcccggctggggaacgcagaggtaagcgcctccgggccgggtggccccggttcccgcgtgcgcgcccggtcccgcccctgccctcccagcccttttccctctgctcccgactcccggccccggcagcggtgtccagctccgtgagtacgcgcgtgggggccgccgcaggcgcagaggagcggggctggtggggtccgccctcccgggcggtcagtagccgccggctctgctttccggcccggcgggggccgcgcggttgggggtggggaacctcgcggccagagtccggcggtgaagagctgcctggtgccgagcggagacccgatctcgggacgtcctgggagctggctctgcgcaccgccttgcctctcggtggcggcattcgagctcctacctggagctgttgcagcttgtatgcaggctccttgaagaacgcgcgcgcgcgcgcgcacacacacacacacatacacacgcacaacacacacagacacacggaactcaaacaaaggaaaattaactttgcatgctattactgcaacaagttaaactatgtttatttgtggatggttcactttttgcccttgtgcagacacgcactaagtattaaagggtccacactctagtcaacgtttatggcacgttatccaataatttagtaactgagtagagttcaagagacaatgttttcaagtgtttctaaagagggcttattgcattttcctgggatctttatatgaaagtagttgatgattaatatgaataaaataacttcttcattaagtgagaaaatttgccttagtacagccttagtccagctcttgcttttattaccaaccaggtgtttctgctgtttggatagcagggtcttgggaatggcaaagaggtcattatcccatctgcaagactgttttcagctacctcttagctgcacacactgcaactggccattttgggatggggccacagggttaaaacccaaagggctgcattgttttgttttaatatttttcagaaggtgaatcccttaattgattttttttttgccagaattaggggtttctaaaaggttagacgtaatctggggtccagaaagctaatccaagatagagactgaattgttcacagcctatctcccttgctgaattaaggaccgcacaaggccagaactcaagaagagcctgttgaatgcatgaagtgaaggcttcttaaattctgctggtctggcagagagttcctaggtgactaacatagatgtaaccctcctttttatttatctggcatatattttttatttaaaaaatttttttctttttttttttcgagacggagtctctctctgtccctggagtgcagtggcgcaatctcggctcactgcaacccccgcctcctgggttcaagcaattctcctgcctcagcctcccgagtagctgggattataggcgcctgccactacgtctggctaatttttgtatttttagtagagatggggttccccatgttggccaggctggtctcaaagtcctgatttgaggtgatccacccgcctgggcctcccaaagtgctggaattacaggcgtgagccactgggcccaggctatctggcaaatattacctttggaaaaactccccaagatagggggaagaaaaattgttcaagtgtatgtatgggaaatgttatcccctaattgggccagaagggcacccattttggtagacaactccaaggcaactcttaccttaaaagtatttttttactgaacgcttagattggattggcttggtaattagggaaatccttggtcttgagtttgtggactccttggggaaagagaagtgacatttgagtgaaggataatttcagatcaattggcttagaacaggaatgtccaatcttttggcttcccggggtcacactggaagaagaatcgtctggggccgcatgtaaaatacactaactctaaggatagctgatgagcttaaaataaatcgcataaaaaatcataatatttttaaaagtttacgaatttgtgttgggccacactcagagccgtcctgggcggcccatgggccgcaggttggacaaacttggcttagaatctaagaattataaagctcaaggagaaaatgattctgaggcagggcggtttcatagaagaggggagagccttgaagcaaagtatgcttctgaaactggtggagagttgctggggaaagctttcaagagaatggagagcagaccatttggactggacctagagagaaaagtaatagcatctgctctatgccacctgccagctctctccttcatccttcagtgttgtgacataggtattgttgctcttgttttaaagatgagggaattcttgtttttaaaaagacaagatcaaaaagatacgtaactggcttgggatgacacaagtggtaaagtggcagagctggaattccaatgcctggctctcagactaacatgggtgctttcacagctgccttctccaaagagcagtgggaggtccagtggaagccgaactgtggtcaggttgaattctggctcaagggctggaactttatcctgtagacattgtttaggttttaaagatttttgagaaaaggagctatgggtaaagcagtgattttagaagattaaggtgacatctatgtacaggaatgtgacatgctcatcacaagtcatgtgcaagtcataatttctaatgaggaggttcaaaaaggaaatgtagccaggatatctgggtgtttcaattcctgtctcacttactgtaccctgcagcgagtagcttggttcactgggtaaagagctagttggagtgaccacggggctgctctggatcagaaaagagctgaatcttaccaggcatatgctgaaatggaatgtgtgtgtggatcaatgccactgctggtttgtcctttatgttcccccatgtttcgcaatgctttggtttttttctttcatgactaccctgagaggtagatcaatgttgtaatttgtttaaaagcttttcctcgccctaaacatcttaggtaagttgatgtgccttttcctctcatattctcttatttcttaaaaatgctgaattttggccaggtgctgtggctcacacctgtaatcccagcattttgggaggcagaggcaggcagattgcttgagctcaggagttggagaccagcctgggcaacatggtgaaaccctgtctctacaaaaaatacaaaaattaatcatgcatggtggcatgtgcctgtggtcccaactattcaggaggctaaggtgggaggatcgatcacttgagcccaggaggttgaggctgcagtaagccatgatcatgccactgcactgcagcctgagtgacagagtgagaccctgtctcaaaaaaaaaaaaaaaaaaaaaaaaagctgaattttaaaacttggtactagtaaggtaaaagtgaatttagattacctttcttaattatgagaaagattaacataaaatatacatttatttcactttgtgttatggaggaaaaacaggaggcctttgtagagttcctgcgtggggatttagaagggataggaaagccaggatttagagatgtgcaaaggtcttcctacccctccacatttcttaccagttaatcgtattgttcatgtatacagcttatggagcttataaggacattggacacccacatttatagccaggccctttgattctcggcagataatgggctcaggaagggcagcagtgggtggagacattttactagaattagtctgccgctttgaatacaatctggatttcttgctatttcttgtgcaacctgtacgccgtttcctctgaacttgctagtgctctggagacttggttgtttggccaaggaatatcccctagcaggagggctcactaaggaggggcagcttgacaggcagaaaagtgatgtttgtcaactaaagaagttttcttttaattaatgttagagtcacccatggttttttgtcaaataaaaaatgcgaaatcaaaatatgatctcggttctccacacccatttttacctttaagagcctctcacaccttggagagcttgccttactgaatggggttttgataggtgaaattatcaccaggacctctacatgggtcaggatatgactcagtttgggttttggacctctgaggaatgtgacccctcttagtgtaggggatttggagtacaaaaacctgggttaaagttccagctttgccatttattcagaagttcctggaatttgatgtttgagagatctctgagctcagttttcctagttcttctagatcagggtaatcccttagggccagatagaggtggtcacaccctgattagcaccttggttccttctcccagtttgtattttgtgtcacctgaaagtcattttattttctctgtagcctctggttataggttatgtggtcattcctccagagaatggcaaagctcattgttggttggggatcatttggtatgtcttcccgggagaatgctcttgaacctagttttgagagttggggcctcaagaagagactttggcaatgcccttatttaaatgtcagaaatgtttggttgcatttttgatgcattgcttacatagttaatgtttttgtatttggtacttgtcattttaataatttattaaacaggtgatttaggttttctaagatagctaagagcttagaaaaataggactgcaggtcgggtgcggtggctcacgcctgtaatcccagcactttgggaggccgaggcaggcggatcacaaggtcaggaggtcgagaccatcctggctaacacggtgaaaccccgtctctactaaaaatacaaaaaattagctgggcgtggtggcgggcacctgtagtcccagctgctggggaggctgaggcaggagaatggcgtgaacccgggaggcggaggttgcagtgagccgagatcgcgccactgcactccagcctgggcgacagagcgagactccgtctcaaaataaaagaaaaaaaaagaaaaagaaaaatagggctgcaatatcctctttaaaaatagtctaaattattttttagtggggatggcatttggacaattccccaggactggaatatccctttgatactcagatgtaatctcctagtatggtagaactttgactattttgacctcctccacctccaaatatccttaaatctttctgaagagatttaatctctctttttttttttttttttttttttttgagacagagtctcgctctgtcgcccaggctggagtgcagtggcacaatctcggctcactgcaagctccgcttcccaggttcacgccattctcctgcctcagcctcccgagtagctgggactacaggcgcccgccaccgcgcccggctaattttttgtatttttagtagagacggggtttcaccttgttagccaggatggtctcgatctcctgacctcatgatccacccgcctcggcctcccaaagtgctgggattacaggcgtgagccaccgcgcccggccgagatttaatctctcttaaagagatctcacaatttccctgggaaacactttctaaggaaggtttccagattgatgatcacagattatctccttgtagttagcttttcttttaatgtttcctacttttactgttttcctgtccctcttcaatgcacacatgttcacagagtgaacaaattgtctttcctggactccaaaggcagctaccaaatgtacagactgtcccatctgtacccatcctttccttcccttcctctggctaaacaagctgagctttctctgttttccttaacaagtctctctttttagacctatgattatacttgttgctttgtgttttgttttatgcaggaagttcatatcagatatgttggcaattagagctttcaaactggaaggagccttttggagtaaaatatatatatttttttctatcagcataagtaattgtggaatatatgtaaactctggagatgatcttttaaaaaaattaccatcaaaagaattttactcaagtcctttaagggcttaagaagaatccagcctttgcgagattgcactaaaagtaacagattagcccaattaaggcctatctagaagtctgggaatcatttgtttaaactggaatttaggatctccatgcaaatataatatgatagaaataatctgcttaaccctttgttagtagcattagaaataagcccctttttatgggactcttaatgataaaaggtcatagtaattagaatatgctgggaatttgtccctgtttgttaatgttttggaaactcctttgagtaggcaggggtcactttgggtggcttttttctttctttgatgtgaagttgggatcttggatgtaaatttagccaagggcaagtttgaatttagattttttaaattttttccgtcttgttccattcttccttttggaggcggctaactagagtggggtaaaaagtgcctttaatcagagtcagtgtcctgagactgtcagacactggtctctgggaagtgctctgtatcactatcatttatatacttttcctttcttgtgtcctacagtttttgaatatctcctgcggaaaaagcactggggtgtgtacgggcatctgtttattctcttattacctttcttcagtgaatatgcttaatgttaggggtttgatgaatcaatgagtggatgaagttaagaaattagatggaggccaggcctggtggctaacacctgtaatcccagcactttgggaggccaaattgggaggattgcttgaagccaggagtttgagacctgcctgggcaacacagtgagactctgtccttatgaaaaaaatacaaaaattagccgagcgtggcggtgcgtgtctgtggtcccagctaaacggtgggctgagatgggaggattgcttgatcctgggaggtcaaggctgcagggagccgagattgtgtcactacactccagcctgagcaacagagtgagcccctgagtgaaaataacaacaacaacaaaagaaattggatgggaaattagttttggatatgagtgttgggtacctcctgatccaaatattgctgttgggaagcaactgtttttacaacactctggtctctggaagctgagatgacctctgttaaggctcatcatgtggggatatattttctagtgagtaaacagggcctagtcagttattttttctattagtcatgttggattacatttactgttgccgggaactctagttagcataatatccccttgaattaggaagtgccactcaatagctgtctttctccaggactgcctggagaagcttttcttgaaagtctggtcttgcctcttgagccagggatgagtgcattctaagtacttagacccaaaaggcttcttctactgggtccaagtcccaggggaatggaaattctcttgaaaatagtataattgtatgggaggggaatcaaagctttgtacttttcagtagtcactcgaatctgtacatagatacctggagataaagaaaacccaacttgcaaatgagtatttggtgctgtgggttaacatggaaaaatggcacttaaggtcaaagtatattaattgaatccttcttgtccagttaatcagcaatatcagttgtgaggattccgttttgctatttttcccccatttgtatattgacaggtcactcttttgaattagaatagcactcaggaccacagtgtttgcataggaagtggcgtaagaggcaggccgggcgcagtggctgacgcctgtaatcccagcactttaggaggccgaggcgaacggatctcaaggtcaggagatagagaccatcctggctaatatggtgaaaccccttctctactaaaaatacaaaaaaattagccaggcgtggcagcgtgtgcctgtagtcccagctgctggggaggctgaggcaggagaatggtgtgaacctgggaggtggagcttgcagtgagccgagatcgtgccactgcactccagcctgggtgacagagcaagactcggtctcaaaaaaaaaaaaaaaaagaaagtggcgttaagagtcatggggcgtgggtagaggccactttatatcttgtttcagagggccatttaaaattttttttaattaattaatttacttacttatttttagagacggggtccccctatgttgcccagacaggtctcgaactcccaggctcaagcaatcctcccacttttgcctcccaaaatggtaggtttaaagatggaccatttttaaaacctccatgagtagctcagtgatcagaattagctagaaatagctctgccaaaaggtattggcaaaataacatctagcagcctttgtctatttcaggttaggtttgttcaagaaagccaatttgggagcagtatgatgtgcccagctctgtctacatttgagtcgcctacatagttcccatgtatttgtcactatttctggtccctggagggctggggtagatctcaggatatgaggctcagacttggttgaagccacatcaagagctgtggtcctggtcggtcagcgttattttctgcggcttatcacccaggctaggcgtgtgggagcatgggtgggtaggacagggaagaaaaacagaagaccagatagttctgtggaaactgaataaataagtgaaaaagttggccaggcactgtggcactcgcctgtaatcccagcactctgggagcccatggcaggtggatctcttgagctcaggagtttgagaccagcctgggcaacatggtaaacccctatctctacaaaaattagaaaaattagccaggcacagtggcacacacctgtggtcctagctactcaggaggctgagatgggaggatcacctgaggtgatcacctgaggttgagattgcagtgagtcgagactgtggcactgacctccagcctggatgacagagtgagaccctgtctcaaaaaaaaaaaaaaaaaaaaagagtgaaaaagttaatctttttcccctcactgacttggacctttgttctgttggaaacccttatcacttgaggtcattttatttatgtatttatttttaaatgtttcattattattatattttaaaaatatgtattttttatttcaatagcttttgtggtacaagtggtttttgattatatggatgaattgtgtctgaaattttagtgtgccagtcacctgagtagtgtacatggtacccaatatgtagtctttgtaacccttcatctcccctccctccctcccttcctcccccttctgtgtctccataatccattataccactcgatatgcctttgcatacccatagcttagctcccacctataagtgagaacatacagtatttggttttgcattcctgtgttacttcacttagaataatggcctccagctccatccaagttgctgcaaaagacattatttcattctttttttatggctgagtagtattccatggtgtatacataccacattttttaatcactcattggttgatgggcacttaggttggttccgtatctttactgttgtgaattgtgctgcgataaacatatttgtgcaagtatctttttgatataatgactcatcctttgagtagatacccagtagtgcaattgctggattgaatggtagatctatttttagttatttgagaaatctccatactgttttccatagaggttgtactaatttatattcccaccagcagtgtataagcgtttgcttttcaccacatccatgtcaagatctattgttttttgactttttagtaatggctagtctggctggagtaaggtagagtatttcattgtggttttaatttgcatctccctgatgatttgttatgttgagcatttttttcatatatttcgtggctatttgtatatcttcttttcagaaatgtttattcatatcatttgctcggtttttgatgggattgtttttttcttgctgaattatttgagttccttgcagattctaggtatttgttgtttgtcagatgcataatttgcaaatattttctcccattctgcgggttgtctgtttaatggttatttcttttgctgtgcagaagccttttagtttaattagttcccatttatttatttatttttgttgttacattcgcttttggggtcttagtcataaattctttgtctcacccaatgtccagaagagtttttcctaagttttcttttagaatttttatggtttcatgtcttagatctaaatctttgatccgagttaatttttgtatatggtgagtgatagggatccagtttcattcttctgcgtgtggctagccagttttcccagcaccatttattgaatagggtatcttttcccagtttatgtttttgtttgctttgttgaaggttagttggttgtaagtatttggcttatttctgggttctctattctgtttcactggtctgtgtatctacatttataccagtaccattgctgttttgttactatagccttgcagtataagtcaggtaacgtgatgtctacagatttcttctttttgctcaggattgctttggctatttgggctcctttttggttccatatgaaatttagaattgttttttctaatattttcgaaaatgatgttagtatttggataggaattgcattgaatctgtagattgctttgggtagtatgctcattttcatgatattgattctttgatttcatgagcatggggtgtatttctatttgtttgtgtcacctgtggtttctttcagcagcgttttgtagttctccttgtagtgctctttcaccttcttagttaagtatattactaggtattttatttgtttttgaaggtattaaaaaggattgagttattgatttgattctcatcttggtggttgttggtatatagcagtgctactgatttgtgtacgttgattttgtaacctgagactttactgaattcatttatcaaatctaggagtcttttggaggatctaggcatcttttagggttttctaagtgtacaatcatatcattagcaaacagagatagtttgacttcctgttttccaatttggatgccctttatttctttctcttgcttgattgttctggctaggacttcctaaggtcattttataaatattcatagtaactagttgaaggcactgagattcctgtaccttggcgggaagaaccctgctggatgattctctaggtgtttatttgggttatgcccattttctttccctcttttcttcctaagttttgatgctcctgtttttctgggaatattttggcttcattgtttaggcttttttaagggccatggggaattctggggacaggggcaggtgtgacatgttgctaggtatgggaggtttttacagcttgagaaatttccaggaaagaagagacagaaaactttgttcacaaagcatgtggacaggaagtcaggtgggaaaatggcatggcagatggtgtaacttctttggtcagcatgcctgtctctgccaagatgggactgatagggtagtgggggtagtggggcagtgctgaggatataacttataattcacattattccttgaagagaagatggttctttgttttaaaaggaagtatagtgccttacattgatttctttgaaatatacatgatataatccatgaatgagtatttgcaaaacacgtggccgggcgcggtggctcacgcctgtaatcccagcactttgggaggccgaggcgggtggatcacgaggtcaggagattgagaccatcctggctaacatggtgaaaccccgtctctactaaaaaatacaaaaaattagccgggcgcgatggcgggcgcctgtagtcccagctactcgggaggctgaggcaggagaatggcgtgaacccgggaggcggagcttgcagtgagccgagatcgcgccactgcactccagcctgggcgagagagggagactctgtctcaaaaaaacaaacaaacaaacaaacaaaaaaacacgttagtgtttatctaaccctatgccaagcctggtagtagatatacaatacaactgagggaaagtgataacctgaacttagaacatataattgttacctaaagaatgatataaagcagtacatcatcaagctctaaattttgagttattgatacatacagggggtttggagccccagacaaggtttaggacgtgcaggcttatggcaaatcttgggccaaatggaggcctttggagcttttggagcgcccaagggctcagtcttcagcctgtttcttgtctctgtcttcacttttcttaggtgattccctggctttgaagtactagcatttatggaatgtttactggctgccagaggctgttgtaagggttttatgtgcactaatctagccttccagacaaccttataatataggtatttttattatccttgcttaaaggtgtagaaactgagacaagagatggactttcttgagctcacacagcttataagctggagagccaggaaatgacctagtttgggtgaccagccaagccctcgactggttcagaatagccatcctcagctggtcctggctcctctgctcctgtctttgcagtctcttctccacatagcaatgagaatatatatattttttaccctcatatggaatgctatcacacttagaagtacaatgcacatttactaccaagttcttgtgtggtctaagccccagctctcccatctgctcctgccttcctcccatctcttctgtctcatggcctttgcctgctcctaggatgctcttctccttgaatattgctggtttgtcacccagttcatttgagtgtgggctcgagtgtgccacctcagggaggccttctctgcccatcctatgtaaaactgctccgagtcactctttaatcccctcctttctttttcttcctaaaattatattacatatttctgtgtttttcctgtctgctttcccaaataaataaactccatgaagttagggacttgatccatttgtttactgatatctttactttttagaataggacatggaaggttttctttaaatatttgttaaataaatgactaaatggtatcttttgcattcatttgctgttcatgacttcacttgggtaaaaatagtggagaggaaagggaggtacaggtgataactacaggctgggtcctaactggttttatgtttattaccaaggctttgctatcataacatggccaagaaaatgctcagaaatcttggttgaatgaatgcactgtgtaatttgttctggattccacacagaggggacagaatagtgtgggctgaagtgctcagagaaatttcttggaggacctgcagactttgaaggagagattggatttggtcgagcatataggaatcgaagaatacttttttttaaaggtggaagggctatagggtgaactagtccaatctttctgtttatagacaggaaactgagcccagagaggtgtaggacctgcccaaaggcacacaaccagttgatgtcagaaccacgtctggcatccaggtgttttgactcctaatttagttccctttcttctacacagtgctgccttcagaatccaggaggactctgggggttggggagtaaccaggggcagcatgagcaaaggcccagaggcagaaaagatgttggcttgtatgggctggaaataggtggtctattggaatcagcaggtttataaaggagcccatcagagacagaccaggctgaatcagatcctctgggatcttgaatgtcatcttgaagactttgagtttggaatgagtgggaggcatgtgaaaatgctttgactattgttctgtctttctctacagggatggtgacagaatggatagtgtagaaaatggattggaattgaggaggaaactagaagctaagaggagttaggaggcccttgtaataatccaggtattattgctaagggcctagtatcattttagttatttctgtttctgtttttagagatttgtggtggtttttggagaagatgacataaaattatcaggcaatatgtgtatactcagctttctaatagagtttggggataagaaggaggagacctggtattttgccttaattctgtatgcggctataaatgacattttagtatccagatgataattcttctaagaaacctgggccaggttaggacaggagggatacaagataacattatactgatgtgaaaatagtgatggggctaagtgcagtggctcatacctgtaatcccagtgctttggcagactgaggcaggagaattgcttgagcccaggagttctagaccagcctgggtgacatggtgagaccctgtctctgcaaaaagtaaaaaattagctgggcatggtggcacacatctgtagtcctagctactcgggaggctgaggtgggaggattgcttgaggccaggagttcaaggctgcagggagccattattgcaccactgcactctagcctgggtgacagtcaagacctgtctgaagaaagaaaaaaaaaaaaaagaaaatagtgatagagtgaggagagactgaaggaacagacggaaatgaatgggagcagctgcccagagagggcctgggcctgcctttccatcaggggagctgcccaatatagtggttggggagtcaggcatccagggacttccaaccaaccttgcacatttttttttggacacgtgtgaccagtggaagtaaaacctgtctcctgggcccacaaatgctttggacggataagttgtgctcaagcctaggcccattcaggtagtccacatatgttttcaaccagagctgatgagaacagattgatacagcctgtaccaggccagtgaattggcagtgtatgatactttaaaaatttttccatacccagaaatctttttccatctctaacaaaacactttgaaagtcagcataaaagtgagaacacagacttttaaataatatcttctactggatctgaaagttttggatgcaagaaaaaaatcctggatcatttaacattcaatggatatttattgaggagcacttcttaaacaccagatactgtgctgggtactagagcttcagtcttttgatcatattgcatcaaatgttattaatggaacattaacatttgattctatttcatgttaagctcttttagccccaaacgttatacagcttggtccataaaccttcagttggttcagcctgttcacttatgtttgtgttcagttgttgaatgtttatgtgtaacaggcaacatatgttgggtgctcagacagttttgaagatgaacaagaattggagagagttctccaattctctagctggttgactggaatttaccaggtagatctggcagctgtctagtttgctgggattcctcccagaggagagtatagtcagcagcaatgtatcccctttccttattctgtttggattgggcccttccctttgccctttacaccttctccctaatccctgtctttaaatttgagacaaatgaaaattagctcctttgtattaagtttgggcagctccatcaggacagcacttccctgatgatgccctaaagttagaaacccttccaggagaatctctgttgccatgtaatcccaaagaagagccttctcggcgtgctgtttcctccttcctatgaaagttgcttttgcctactgtgtggatacagggtgcacagcacttggtatttctcgggctctttgcatctgcctgctccgttggctcactgtggggatgctggcaggggcatggtgtcttgttttcttagaatgaatgatgcagatgagcagcctctctagatgatgggaaaatttagcatgatccatcatgatccatcaggctaaattttcccgtcatctagagaggctgctgctcagaataaaagagaggaacataagatgggcgcccaagaggagtgctttattgagcctttagattgccagcctgaacgagatagtcttcccctccttgcttggcatctggagccagcttgtacactacacgtttgaggtttgctgttctcttcttttcttttctctcttctctactcttccctccccctcccttcccttttcttttctttctttttcttcttttgagacagagtctccctctgttgcccaggctggaatgcagtggtgtgaacacagctcactgtagccttgaccttctgggctcaagtgatctttccacctcagcctcttgaatagctaggaccactatgtgggccactatgcctggctaattttttcaaaaaaatttttttgtagagaagccgaggcaggcggatcacttgaggccaggagtttgagactagtctgaccaacatggcaaaacccatctctactaaaaatacaaaaattagctgggcgtggtggcacaggcctgtaatcccagctacccaggaggctaaggcatgagaatcggttgaacctgggtggaagaggttgcagtgagtcgagatcatgcctttgcactccagcctgggtggcagagtgagactctgtctggaaaaagaaaaataatttatagagatagagtcttgtcatgttacccaggctggtcttgaactcctgggctcaagtgatcctcccaccttgccctctcaaagtgttggaattacaggcatgagccatcatacccagtggctgctgctttttttgtgtctgtgagctcctttaatagaaaactacagaatagaaattatttccaactttcaactttaaattggttcttttaggccaggcactgtggctcacgtctgtaatctcaacactttgggaggccgacgcaggtggatcacttgaggtcaggagtttgagatcagcctggccaacatggtgaaaccctgtctctagtgaaaatacaaaaattagctggtcgtggtggtgcacgcctgtaatctcagctacttgggaggctgaggcaggagaattgcttgaacccaggaggtggaggttgcagtgagctgagattgtgctgttgcactctagcctgggtaacagagcaagaccctgtctcaaataaataaatacatacataaataaataggttcttttaaaaatgtaatatatggccagacatggtggttcacacctgtaatcccagcactttgggaggccaaggcaggaggattgcttgaggccaggacttcaataccagcctaggcaacaaagtgagatcctgtctctacaaaaaaaaaaaaaaaaaaaaaaaattaactgggcatggtggcattcacctgtaatcccagcactttaggaggctgaggggggaggattgcttgagcccaggagttcaaggctgcagtgagctgtgattgtgccattgcacttgagcctgagcgacagagtgagaccttgtctctaaaaaaaaaaattaaaaatatagtgtttgctttgcagtacattctaaaaaaataaaaacctcactttcccaacacccagagaaaaatcttagtcctctcctttctaggtctttctctacgcatacagatgtacatatttatattctttttctaccaaagtaagattatactatatatactgttttttattctatcttatttttcaattacgttcacttttctaattcagtaactttttattttaactaatactcagaccatattcagatttccccatagtcttcgtccattcaggatgctataacaaaatactttaggccaggtaatttgtgaacaacaaaaatgtattgctcacagttctggaacctggaaagcccaagatttggtgtttggagagggcctgctcttcataggtaggaccttctggctgtgtcctcacttggcagcggaggctaacaggctccctcaagcgtctttcttttcttttctttttgttttttgagatggagttttgtgctcttgtcgcccaggctgtagtgcaatggtgcgatctcagctcactgcaacctccacctcccgagttcaagagattctcctgcctcagcctcccgagtagctgggattacaggtgtgtgccaccacgcccagctaatttttgtatttttagtagggacggggtttaccatgttggccaggctggtctcgaacttctgacctcaggtgatccacccgcctcatcctccctaagtgctgggattacaggcgtgagccaccgcgcctggccgaagcttctttcataaagacagcaatcttgcttatgaggacagagccctggtgatctaatcacctcccaaaggccccacctgttaataccatcaccttggggttagattttcacatgaattttaatcacgaagtttaattagcagtcacactcataaaagcttatcaggcccacctcccaaatgtgtcatgaatcgtccttctccttactgtcttgctgcctccaatccagccaaagtcttgaccctcttttgccagaatgcagctttcatttctcagagtgctgcctcagggtgttcagtcttctaggctgctgaacaaatgagctttctagaatagtttaattgtgatacttctttgctaaaagctctttgctttcttattgaggagtaacacagtaaagtacgcaaattttaaatgtatagcttaatggatttcaacgtttgcatacattgttataaccaccactccgatcaagatgtggagcatttctggcatctcagaaggtcacctgatgcctcttcccagacagtatccacattcctatcccaattgctcttctgttatcatttgttttttcttttctcttatttacttgtttatttactatttttgtaaagacaaagtcttgctatgtttcccaggctggtctcaatctcttggtctcaagccatcttcctgtgccttggcctcccaaagtgttgggattataggccactgaacctggcctgttttacctttttttgatccccatattaatgaaccacgaaagctctttattgattcttctttgacaggataattccaccctttaatgtgacattcagaagtctttgtgatctggcttttacttcagtcctccacttgcaccctgcccttctgccacgccgaaattgcatgtagcttgtcaacatagtaggcgctttcattttttgcacttgatagtctcttgccctcctcactttattctttggcaaattcatccttcaaaactcagctccaggcagaatcaaggccttctctgctctccagaagcaacaactgttatagggagttgcttttatacctataacgtttttctcctctactggtggctttgggctttcaggagcccagggataatggggcatttcccccctaattagttagttgaatttcatacaagtaattcatggtctttctagaaaaattggaaaataggaaaaagatcacccacaatcctactacacagagataattagtgtttatatatataccaaaatatatatgaatactttaaaacgaattaaaaaatattcacaaaatactaaatatttgatctactttaatctcctgttattgtttagtttgtcccccccctatgtatttaaactattacagaaatgctatggtgaatatccttatacccatattttagtgcagttccttgattattttggggattcctagaagtaaaagggatgaacatttttaaggacttttgatgtgcttagccaaattgccctccagaaagtctttaacctgtgtacactgtacacttctactagcgtgagcgagagtgcctgtttccagccattcttgccaaactaaaaagaatgaagataatcggtatttgcaaatctgataagataaaaatggtattgcatttctgttttagtttccatttcttggattgctatggagcttgaatattttctcatatatttaatggccgtttaatttctatttcttttatgatttacatgtttttgttattttatttttaaattgacaaataattgtatatatttatgatgtacaatgtgctgttttgatttatatatatatatatttagaatgactaagtcatgctcattaacatacattaccttacatacctatgtttttttgagggtgagaacagttaaaatctacactattagtaattttcaagtatgtgatgtattgttattaactatagttgccatgatgtgcagtagatctcttgaacttatttattcctcctatctctctgaaattttgtgttctttgaccaatatcaccccaatcccttcatcccctagcctctggtaaaatggttattttaccctctgtttctgtgagttcaacttttctagattcggcatataagtgagatcatgtggtgtttctctttctgtgcctggcttgtttcatttaacatagtgtcctcaggttcatccatgttgtaggaagtgacaagatttccttctttttttatagctgaatagtattccattgtgtgtatataaaccacattttctttttttatttatctgttgatagacactcaggttgactccatatcttggctattatgaataatgctgcaatgaacatggaagtgcagatagctctttgacatactgatttcatatcctttggatatatgctcagtagtgagattgctggatcatatgatagttctatttttaatttgttgagaaatctccatgctgttttccagaatggctgtaccactttatattcccgtcaacctccacatcctctccaacacttattatcttttgtcgttttggtggtagccattctaataggtgtgaggtgttatctcggtgtagttttaatttgcatttccctgatgattagtgatgttgaacattttttcatatacctgttggccatttgtatatcttcttctgaaaaacgtctgttcaggtcctttgcccatttttaaataagttgttttcttactattgtgttgattccttatatattttgggtattaaccccttatcagatcaagcagttttatattttatttaatgcattttaccaacttttaaaatattaagaacaactcatatatactacatatgtttttcacagtttgtcttttaactttgttttccacatacaaaaatttttagtaatttaatgtgaaatttatcagtttttgtgtgtgtgtgtgtgactgggtatccctctgtcctccaagccagagtgaggtggcacgatcacagctcactgcagccttgacctccttggctcaagtgatcctcccacctcagcctcctgagtagctgggattatgggcatgtaccaccacacctggctaatttttgtattttttctagagacggggtttcaccttgttgcccaggctggtcttgaactcctgggctcaagtgatccacctgccttggcctcccaaagtgttggaattacaggcatgaaccacagcacccagccttattggtcttttcttttcttttttttttttgagatggagactccctctgtcacccaggctggagtacagtggggcgatctcagctcactgcaacctctgcctcttggattcaagcaattctcctgcctcagccgcctgagtagctgggattacaggtgcctgccaccacacctggctaatttttgtatctttagtagtgatggagtttcaccatgtggccagactggtttcaaactcctgacctcaagtgatctgcccaccttggcctcccaaagtgctgggattacagatatgagccaccatgcctggccttatcagtctcttcagtctttctgtctgttttttttttttttttttttttgagacagtctagctctgtcgcccaggctggaatgcaatggtgtgatctcggctcatggcaacctccacctcccaggttcaggtgattctcatgcctcagcctcctgagtagctgggattacagccatctgccaccacacctggcaaatttttgtgtttttagtagagacggggtttcaccacgttggtcaggctggtgttgaactccttacctcaggctatccacccaccttggcctcccaaagtgctgggattacaggtgtgagccaccgcgccctgcctgtagtattctcttcacctttgtatccctagtgcttagcagtgactgtcttattttaagtgttcagtgaatatttgcagaatggtgcaacccttgggggtccatgggtagaatttgaagggtctgcaacttggataggaaaaaaaaaattacatcattttcatccaccccgattgaaatttagtatttcttttttattatgaatataggcaataaaacagcagtaatggcagtacctgtgatttagccacccatagaaatcatggatatttccctggataaaccctgggttaagaatctgctttactgttttttttttcttgaggccattttatttttgtgtcaaatacctaagcaatacctggtactcagtagatacgcaataaatattaatttaaaaaacttcttatttcaaaatatgcacaaaagtcaggagaactgattcagtatcttggctattatgaataatgatagccattgttcccatctgtataatgaactccatatattctttatctgcttcaaatattattaacattttgccaattttatctttctcctccattcctggacattatgttatttacccaataatatttcgggaagcatatttgataagaactttaaaaatctataaccactctctcacatttaaccaaactaacaataattccttaatatcatctgttattcaggtcatatttaaatgtcctcagttgtctcaatgttgtctggtatttaaatgctgggcatggtggcacgtgcctgcagtcctattttattaataatgtgtttttgacaattgctctttccctatttaacattttattattatttttaatgggaaattattgatttgggttctttggtcttatttgtaaaacttaaaacatttaagtctcatttacagttgttcttggacataatttaaagtgaagtgtgtgatgggtaaatttcttcaggtatgatcaaagctctaagagatatttctttttcacttgctcaaagagtctactcaccttgttacactggaggtaaaaatactttctctgagagttttatatgcatctctggactttaattgtatcctttgcaaaattggaagaaatttggatttgggtcttctcagcctgctgagttttttctttttcttatgcttaaaaatatgagaatgtcatagtggtagtctctggttgatgattttgtacatcttttgtactcagagcaaatccttctgttgtttttagatagcatttttttctattaaactttatagatttgaggccatttgttcaaagactttgatcatttgcgggatagttctctgagctgcattccttcttgtgcttgtcatcttgtgcatgctttgaatcttttattgaaaaatatatttttgtattttatatctttttctgattagttttttctgtagcatcacttctgtttttattgcattcatcaattcatttagtatggaccttacgtttctgtttcttttgcagccagcacttgcgtagtctgtttcattgccttgagaatcaatatcagccattctgtaaatttgatgacaaatattgagagcttgctgtgaggaaggcattccattacagggattagcttttcttttcttttctatcgttaagctttgttttctttgactgcttatacccttttcctatatattcattcttctctgtttactgatctttctttcatagtttcaaactattttatttgtattgtatttactgagatttgtgagaaattcttttaaatatactattgagatcccactttatgttcgttataaaaggtaaaggaattgaggtattttgaattttgtaatggcgagtgtaattaatgatcacctaattataatccccccattttaggaagtgactttgtataagggaaacgaaattccaaattcccatttcattcttgttaagattagcttgaagggagagcctcccatgatgggagaatgctctccactagaacgtggtttgtaccatgtgggcgtgtctctggagagctggctcattggtgctacagcctcaggtagagcagcagctgaatgactgactctggagaagtttcactgagtggttagcaagtgtgaagccctaagccaaagactatgaaagacccaagaattcagaatccacatgtatataatgaacctttaattttgtgaaagagatagacatttggatgagtggcaggagacagtgtgtgtccattggaactgtaagcaagtaggtgtcccgcacagtaaagcattgaggggtcaccctgtgggacaggaacatgtctaagtcacaagccttatcttcagagaggcatcaaacacctacagcaaagagctaaggattaatatcaaaatacaaatggatcatggagcggtttagaaatattgcaggccgcctctggtataaacagagaatgatgagggtttagaggtagaagaactgactataagcagaagtgtttgaggaggctgcatggagaacaaggggcatcatcttggcccttggcaggttggcaggatttgacttggtgaagagaacgagaaaggggactttaactgggaggactactctggggcacagaggagggaagctgttttatgaaaccaggttcatttgttcccatctgtaggttctgccctgtccgcaagcagccgcgtcttggctcactcctcttctcccctcctccccattgtgatgaccatgagccttctcttggagtgtctgcccagtgggcccttcagcctgggcgctgctttggttcggatgatactgtcctccacttgtcttcttccaaggatagatagcgccctgacctctagggccagcagcctgttgggggatcttccttccaatgtcaccagccttaccagcttcttgagtatttattccttcataccacactcagccttcttctggctccttgctacttgttctcttagcatagacactgtcccctctccctttccccagacataggcttccaggttgcaattccatgagtgttcataacaagcctcagcagtacactttaggtcttactgtccttatgtcctctggcacgtccctgtctgtgttgctctgtggaccatggtttcccatctagaaaccattacttgcagtggggaatgatgcacatgaggaccttcgaagggcttgtaggagctgaggctgtgggaataaagtgtgggccctgattctgaagggacttgattcagtcctgaagagaaaccgtgtatttttggtttctagacactgtaatttatttaatcagacctttattgagcacatttaggctgtcttcagtctctttctgttaaaatataacagtaattatccacgaataaacataatttaatgttaattttgataatgccactgttttagtgggagaggcagataagctagtagtcttcagacaggggatattttctagatccttgactttctatgtcccctttccaaaggctgatctgtctgagaattcagttgcactcaaggtgtttcctttctcaatcactcttctcccactttacaaaaggaagacatagtcattattaatctggagtcttgctgtttgtgtgcctgatgtgtgaaagcctccagattaacaagcaaaggaacaattaggactattattaggaaagtgaatgactgtgagtagcaaatccttttctaagtcagatggtttccaattcttgctttcaacaaaattgaaggcattgtcagttggtagataattaaaaataatttttgattataggtcatgacatgattttgacttgtgattctaaagatactgatattgctatagcaaaatttattttacttctcccattcaagtactaacggggcctgaccctgcttagcttttgagatcagacgagatggcacattcagggtagtatggctgtagactctcacttctgtttagttatttatgtgaacaaggtttcttggtgcttaccactataaaaatgaaaaattaatgcattttgaataaaattttactttttatgtttaataatagtaccaatttctaaaccaattatgttttgatcatttgcatattcaaacaataaagataatgaaaacccaatccagaagaagaattttttttttaacatttacaagttatagcctggatgtggtggctcacacctgtaatctgaacactttggaaagccgaggcaggaggatcacttgaggccagtaattcgaaaccagcctgggcaacaaagcaagactctgttcctacaaaaataaaaaatagaaagaattagctgagcaatgtggtgggcatctgtagttctagctgcttgggaggctgaagcaggaggattgcttgagctcaggagtttgaggctgcagtgagctatgattatgccactgcactccagcttgggtgatacagcaagaccctgtctctaaaaaaaaataaaataaatagaataaaaaattgaggttataatcatagcagaatttaaaaatttatgcatttatatgtatatatgtataatactaatatatatattgcagagaagtataggttgatcagtaaaagattttgaagcataaatattaggataaaattctgaaaacgaaataaaaggaagtaagagttaacaaaaaggcatagtataaaatgtatgttcttttaaatagatgatccactatggcatttagagtccattggatcatttagattcatttaagagagtaatgttgtatttaatttaaaaatgtaaatatttatttatttttaataaaacatttttgtcgagacagagttctgctctgtcacccaggctggaatacagtggtgcaatcatggctcactgcagcctcgatctcccgggctcaagccatcctcccacctagcctcccaagtagctgggactgtaggcatgcaccaccacacttggctaacttttcgatttttttgtggagctgaggtttcactatgttgcctaggctggtcttgaactcctgagctcaagccattctcccacctcagcctcctcaagtgctgggattacaggcatgcaccactgtgccaggcctgtaaatatttataaaatgccaatatttagaatatggcagaaagtacgtctttactactggttgtgatgcaaaaatttaaatattaaatgtaaggagggtaatataacattcttttagggcacataagataaacagacatttacaatggagtatgatacagatgtttgaccagaggaaagcaaagaatgttgaggagaagatgcaagggaagcccatggccagagaaagcaaccaaaggaggtgccgtgggagcggcatcttgagggactgttggagttggcttagcaaacagaggagggaagccattctgggaagagggagtggtgtgtgcaaagggtctggaggtagagaatatcaggatcaaccttgggggaaagcacaggggtggcatgagcaggatggtgatttacggcagccagacagcgtattatttgtgacaggatttgtgtattccgtatgagaggagggcttggaaaggagaggcggtggtggggctggagatctgtggaggtagctgttgccaagggccaggcatgagcaagtgaggccaagaatgacccctgaaggggtgcttccttcccagtgactgttttccatcttagtaatcttctggacatttttacaaatgcagagattcttatttacattctgctagaggaagaaattgaggcccactgagagtctgttcctcttgcaggttttgtacttagtagcaaggggctgattgggcttagtgctgcagcctaaggttccacattggccacatgctcaattagggcctttagcttgttattaagacgagtgactccggccgggcacggtggctcgcgcctgtaatccctgcactttgggaggccgaggtgggcgaatcacctgaggtcaggagttcgagaccaacatggtgaaaccccgtctctacaaaaaatacaaaaattagccaggcgtggtggcacttgcctgtaatcccagcccctcaggaggctgaggcaggagaattgcttgaacccgggaggcggatgttgcagtgagccgagatcgcgccactgcactccagcctgggtgacagagtgagactgcatttcaaaaaaaaaagagagaaaagaagagcaactctaattttggagccaaaatttgagatccttaggccagtacaggatttttgtcctgatttttgaatttgcttacatgagaagcctttacagagtcctaaacattaaatcaaactgaatgtatgcatttacgaaatcacccttactgtaaagcatttaactgtataaactctttggtctcaggaaaggtagcacgtgtgacacttttctggtacagggaattacagggaattctttgtctttcatgatgtctccatcatgaaataagtgaaataagactttaaataagtgaaagacttgaaataagtgcagtgaaataagactgtgagcagtcccaaaaaatatttatgacaatttttttcccatttggaacatttgtttagcacagtgatagagacctgatgtggtgtttgcgcagggcagattgaatgcactccaaaaggaaaccataaagggtcgagtcgataccacacagaaacacgaggtggtgggatgagtggtttttccacattttaatattttccaggatgacactgaaagccttacccttagagaaccctgagccacctaataattcataactccagactcttgagagggagaaatggaggtttataccattaaatagatgttctgggcctttcctaagagaggctggaaagaaattgagggcagtcatcggaatgtgaccagcacagcaaggtaagggacactgcacgactttgattccttgtggaacaatgtcttcttaatatcagtatttccagctccctgtttttaaaaaagtctctaaaaagcctatcttttttgggaggacaggagagaaacctgtcaaggaagtaatgagtcagcaccggggacctactatgtgctgttcacaacttgatactttcgtgaacggattgtctcagagaggaggaaatcatgactcagagaaattatgtaaatcactgaagatccaggatttgaactttggttcatttgattgcagatttctttctactactttgtgatgccgccttgtgctgaaatcgtggagaatgggggatactctggattgaactggggaactcatggtatccagctaactggcctgaaaacccaagtacccttgatctggaggtgtttggggagaggaagaatgatggttagaatagaggaatcgaggagagagacatcaggagttgctcagactgtttccgtttcatggaaagggaattttgtgccatgtcatgtagtccatggtggtggttcggaagaagtgggtcctgaattcatctgctaccagttacccaatgaaggaaaatgggagaaatgtggcatatgggattttacaaaacacgtttttcttttattttgagacatggccttactctgtcacctaggctggagtgcagtggtacagtcataactcactgcagcctcgaccgcccaggctcaagcaatcctcctgcctcagcctcctgagtagctgggaatacaggtgtgtgccaccatgcctggatagttttttaaatatttagattttttttgtagagatgaggtcccactatgctgctcaggctggtctcgaactcctgagctcaagcgatcctccaagcttggtctcccagagtgctgggattacaggcgtgaggcacctggcttcacaaaaacacacgttttgtttgtttgtttgtttgtttcttaatttggaccaatataggaaaaattttaaattttttttttaggcaaagggactaaaaacaaaaacctcaaatctattatcatcttcacaacatataagaagagacatttgcaaatcaaaataataaataaattaaaaacaagtcaagaaaatgggctaataagacagcaaagaaagaaccttccacttgtctattatatagttaggttagatttaagatgtttgaatcatggaaaatgacagcgtaagtttcttgatatttgtcagtttgggaatttttatttagtagtgcaacattaagagaagtttgactgtccagcttgtttcatgcctttttcttttaaaatcacagttactgttgggagtccattttgacagattttgatgaaaacagtatcaacaagcattgtaatttcactcaatatggaatattctggtggatggcaaaaggggagtgagaacagttcttaggctttcagttccgtggccaggccaggaagaaagcaggagtagcagctcctgtgtgtgactggtgagggctgcaggaaggggctgcaaggacctgtctgccagtgcttcctatgtggggtggggctggatactgcacagcacccttcctgcccaatatggaacgggtaggagtcttacttgagagggatgctgtggatggtaaaaactttcatcttggccgggactgatatttaggagagcccctcttgtaaaggaattatcctgtttggttctccaaaaagagatctacaggagaaggcacagacaaaggccccattgttttctccagggcagctgttcattgcgttggtgctgggaggggtgtgggaagcttgcccgactcaggcctaggtgctcagatgtgggagtggtcctgccgttcagccctattattttcttctgagcctttcttgtggggtctttttgcaaactgcattttcctccaagcagcagaatcttagcttcaccttttttgtggtcttggtgccctggaattttggtgaatgctgagtgcctgggaacagaaaagcctgaaagcaccttgggaactccccaagtcccctctcttttgtccaagagaatacctacttctgcctttccaggggctgtgctgggggaagtgtgtgtgttggcctctctggagaagggcatgctggcttccctggcctgtttacattagtctcattctcgctgcccttgattacaaatgaggcattgggcgggggatttccctgcttccagggaggtcactccttccttttgtctgtgctctcaatttttccacctggggaagagctgccttgaaaaaaaaccccaaaactccccttagcttaactccttgtctcatagactgtccagtaagtggatcagttcataatcaggaagcaattcatctgtctcctgaaattcccttcccctgggttctcttagtccttttctcattctcctgtctctgctgtagttatcagcactccttcctaacaaaacagtgttcccaacccagagtctggtctgctcctgggtgcttcttgagctgaggtgttgatgcaagggttctggaccttaggaatgtgtgtcctggcactttgagtagaatggaaaccctttgaggttaagagctccaggttttttccttccctcttccccactctgtatgtaatgcttgtgagaggacaggaggggtcactggggagggggaccactggtggcccagtttgctggtgtggtcacctcagaagttagggaaagcctgttgccctgagcatgggtagaaagctggcttcagacccctttgctcttctgtggaactccccacccacctttcttgttcagttgaacagtgtcaatatcagagcctctaatacaattaagggatcctatttgaagccctttcttaaaggttattggaaagtgtaagtgaattttacttggtggtaacaacctttccactcttttcacagatttcacaccctttggagagtttctttcttggataattcaggtaggtttttaccttttgttttttaaatcagtggatctagttccatacagtgacttcttcagttcccccggcaaagatccttgttcgggtcccttgaatttccttctgattccactgatgatgctcctggtttcccagggcttccatctcattctcatagattcctgtctaccttatcatgttgcaagctttattctagcttctgttaggccaaattagtatccattctctttctctcttcctccttttttcttcactggaaagttaatgttttgcctttgggctttttttctaagccaggtttcagttcagaccttggtgctgggagtaggcttggattcctgtgttatgttgcttcagcatacatctgtgttgtaggcctaagaatggtcattgcttctatgttgctctgagattttagctccatatccttttgatcaagctttgtgttggtgagcactttttgtgtcctttaagaattcctttcccgccccaaggtcatgaagatagtcctcctaagttttccgtaaatgctttccctcttagataacattcccatttagacctacaatcctatctttagatctcaaccacttttaaaactcggattcctttgttcccagcttgtcctcagtttaggattgcatttttcctcttttgtcacccatctgctggcctttgcagtggtctcttcgatttccctctgtgctgtgcctacccaactcccacagttttcctctctggcataggtcacagaggaaatatttagttagtccctgccaaacattctggctgtgttgttttgcttaaaaagacatgcagtaaactgttttgattcttggtcgtggtgctgtagggcagatgtttctcctataatggaggtgttgtggtcagttggaaggagcggtggacgtgagttcggagaattggattctaatccctgcagtgttactagtttgtggtgggatcttgcgcaaggcacatttgtatgtctgaatttccttttgttagaggggaacttatttcatggtgaagaagacaggactctgtgggtatgagataggaatctaaagagtaagcctgggagatccaggaaagactagacaggcaagaggcagagaaccattagtgtgagcatccttagtggaactggaagggaactcagatgactccaaacagataaaagtaatatatgtagtcgctttgaaaaagtataaaacgtggtaagaaaaactgatggaaattctctgacgaggataacttaaggagataactgcctgtccatgcctcggcttgctgtgggtccacacgtgtttgctgtcacccttgggatgtgggaggcttagccttctgcgggttcagttccagaattcttcttcccaccttccacctccttcataaactcaggaatatttgaaactcagcccagatcttcacctggctttgatttctccatcatgcggagattggtctttggaagttgtagcttccagagaccttcgatgtttgctaacatgtccaagctctacatttattgattgttggttctgttcatggctatgttcaaattcttgtaccctgagggtggtatgatttggttccagcaaggaaggggagggtatttgggggaccctatcatcaagaactaagaaataaagggaaacggctggatgtggtgactcacgcctgtaatcccagcactttcggaggctgaggtgggcagatcacaaggtcaggagttcgagaccagcctggccaacagaatgacaccccatctctactaaaaatacaaaaattagccgggcatggtggcgggcgcctgtattcccagctactcaggaggctgaggcaggagaatcacttgaacctgggaggtggaggttgtggtgagcccaggtcgtgccactgcactccagcctggacaacagagcgagactccatctcaaaaagaaaaataaagggaaacaactgagtaggtgtcctcttggtgttcctgagaggcaggcctttgaagaagaaacaaaatggtttaacttctgcctatgtaatccccatccctcctccccaaatacacttactcagacagagctacatttcttccttatccctgtacccttctgaaatgactgagatttaatcagatcttgcatagtttagacttttttttttgttccagttaaagatttgcattggcttcttccagtacagaatgagttggacaaagacaatctccaaagtattttgctgttctgtggtcctttgtcgggcagaaattctcctaaagaagtactgagggccgggcatggtggcccacgcctgtaatcccagcacttcgggaggctaagacagacagatcacttgatcccaggagttccagaccagtctgggcaacatggtgaaaccccagctctataagaaatacgaaaattagccaggtgtggtggtgtgtgcctgtagtcccatccactcgggaggctgaagtgggaggaccacctgagcccagggaggtcgagactgcagtgagctgagatcgtgccactgcactccagcctgggtgacagagtgagaccctgtctcaaaaacaacaaagtagccgggcgcggtgggtcacacctataatccagcactttgggaggctgaggcgggtggatcatgaggtcaggagtttgagaccaggctggccaacatggtgaaacttcatctcaactaaaaatacaaaaattagccgggtatggtggcgaatgcctgtaatcacagctacttgggaggctgagacaggagaatcgtttgaacctggcaggcggaggttgcagtgagctgagattgcaccactgcactccagcctgggcgacagagcaagactccgtctcagaaaaaaaaaaaaaaaaaaaaaaagaagtacagaaggatgcttgtctttgcagggttagtgatgaggatgaggacccatgctcactgttgctgtgcccaaccctgggaggctctcaggctgctgaaacttgctagagaaagttgtggagctaagtagaatatttctgggcagaagagctccataattgattctgtatactttcaagtaggacttctctgttattttgcaatttttttttttttttttttgtatttttagtagagacggggtttcactgtgttagccaggctggtctccaaattctgacctcctgatccaccaacctcggcttcccaaagtgctgggattacaggcatgagtcaccatccccggccctatattcaccatgtttttatgtattccataagccctaactccactgtgacctacatccccgatgaggatgcctcctactttcctgagactgttaagctaggtgacatagaactctggggtagtttattttctttagatagatcggtactcagccagccagctcaggagaacaggcagtgagcattccccgtaggctctgtagacgtgttccttgcgaatgccaacgatgtctggttgaagtaatagtttgatctggggctggataagagttgtgagcctgtgtctggcatttggtattttccccattctttgatcttaagttgtcctaggcaggtgatccaactggtatctgtcacataatatccagtgcgtcctccctggcactccgattctcagtagtcatgaaccagctggcttctatatctctcaccaatcacaggtaatttaggtctccctcaggtaagtgttcttcagatcctactcacatcctctttaatccccatctttccttctctttctgtccttatgattttgcttaattgcctcccaaaaaaccctccttatcccctttcctttttgcctgtgggataaaagctagctttgatcatagctggtaaagtgtgaaaccaagaatacttctgaaaggacagtcagacatttgggaatgaaagtagacggtttgaagtatcagtgccatcactattgttcttgagaatgcttttaaagattccccccagatatccatcttttaattaacctgcccttcttccaggaccacaatttgaaatacgtaaaaattattatttatttgtttgtttggagacagagtcttgctgtgttgcccaggctagagtgtggtggcgcgatctcagctcactgcagcctccaccctctgggctcaagcaattctcccacttcagcctcccgagtagctgggaccacaggcacacaccgccatgcccggctaatttttgtatttttgtagagataggttttgccatgttgcccaggctggtcttgaattcctgggctcaattgatccgcccaccttggcctcccaaagtgatgagattacaggtgtgagccaccgtgcctggccaaaaatgatataattttattcctcttacattttgttttattgctagtatttacagaggtattgttttgtgtctttattatgtataaacagtatttcagccatgttgttcattaatgagcttgtctgcgcatctggctaccatgtctggtgttgtttctgtggaaaactgtcttcaacctataaagggcgactgcctgaaaaaggagcttttagtgaaaacacagtctgttcaccctctggcccctgctggtgaagttgctctagaagagactgactctgttcccattgcatgaagaggaagaaaagtgcttccaagggcttccgggagcaggtcaggaaagctaggtctgttttcttcagtctcggctagaggagctggaatgtgccatgcctaactttgcctaagctcttttctttttcgcactgtgtgtcacactgggaaaaacttgagcttaaaacccaatgaaattctcccactttgaaaatcatgatgtaattatgacaggatcgcattctttaaacttactgtttagtggggttagtggagttatctcctctgatttttgacaaggaaataatacattcttgttgcaatgctgtatcaggtcttaggatggaaagcgtctaatttaaagctacagacctttcctgtaggacgcatatgctgctaatctatgaaaactgaagatgtcccagtgcactgtgtgtaaactgcagcatctccttgtggaatgaacagttcaggaaaatagaatgactttccaaactgtactaggttccaggtgactgaaaatttcctgtgagggtgggaaagcttatccagatgttcttgcttggggatcagcatgtgtcatcccgttccaaagaagtacagtcacagctgattttatctttgtccttctttctgtggtgcccagggatgctctttttgagttcatctttggtcttgtctctctgaaaaaagcagcatgcattttgatctaggtttaaacagttaaaatctgtggccacagggtaaggtgaaactaatggctctaagtagccaactttttacctttgcttcactggcaccaggctgtgagtaactgaactaaccagctgcagacccttattatgcaattttgaggtaaggatgggtgaaatcctaggggctgggagacagacatgtttggctaccagagagatgacatcagttcatttactggtgctgtggaggaaggggagattccaggtgcttagccttcttcctgcatgtgggggtgtccagagccacccttaatcctattcgcagccaaggtctttgcttgggaaaaaccatatttaactctgtgcctcctgttatccccatagggacatgaagttggaagggttcttgtatctttggcttcccgaacaaagctttgaagaacagacgtgtgtctatatgtgtctctgtgtgtattttgtattaatgctagcaactgattaaggttttcagagtccaggtcgtatatgagaaggggaagtgtcatctggattttatggaatctgtattaggaattgccctttccttgcaaaggaaacagttaatgatgtaatccacttttaaattaaaattattttattattttattttgatatccttcacgtggacacttagtatataacaggaaggcatctttaataactctttctgtgttctgctccttctcctgtgcttatcctagaacagagccttacagggtcataatttggaggaagcacaggcttctgggagctgtggtactaacagtaggactaaaaaaagccttatgacctctgaagcatgactgagagaatcaagctgggaggcattagagcccatctgctcaccagctttgctggcctgtcagatgttgggcttcccctccggtttgccctcctccctcaagatgtgttagaaaatgaagcctgcttcctggaaagcaggtgacgccaaagcctatgctaagaggatccgacctcacatctgcgtgcctgccttgggctcccctgtgactggattgcttcgggtctccctaagacccttgctgacattcaagtgcagccgctgcttactggaagccgtctggggccagcccaggcttgttctgtcagggcctcttcccaccactgtgtcctcgcctcctgtgggctttcacatacaagggcctcaccatccctgaattgccagaatccttgttctgagaacccagtgcctccagtcagggcccaggaagctgtgggtaagctcttggtttccttctcggccagacacttctgggaaactatctgcattcctttctgcccaactctgcctctgggctctggggctgtgtggggtgtggctgcctcatgcctctgtgaggaggaatgctagcgcagttccactgagaccagccatggaaggtaaccaggagtttgaaggtggaattcccttttcttgcagtcctagagccaggagctagcttttcatggattgtgatgaggtgttggttctttttttttttttttttttggagacagagtctcgctctgttgccaggctggagtgcaatggcacaatctcggcccacagcaacctccgcctccccggtccaagcaattctcctgcctcaacctcccgagtagctgggactacaagtgtgcaccaccatgcccagctaatttttgtattttgtactagagacggggtttcaccgtgttggccaggatggtcttgatctcttgaccttgtgatccacccacctcggcttccaatagtgctgggattacaggcgtgagccactgtgcctggccgaggtgttggttcttttaaaaattttccaacttgctttcctgtctcgctgtcactctggaaggcgggggtgaggggtaggaggagagacagtcggctcagtcggctgtgatccatctttggcactggagatgggtgtggcagataccttttgtgaggaaggagcttagaggcagatgagagaatctgcctcttggtcttggtataactggacgtctccccagtctggctctgttgacactctgaatggtttgtgaaggcatcctctggcccctgaaggcattaccatccttaccaggtttaaaatctttcagagtgcacccagcatcatcagctcctgcaagcagaaagggcccaagggagcatgaacacacactgggtagaagttaagcctggttttttaaaatttaagtttaaatttttaattatttagggagtgaatcctacagaatttaatttttccatcttttttttatggagacagggtcttgctgtgttgctcgggctgctcttgaactcctgggctcaaacagtcctcttgcctcagcctcccaacgtgctgggattacgggagcaagccaccccactgtgtgcagcccagaagttgagcctgagaggtaggcttattgccctgtgtctacccaagggtgtgtgtgtgtgtctggaagtggagattaggagtgaatgcatcttataaacaggagaagatctggagagacgatggtgggggctggctgtggggagcacaaaagctgggacttttgcagaggtgtatttgctcccgagtggccagaagccaggagtagtggggaaggtgggtttaggcatgctaggttatgcttgcattgctgagtaccttgggtgtgatggccaggaatgctttcctctgggaattgggccgatctcctgacaatcctccccattttacacccattacatacttatgtgattcttacctatcagggaggtcttggggtcatgtgttgtggggcagaggctctgagtctaagaatgggctggtcagccaggggctccacctcccagtttgttggcttcctcaaggatgccatccttctttgcagctgccaatcttcactggtgtctgtgccctggcagggtatagagcccttctcatgggtgctctgcctctttgggggcttgagaacagatggggcttaatttgaagcagatttccctccagggcccaggtatgaaatatatattagaagatgactactggtcttggcttttctttcttatgtgtctctttcttccttttatcttcccactactgtcaggcactgtgagcagctgttgctatcacacgggcggatcagaacatgaagaatggagctaaatagagctgtctgcatgctgttctgatgggctcaggctcagcctcagagaataggtggattggagcctgtgatgggggctctttcccccaccagagtgggtgaaagcagggaggaacaggcgggaagatactttaggagttgggagggtattaattccacctcttctctccttcctctgtaccccaacattccctgtgagttgtcaagggctggagagataacaaagatctttctttccaccatcaggcagtaaggcaatgcagccctcgctgaattttcagctccactgacattgtgatgcaaatattaaataaagcttattttctgacctgagggaatttataagctattgggagagacagtgtttgttaaacaagtagagaatatccaagatcttaactgtgttggtttacgaaccatggatacatttatagttcagaacaagaaagttgtatcttaaaaccacagaaaactttccttggaggaggcaggatttttctggtctttaaagttgggtcaactttataaggaaaggagagatgttcactccagtgtcacggcgatgatctaccttggaggggtaggtgtggcagagcagagccagggacctgagctctggaagtcctgccattacataggtgatgtgaagtgatgcagtgaaggtggagttttgtggaaatctctcctgtagatcgatgaaaataggataattttggagaggccagagaaaggcagtgaggaggcctgctaaaggacctggcaggtcagcaacaggagagaggaagggggcgagtcctagagaatattccagagtagatgaggcaggactgacatgaaggatgaacttgaggggcaagacggaagacaccaacgtttctgacctgtgagagctaaccaatactgacacgttctgtttgtgaagtacttggacttttcaaagcactttttcattcagcagagcattgtctgggctcttagagttcatctagtctggctctgttttatagaaggggagattggggacgaaaggggaagcgactgttcccagcacacacagctatttagtggtggggcgggacccgtgatataggcctctccctcctaagacaattttaagacaacagcagcatggaagagagtgtgggcttcgcagaaagtccgtctggctggataacattaggtgataaaccaatctctgagagctgagagaaacttactcagaagcattcagaccatatcaatggttcagctcctcagaattgtttttgagaaccacagagaaggaagatggactccttgggtccttctagttctcagattcataggagtgcacaaaaataatgtatatgaatagtactgaatggggctccctggagactggcgggtctccagtgtggtgcctttctaagggaattttcaagataacttgactccacatgatttttgccttgtgctgaccacggaagctgactgcaaagacaccactgctgaattgcgctgtggccagtcatcaccacagccaggggctcagcattgcagtgacggctctgatgtgtcacccactcctctcccacctcctcttacaacatatgctgcacatgcacatgcacacacataccacacacacaaacaccacacacaccacacatactacacaacacacacacaccacacatatgcacacacaccacatgcacaaaagcacaccacatacccacaccacacacacaaacacaccatacacaccacaccacacacaccacacacaaacacaccatacacacacacgcacaacacactccacacatactacacacacaccacacacatgcacaccacacacacacccacacacacaccccacacacacacactttctcctcccttccctgcctccctccttcctttcatcttactttttgtcctccacagtttcttgtctcatccctgtcttccacctctgctccccgctcttgtctggtctaattaacttcctctgttggagcagcttcccctcttgggtaaactcagacatgaccgcagcaaagcagcgtggaatcttctgtttggtcagtgttccctgaaatggtggtggcactcagccatccgggtcagaagctggagtccttctggagccttgctcacctctgcagctggtcacctccgagtccttgtttcctattaaaagagtgctcggtccgccctgcttgtccccattctcaccaccccacatggcaggagaggaagcagagagggatcatggtggaagaaaggaacgcagagatgagggtcccctttggtgtccttgaaagcagtgacccctcacagagtgggttcttgtggtctgcgtcctgacccccagcttccccgcagatacagctgcattggagcccctgaagacaaaccagagaagtgctgcatcctggggggcaggaggctttgctttgcccagggctgggctcctgaatgaattttggtgcagccttaacggccgagttgtgctgttgaaggtgcactgctctgtgtccaggcacttctggaagaggaagtcaaggtcatgaggctgaattaggctttgtgtgctccttctaggttctcagcgtctgtctggtcctttacttgctttagatctctgccccagccactgtaggcaggaacagctctcttccttgagaactcaagaggttctcaaggtagtaaacttcatggtgctcttagtttagtctgaatggccttggccttggggtccatcccaagttccatagccagcagttgggtccatgtctcacatttttgtccctgtctcctccacacaacattgccacagtccacccccgttccccctccccacctccagtctggtgcaatagggatttaaggaggaaatggattacctggatagtagaggaaggaagtttgtggctggcaaattgttattttatttggaaagtctatcccattctctcccaaccctcagagcataaggtgaagtcagatgtcgttgagctgtctctcttcctagccatcttggataaaacagaggtacagggttcacccttcagaagcttgctgagacagtcttatttactaaaacaacaacaaaacaaaaaacacttcaagcccccaaatcccaaccacataagtctctaagcctctgacaactctcgcatctctctgggtcttggaccctctgtgacaaagcagtggtaacttggtaactgtcttgggagcacgcagagagagtcaagcctcatcttgccaaattttcccagagtatgcaccccttcttcatctcctctgggcctttaccttagaagagctgtgtcatgcattactgatggcagaggctgtctgcattggagatgagtggctataatctttcatcaccttcaggagaactgtgaaatcgttgacttcctttatctgctcgggtttgagatgagctagcatctaccagttttagcctctggagtcccatggccttgtaagaagggagtgttctgctggcactagctgtgcgggggacagtagtccttgaccctttgttcttttcactctgccttcctcctctcagtcattcacagctcagccaaccagctaagtggggtgtaggcagatgtatcaccccagggtaaggagccccagacagggagggaataaaggctttctgaattctttctttcctgcaaattcaaaaggctaagtggtgctcaagtatgttccctgacatccctgggagtaatgctcaggaattcccccaaatttgccactctgagacttccaaacaagcttcctcctgtttctgtccttcaagatcttaaattgctttctactctccccgctccctccacattcctctgcttttcctttcatcatctccctcatcttcccttccttgcatcgtggggtctaattgatttctctatcacacaggttgttcaatgttgatctctaagtgaatgaacattcataaggacctctttttacacaaaggcaaactagctctcttccgcagaaacataggatgggcccagtgcatgtcttgttagataaggagctaatcattgcatagattaggaacttctaagttcttaaccttggggaaaaagaagatagtttaaaaaatggcatcttctcctgtaggatgttgacgtttatttagtatgactcatctgtagatcagggccgccttccatgttcctaggataagaaccggatgttgaatggccactgctcttctctctccccagatccttagaagaagcatcatagggttcctttacaggagataagctggtatgtctatatcccagcaatccctgaagaagctgaaatgctgcattcctaccatctaatgtttcggttacagcatttaagcctgagtccttgctcacaacagctatcagatgacagcttagtataggaggttaaagatccacaagaattcactctgatagttaaaaatatcactgtgattctgcttgtagtgaaccatggtttggggagatgatgggtcagaattgtttggattcctgagctgctctatatccttgataaagctcggatggtcagagccccagctgggaggttttgatgtgactagcaggagggacaaagggcaggtcaggcagggcccagctgtctcttctttctgtgagcgttctttattccccagagatgactccgtggggataaaagcggtagttttctatcttcttgttctgcaggagaacttacaacctcatgaatcagacgtgttatcttctcagtttaaggggctccaaaagacttgatttcctttttttctttcaatatatttgtctgaaatgttattcaagactccatttaccccgggactgcaaatataatatatgtcccctggaaacacttttgttctaaccagaatggagcagagtaggacatgaatctcatttgatctgggccctgtgttttgtcagctaaactcaaaatcacatttgctcatcagttgactcatattgaacctttcctcaggtctttttcactaataaccatctttatcctgttgtcttgcagtatttttctaagcttcagtgtaaaattacatattttaccctttaaaaatttcatcttgccgtatttaacctatggttccagtttgtggaggcttttctctctgattatatctagtatattcattatccctcccaattaatttatcataaacatatttgataattgtgtcttatccaagtcattgataaaaagggtaaccatgatgagatctagaataaatgggaagagaaaggaatattacagggcaacatccctgatgaacatagatgcaaaaatccttaacagaatactagcaaatagaattcaacagcacactgagtctaataagacaaaggtccagtatccagcatctataagtaacttaaacaaatttacaagaaaaaaaaaacccatttttaaaaagtgggcaaaggacatgaacagacacttttcaaaagaagacatacatgtggccaacaagcatatgaaaaaaagctcaacatcactgatcattagagaaatgcaaatcaaaaccacaatgagataccatctcacaccagtcagaatggctgttattaaaaagccaaaaaagtataggtgctggtaaggttgtggagaaaaaggaatgtttatgtagtgttggtgggagtgtaaattagttcaaccattgtggaagacagtgttgcgatacctcaaagacctaaaaacagaaataccattccacccagcaatcccattactgggtatatacccaaaggaatataaatgatttgattataagatgctgggtgcagtggctcatgcctgtaattccagcacttcaggaggccgaggcaggcagatcacttgaggtcaggagttcgagaccagcctggccaacatggcgaaaccgtgtctctactaaaaatacaaaaaaaaaaaaaaaaaaatagctgggtgtggaggtgtgcgcctgtagtcctagctactcggaggctgaggcaggagaattgcttgaatctgagaggtggtggctgcagcaagccgagattgtgccactgcattccagactgggtgacagagtaagactctgtctccaaaaaaaaaaaaaaattttgtttgattataaagatacaagcacatgtatgttcattgcaacactattcacaatagcaaagacatggaatcaacctaaatgcccatcgcagtagactggttaaagaaaatgtacatatacaccatggaatactatgcagccataaaaaaagaatgaaatcatgtcctttgcaggaacatggatggagctggaggccactatccttagcaaactaatgcaggagcagaaaaccaaataccgcatgttctcacttataaatgggagctaaacattgagtacacatggacacatagaggagaagaacaggcaccaaggcctacttgagggtgaagggtgggaggagggagaggatcaggaaaaatactaatgagtactaggcttaatacctgggtgatcaaataatctgtacaacaagcccccatgacacaagtctacctgtataacaaacctgcatatgcacccctgaacttaaaaaaaaaaaaagaggccaggcatggtggctcacgcctgtaatcccagcactttgggaggcctagttgggcagatcacaaggtcaggagatcgagaccatcctggctaacacggtgaaaccccacctctactgaaaatacaaaaaattagccgggtgtggtggtgggcacctgtagtcccagctactggggagcctgaagcaggagaatcgcttgaacccgggaggcggaggttgcagtgagctgagatcacgccactgcactccagcctgggcgacaaagcaagactccatctcaaaaaaaaaaaaagaagaagaagaagaagaatgagcagtggcctcaagtcacaaaaaaaggaaaaaaagggttcatgtaccatgatcaagtgggatttatccctgggatgcaaggattgtgtattagtccattctcatgctgctataaagaactgcccaagactgggtaatttatataagaaagaagtttaattgactcagagttccacatgtctgggaggcctcaggaaacttagaatcatggtggaaggcacctcttcacagggtggcaggagagagaatgagtgtaagcaggggaaatgccaggagcttataaaactatcagatctcatgaacctcactcactatcatgaaaacagcgtgggggaaatggcccccatgacctaatcacttcccattggatccttcccatgacacctggggattatgggaactacaattcaagatgagatttgggtggtgacacagccaaaccatatcagatggctcaacatatgcaaatcaataaatgtgataaaaacagatgggatgtgcctaaacttctaggagttccagagctcctcttcctggttgatgcagattcatttcatagcactgtttggacccagctgtcctgagttaccactccatccagctgccggtgcatctctgatttttttttctttaaagatcaagagagatttttctgaagtccagataaattatgtccctgacattctttgccatatgtatgtgcatatgtgtgtattcatttatgatatatatattatatacaaatatatattgtgtaaatatgtatggatattacttttttaagtccccaatctgttatttatggatcacttactagctattgctgagtgttttacatgtattatctattttattccctacaataattatatagtaacctcattaactaaaagtaatgatgtctcttgatgcgatttgtacttaatctccagggatcaatacttccttctctgagtccttgccactttttatatattcttttctggagttttgcctatgatattgattaagaaatattttttgagcacttgctatgtacaaagaaagtactgcattacagcctgctggaaattcaaagatgaatatgctagaagagattatatgtaattaaaaatgtaagggaatgaacaatagcttggtagggaaaggaggaaaaacaaaagaacagtcctgagtgtgaatggaatgccgaaactagcccacctgcagagttcgaaagggaaacctttagaagccatggggatggtacagtccacgttagattctcttcacagaggtggaaagtatccagttgactgacagttttaaatcctatctcagtaccttgttggagtggctccgtgagtctgaggtcaaagcggaaggttgcaggaaagagtccacttttgaaatcttttctttaaaaaaatgttgctaaacgttcagttataagataaatcctgggaatctaatgtacagcatagtgactatagttaatactgtattgtttacttgaaatttgccaagagagtaagtcttaagtgtcctcacctctccccaccacatacacaaaatggtaactgtgtatggtaatgaatgtgttaatttgtttgtgatagttgtttcacagtgtattagtatatctaattatcatgctgtacatctttagtatatagaacttttgttaatcataactcagtaaagttggaaaaaattgagaaattatttaaaatatgtagaatgtctatttttatatgtatagtttaagtgacccaccacctagcttaagaaagaaaatgctactattaactttaaaatctcctgtgtccttaccagtaattgatttaatttaagaaaataaatgtatgttgaatggtagaaaatagttcacaagtttgagaccagcctgggcaacatggcaaaaccccctgtctacaaaaaataaaaaaattagcagggtgtggtggtgcacacttgtagtcccagctactcgggaagctgaggtgggagaattgcttgagcctgggaggcagaggttgcagtgagccaagatcttgccactccactccagcctgggcgatagagccagaccttgtttcaaaaacaaaacaaaacaaaacaaatctacaatagcagcagtgtagaatatgtagaatttagtaaaaaggaaaaaaattgctaacatgattattgcttggtataaatttttttcacttgcatatgtctttacattttaatgtagttatagctttattatgcataattagcgttgtctcccatgctaataaagtcttcgtaattgccatttaaagttagttcttttttttttgagacaggatctctctctgtctcctgggctagagtgcagtgacgtgatcactgttcactgcagcctctatctcctaggctaatgtgatcctcctacttcaacctcctgtgtagcggggactacaggcttgtgctaatttttttttttttatttttggtagagacaaggtctctatgttgcccaggctggtcttgaactcctggtctcaagagatcctcccaccttggccttccaaagtgctgggattactggtgtgagccagctagttaatttttaaataaaaaacgtgttataaattcaaaaggtacaaaaagatatacagtgaaaagcaagttttcctcccaccctcttttctccttagaacaaattgctgctaccagtttgtggtttatagtagtttcttttaaattttttaaatttaaattaaattaaattaattaattaatttttttttttttttgaggcagagtctcgctctgttgcccaggctggaatgcagtaacacgatctcagctcactgcaacctctgcctcctgattcaagcagttctcatgcctcggcctcctaagtagctggaattaaggcatgcgccatcatgcctggctaatttttgtatttttggtatagatggggtttcaccatgttggccaggctggtctcgaactcctgacctcaagtgatccacctaccttggcctcccaaagtgctgggattacagatgtgagccgctgcacccagccatagtcatctcttacaatggctgcacaatagtccatctagtgcagtttttcagaccaagggccataatccattattgggtcaggaaatcagtttagtggggctctatgtactttgttttcttaatttcttaataacatagattaggattgaaaatagcagagagcatcacatacagtaaagatagtgttgttttgagaaacctttttggttcagttttttacacacatgcacatacacacacaccctctcacacatgcatatgctagattacaatgtaaaacattctttattgggttgcggtttaaaaaaatactaatctaggaatgactgatatggagattgtttctaattcttaaaattattaaaaataatgctggaaacagacatttattctgcatacttaggaattttctcttaggatattctccctgagtgaggctactgagtcaaagtctgtgagcattttaattgataagttactttccaaaagccatatcccatttactatttaataaatgtcatctgtgctttgtttagcataggttatttttattttaacacagactgttttctatgggtaatatatgtgatatatatattttttaacagaaagggatgatttattaattttacccccaagtaatataaagtgaacatttccctattttactaaatattcttcaacagcagtgattctcattctgggggcgacttttcttgggtgtagggtaaatactttagtgcttcccaaacttgagtcagtcttacctacctttatgattttttcctgtaaccatgtattgtatatacttttatttacttatctttaaatttggcttttaaaaactttttacttttaaataattttagacttagagaaaagttgcaatggcagtacaaattctcctaatcttgtgtaactacagtacaatgatcaaaactaaaattgatattgatatagacttactgggatttcaccagtttttcttacgaaactcctttttctattccaggatcaaatccaggatcccatgttgcatttagttgctgcgtctccttagtctcctctaatctgtgacaattcctcagtctgtccttgtctttcatgaccctggcccttttcaggagtactggtcaggtattttgtagaatatcccttaggttgggtttacttcatgttttctcataattagatcaaggtcatggatttgggaagagcaccacagaggtgaaatgcccttctcagcacatggtatcggggtacgtggtgtcattatgtctttattgcctgtggtgttaacgttgatcacttgattaaggtgatatgtgtccatttctccaccgtgaggttatttctacctttgtaattaataaatactctgggagagatactttgaggttacacaaatatcccattttatcttaaacttttttttttttgagacaaggtctcactctgtcacccaggctgtggcgtgcagtggcatgatcatggcccactgcagccttgacctcctgctaggctcaagtgagcttcccacctcagtgtcgaaagtagccaggcctacagctgtgtgccaccacgcctggctgttttttattttttgtagagatgggggttttgccatgttgcccaggctggtctcaaactcctgagctcaagcgatcttcctgtcttggcctctcagattgttggaattacaggcatgagccaccaagccccgcctctccttaaacttctacctgctataaaacaatactaaaagcatacaaaaaacgtaacttctttagtattgatctaatcagtgagattggtaataatgaggttagtagctggctttgttcttctatacattaagtaatataaaagtattaaaaacttaaaaaaagtttgtccatataccacttataatcatcttgtatacacaccccatcttggacactctggactactgtgaggtgttaagcatcaaatggtctaggttctgtggtgacattattaataccctttttagttggattgattagttggttggttttattagttcattcatttaaaaatttattaattgtacgtggtacacagccctaagctagaattcagagttaagacatagttctttctctaaagaatattacagctagcaggagaattaagctgaatgagctttggtgcagtcacacaaggcagtggggcatggctggcattggagtggcagcctgttctgaggagtactggggggtagggctagagaatcagtctagccggggagaatgaggggagctaggattgaggaggttgacacagtctgggctcacacttcctacagccttgcccagatcttactcttaggggtacttctttcccaggctgaaggtattttcttgggtagatcatagaaaagcagcttgagtccacattcctcttaataccctacctcttccctttccctccactttgcaccttgcctccgcaatcctgaagattttaatcatggtaggttaaggtcattgttgaactcagagttctgagctagctaagcttggaaagcctattattattattattattattagagacagagtctcactgtgttgcccaggctggagtacggtggtgtgatctcagctcactgcaacccccacctcccaggtttcaagtgattctcccaccttagcctcctgagtagctgggattacaggcgcctgccaccatgcctggctagtttgtgtatttttttttattttttatttattttttattttttattttttattttttttattgatcattcttgggtgtttctcgcagagggggatttggcagggtcataggacaatagtggagggaaggtcagtagataaacaagtgaacaaaggtctctggttttcctaggcagaggaccctgcggccttccgcagtgtttgtgtccctgggtacttaagattagggagtggtgatgactcttaacgagcatgctgccttcaagcatctgtttaacaaagcacatcttgcaccgcccccaatccatttaaccctgagtggacacagcacatgtttcagagagcacagggttggggataaggtcacagatcaacaggatcccaaggcagaagaatttttcttagtacagaacaaaatgaaaagtctcccatgtctacctctatccacacagacccggcaaccatccgatttctcaattttttccccactcttcccgcctttctattccacaaaaccgccattgtcatcatggcccatccccaatgagccgctgggcacacctcccagacggggtcgtggccgggcagaggggctcctcatttcccagtaggggcggccgggcagaagcgcccctcacctcccggatggggcggctggccaggcggggggctgacccccaccccaccctcccggacggggcggctggccaggcagaggggtcctcacttcccagtaggggcggccgggcagaggcgtccctcacctcccggacggggcggccggccgggcggggggctgacccccccacctccctcccggacggggcggctggccgggcagaggggctcctcacttcccagtaggggcggccgggcagaggcgcccctcacctcccggacggggcggctggccaggcggggggctgatccccccacctccctcccggactgggcggctggccgggcggggggctgatccccccacctccctcccggacggggcggctggccgggcagaggggctcctcacttcccagtaggggcggccgggcagaggcgcccctcacctcccggacggggtggctggccgggcggggggctgacccccaccacctccctcccggactgggcggctgaccgggcggggggctgacccccccacctccctcctggacggggcgactggccgggcagaggggctcctcacttcccagtaggggcggccgggcagaggagcccctcacctcccggacggggcggctggccgggcggggggctgacccccccccacctccctcccggtcggggtggctgccgggcggagacgctcctcacttcccagacggggtggctgccggacggaggggctcctcacttctcagacggggcggttgccaggcagagggtttcctcacttctcagacggggcggccgggcagagacgctcctcacctcccagacagggcggcgggacagaggtgctccccacatctcagacgatgggcggccgggcagagacgctcctcacttcctagatgggatggcggcggggaagaggcgctcctcgcttcctagatgggatggcggccgggcagagacgctcctcaccttccagactgggcagccaggcagagaggctcctcatatcccagacgatggggggccaggcagagacgctcctcacttcccagacgggatggcggctgggcagaggctgcaatctcggcactttggggggccaaggcaggcggctgggaggtggaggttgcagcgagccaagatcacgccactgcactccagcctgggcaccattgagcactgagtgaacaagactccgtctgcaatcccggcacctcgggaggccgaggctggcggatcactcgcggttaggagctggagaccagcccggccaacacagcaaaaccccgtctccaccaaaaaaaaaaaaacgaaaaccagtcaggcgtggcggcgcgctcccgcaatcgcaggcactcggcaggctgaggcaggagaatcaggcagggaggttgcagtgagccgagatggcagcagtaccgtccagctttggctcggcatcagagggagaccgtggaaggagaccgtgggaagggggagaggggagaggggagaggggagaggggagagggagagagggagaggccaggctaatttttttttaaagatctagtttgtgtatttttagtagagacggagttttgccgtgttggccaggctggtctcaaactcctgacctcaagtgatctgccagccttggcctcccaaagtgctgggattacaggtgtgagccaccacgcccggccagaaagcctattttagaagggtaaaatggtgctttcatggggatctagggtattgcttccttgatccagtctttcctggctggaagcctatgtttatgtggcccagtgttaacatgctccgacttaataagggacagtggtcaggggtctgtggatttgagagatttcagaaaattggcttatatattaacgttatcacagagactccaagaaactgaagcaagctgtgagtacctatgttgtgagtatctggacattgagctttatacggagggttgtgagctgagcggaggtgaactagggctggatgactggcagactgaaggagagggggcgcaacctagcatgaaggtgtgtggtagctgcttcactgcagggctgtggggtctagaagaattatagactgaattccacacttccctagttcagagccttaaggtcaggggtggggtgctggtggtaggagaggcagggggaattaggtcaggagtaaggacctgggaaaacttcctatcataaaacactaggacttgaccacagaatgggtatttctctgccttcctaggaaggctgtgcaagcaaagtttgtgtggcagtggtcaacactgtgcaggtcctgccagatgtggcttccaggtggagggggcccaggattgccatcttgaggaagacatttgttttgttgatctgaaggccctaatagcacccaggtagagaatgcttgatttgcaatagacagattgtcttccaagagaacttaggtattgtcagctgttcaatgtctgctttgtaaaggcaactttgtctcagacttatggataggggtgagtctgagcaaggacctcagcaggagccttagtcctctttcaggccatttcctaatttccccattctgtaatttagcacctttcttctctgtccagccctccttaggcaggaagcctgagtcttccattttttttcttctaaaaaaggctactgttcattggtgatggacctctgtctgatcccaaagccccaagcccggggctctgctgaaaggagtctttctgctgctttggacttagaaagcagtaggactgggtgactgcgtagaatgatgcagtaggacagtcaagccgaaggatgcttgaacagctagtccagccctctcatgtggaggaaaaagcaaaggccctaagggagacagggacttgcctaggattttaccattccagaaagctggaagccaggactgggctccagcctgctagctgtctactcttgaattttaaaagcttccctcttgaccacattgccattcacaggcagaagaggaaaactgtaaagcccttaagggctcttctataaatggcagctagaacccagtgtaggagaattggtggagaggaatatgtttgattccccccaccttttttttttttttttgagacacagttttgctctgtcacccaggctgtagtgcagtgatgcgatgatgtctctctgcagccttaacctcccaggctcaagcgatcctcccatttcagcctcccaagtaactgagaccacaagcgtgtgccactatgcccagccaattttttaaaattattatttgtaaagatagggtttccttatgttgcccaggctagtcttgaactcctgggctcaagcaattctcccaccccagcctcccagagtgctgggattacaggtgtgagccactgcacttgacctgatcacccattaatttggtagaactggatgttttcagtgggaataccactggaccccagtctggtgggcattagaaactaggcttcccagaggcatttgaaattagactgccatttcttaggcattctaagatccaaccaataatattgaaagaacagcccattttacttgaatttctttgatcccaaagtaaggaatgacttgaaaagatttactctgttcctgtgttttcaggttcagaatttcagttgtctttaaagagacaagaaagtactataaacccctctagtgacctaatccaaaatccgatttacatatatgtattttcttgtacaatgtaggtccatccactcaaattccctcaccttaagagaggaaatagctgtttctgtttgtttgttcggagagtcttttcaatgatttgtttatctcacacacacttattgcatacattgaatgaaatactaaagtggatacacctcgaggagctcaggtctgtgggggagacaggtgtgcaagtaacagtgataaagtgatatcaacgctatagtaaaggcatctttaaactgctgttgatttgcagaagagacaaacagattctatcaggagattgaaaaatattttacagaggaggtgataaatgagttggaccttgaaggcagtaagattttgttagtgggggaaggagaggcattcagataaaggtaacagcatgagccacagagggagggagaggaaaatgcaggcagtgttcaaagaaccaggcagtgcactgtggttgtgcctgtaatcgggtggttggtagcaggggaggtgtgggcaagagatgaagccagaggatttcagatttgggtgggagcgtaggccagaagagggaacgttggatgtagtcacactgctgttggtgttacttagaccttcatttttccaccagactgtagtgttcaaaattctttttagtaagagaaccctttttttctgaactttttacaaccatctccaaattataaaacataagacttttttttttagtaaaaatgtatttttttacaagcacagtggcttgcaccatggaggggagaggaggtgttttgtccttggagctgctggcctgagagaaccttgtcatcgtgggagctgggccattcctacacagtggtctggcaatgacccggtggtggtggaggcctgtgagtgggcactggtaatgggagcagctgtaaaaccctggaggccagccccaggagagtgaccttaccaggaaagttctgggaaacaaaccacagggaggctttacaggaatttttggttgtgcccacaggcaaggcacatgaggaaaagaaatgtaattatagtttgtaagtcgatgaaaagaggcaatgagtgacatgaaatagctgctctaagtttcttcttcctgtcggacaggaagaaatggggttttatgcatttcattcagcagatatttattgagtgccagctgtgagctgggccctgcacaaagtgcagggaatattggtggttagcaaaatagtcaaggttcgtatcctaaggaactcttctgagggaagactgagattaagcagataactgtataaatgcataattacacagcatggtgagtgctctgaaggataagtgtggggagcctcatttagattggaggattgtgaaagtcaagagacaggagagtcaaggtgaggcaaggtgagtaagagctatccaggcaaagactgcttggtaggggagtgtcccagcaacgggaaacaacctggaaaaaatatgacacctcaggggaactaaaagcagttgtatgtggctgatgcacagacagggaagggcaggaagtgtgctgaaagaaggcaggaggagaatcatgctgggccttgtaggtcctggtaagaagttagattttatcttaagtgtagtgggaagtcaatgaagtgtgttaagcaggaaatgacctgatctggtgtaaaaaaaaaaaaaaaaaaaaaggtgattcagacagctctaatgactttgtgaggggagagtggaagctggggcaattaggaggtttttgcaataattaaggtgagagatgggtagcatcagaggtggagaaaagtggacagataaaagatatattttggaagtagaattgtttgcagttgggaaatgggttggatgtgggcagaaataagaagggagagttgaggatgtctcccaggtttctggcacatgtatgcttgcaggcctctcagtagacagcagagagcttatataaggttgtcaaatccttatccttcagaagggtcaggtaggattggtctaaatccagccttgcagaggcagtggtgggattcagctgtccctgactctgcccagttcaaggagtgtgtacacagtagcattacccaagcagggattccagttctctcagtaatggggcccttcctttgtcccttcccccaggacaaggccctaaggaacctccataactccagcatgccactagggggagcatggcccgcattctgggtctggtttggagggcttcttaagtttggattacttcaggaactgacttgtatcagttctagtactcagtcctgacccctggcccctcatactgcttaaaagaatgcctggcatatggtaggtgctcaacaagtgttaactgatgttactactgtattattaatattatcttattatagaaaggggtgggatcaccccttctttctcaggatggagactgggcaagtggaatgtgcattttgaggatcaggaggagagcagagggatgccttttggacaaggaagaggcggaaatttagtgatttgatgatactgcatttgcccttctgtcttgtctttctttgtctttctttgtagacttgggattcttcagctggggcttgggtggggttggggatttatagtgggtgattaggttcactccctttcaagctctgattgcttcactaaagcagtagtgccccccatttaggatttgtgccattctgtcatttcctgttggattttataacactttcctaccttaacttctggtatatatttaccttttaaactcaagtcaatcagaatcttgttttgagaatgttgtgatatgctggaaattaatgaaaaaaacccactagattctgcataggatgttgcattaaagattctatcaggctgggtgtggtagtacacacctataatcccagctactcaggagtctgaggtgggaggattgcttgagctcaggagttcaagaccagcctgggcaacataataagacctcgtgtcaataaataaataaataaataacatcaggacctttagcactgtttttgggagcagcattggaaaatatcctccttaagcctcagtgtcctcatcctggggagggtatcaactgtcccagtgttttttgtttgtttttggtgaggagttgtcaagaggagtaaagttcttagttcagttcctgacttgagagtgctttcacggacagcatctcttccgatgctcagtcccagccctgtcagtaggctctgtaggtggaaagggggaagtcatgggacttgcccaatggcacatggcccgttagtggtggagtcaggcactgccaaggtcttctgacccctggtgctgttgcaaccactgtgcttaatgtactcaagagacttgaaaggcttggggattgtttctagattttatttcctggttccatgacctggggcaagtaattttacttctgttgtagaattaaaaaaaaaaaatctgttaaattagtataataatgccaatcctaactttcagacctgtcatgttgaacagacgagccaagattttgagagtcgtttagaaaagtgcaaggtcacatatagctgtagggtagggctttttctccgagctgtgcatcaggacgttttacatcttagagatgctgtcttaaggtctttaggctgaaaggatggtagtcagcctatctcgccacaacttacaaggattccccaccttcccttgggagcccagcgttatctcataaccagttatcaaaaagttgacagtttttgaaatcaggtggcaatatactttagttgaaagtgtgctggactagggcgaacttggctgatctcttagttctttgactgcctaactgtataagtgcagatcaaatgtttaatctctctgagtctcagtttttccatctataaaatggtcataaggccagtatgctggctcacgcctgtaatcccagcactttgagaggctgaggcaggaggattgcgtgaagccaggagttcaaaaccagcctgggcaacatagtgagaccctgtctctataaaaataaaaattaaaaaagtagccaggcgtggtggtgcatgcctgtagtcccagctacttcagaggctgaggcaggagggttgtttgagcccaggagtttgatgatgtagtgagctatgattgcaccaatgcattccagcttgggcaatggagcaagatcctgtctctaaaagaaatttaagaagaataataaataaacttgaaaaaatggtcataaaaatatctgtgcagtgtatttcaaaaggttatgaggatcaaacaaaatgatacatgtaaaaagaatgttacaaagcagaaatgtatgctgggtaggggggagaggaagggacaggatggggatggggatgggactaaacttagggggtctgccgtgtcccagggactgtgctcattttctgacaggagcaatattattaccgactgtgacagcagctcccacgaagcctgcaccttagctgcagatccttagcagggcagagagacaaggctgtatttgtatcaggtttgtcgtctgggttgtgactctcgacttgcccaggattcttcctggtcctgaccgagttgtctttgctctccatttcaggaagatgagagactgcttaggcgccaccactagtaccatgagtccctgcactggttaaagccatcgccacaacctggacaggcagcaaggtaagcagagaggccagtccaggcgagctcctgggatgtgagtgcatttccgccccaactgctgcccggaaaaatcccaagtgcacaaacaagtcaaggcagcgcatcagggtccctcctacccgagctccaggacccagaggaagctgggtccccttcaagcgcttcagctagctccctcccccctggcagggattcttccaagttataaaaaatgagacactggaggggaagaaaacaagtccactcactgtcttctcccttctcccctctgagctgttcaagcaagttcccaggagcagttcagagcccctgttggactggaagggaggtaggaggagtggaatgcatgcaaaaaccgagctgatcaaaagacagtgctgtttcatggaagcctcccagaactgagagagagagagagagagagagagagagagagacagtgagaaagaaagaaaaagagagcgcccttgtgcacgcgctaggccaagagcgcgccgctgtgcgcgcgcccgcctagcgaggacagggtctccatgacaaccggcctggccggctagcagtgctctgctcacttggctgcgaggagcgccacgaaaggtcagaggaaggagctgtgggaagctcgcagcaggtatcggagcttaagccagtggatttgggggccctgggctccctagccgggctgcggtgtgagaatggagtgggcaggaaagcagcgggactttcaggtaagggcagctccgggctgggatcatttggcctcctttcctggcccttctctccggctgttttctgggagtcaggcgagtgtctgtagtctctgctcggggtttggggctcaggaatgatgtcatgctccaacagttggattctattagcttaaggaggagggaaacagccaattttcttgactttgcaaatctagctgatctcactcttgctgaatctgaggtgtttagacttcactctaaaaagcatcattttacttttatttagcacaaaggcacaggatatttttacaggaagaatcttttatatggaaaaatctgagttaacatcactcccgtggtgtttgtagttcttacagggaaactccagtgccttttgagccgcttgttcgtcctagtgaacactgtctgttttgtctcttggtgctgctatgtctgacctgtaatgggaaaaaaaaaaaaaaaaaagctaattaagctcagccaggagcctgtggtgagttccaagtccctctagagcatttattaggacagagggactgtcacagggatgcctgagctggggttttgcactctctctcttccaggcagcttggtaagaatcaagctgtcctcccacatcaaaaggtcgatcacagactttcctaagaggtggaggagggggctggcttggggttggggggcctgcaaacaggtttctcatccagatgtcccagagtgagctctcagcagcagctgctaagagctggggaacatgaggcactgtagttgtgccgggtggattcctttggttacattttgaccaaatctcagggcacgcagtgtccacgctgtgcactcctacactgattgtcctaagttttggtaaaacttgttctgacctagaggagtggtacatggtgagctgtgtggccttggaaaggagaccctcccagaaaggcagttttataggtgatagggtagtggggttgtcagtaatattatgaggaggatgaatgcagcaaacacttcctgcaacggagacccatcaggggttgtgcttccacttgagccatgttatgtcttaaattcacttcttggcctcagggaactttgcaaatgcctttggtttctctgtgggatgagggaacagctgctgtcctggttcttcagtttttcttcttgaactttctgaacagaatgtcttttgtattctggcaaacaatgagggggcattctgattaacttcggatcagcttgccaatgcaagcactggccatgtccccagttccggctccctaaaatgagtacatgtatacatcgtggttgtggcctgagggtccacaagggtgaactccatggccctggacctcagacggtccacttctgaagttattcctcttgctacatacactccagggatcctttgcttagttgaaacctacattttgctggagggatgtggcataacactgagccagtggccccttcagttggcagtgtaaatccagaacctcagccttcttttctacttgtgtgtgtagttggagctcttcaattttaccatccccacatctgtgaagagggctagcagagacccagtttcaggagctggtgctccttctgttggtatagcagaaagaataatggatttgggttgctagacttgagtcgacggctagattctgttcccatagggcggccacgggcaagtatcttaactaataggagcttcagattcttacctgtgagatggaggtaataagaacaacttcacaggactgttgggaggagccagtgggataacttccatgaaagtagtttgaaacaagtcacgtcctatctaacgaaccgtgttgtgaattgaagcttgaggaatgacccaactctctctggaaagtcactttgcctctctgttctggttctctcattttataaagtgccttcttcctttctgcatttataagtaaacatgagaaaaatctgaaaagacttcttcaggatgtttaaggaaacaaatgttgctttccttgggttgggtcgtttcataagagtgatgtttgccataaaactggagcctcatagacgatcctgcagggaggaagctttccttggtcccctgactcatgtgtttatatatagtatagaggagaggtattccaaaagacccgtcgcttttcctgtgtcccacagctgcctgtagagttgtggcaccataaactttagcagctggaaaagaggccaggcctggttccctcatcctgctgggtcctgctgggcacactctgcagtgggcaaaggggtctttctccttcattctgggtttagaaggcagggttctaactgggagaaagtgttattgctccgaaaggcttcttgggggctgggcaggtctttcaggaactcataaggccacagcttatggggaaagaaaaagaaacaaggaagtgggaattccaagggcagagattcttgatatgccatgggactgtgccaaggaatggaagagcaggggaagggagactccaggcaaggagagtcccaggtctgtcctcattgagtcgaaagggcgtatggcatactagagcgcgtcacccacagccccagctttactgtaggatagggaagacctgccagccatatcccggagtggtgtctgggaagaagcccttgagcagacccatagtaggcagattaaaaaaatgaaacaaaacaagcagctccccttctagttgagtcatgtcacaacagcctctaaggcctgaaggagaagctgcccacagcttagattggggctgcagctgttccccgactcccatcagtccggcttcccagagctgagtcacaaattggatctgtctatgttccttaaggattaaaaagtaacattcctgttctcactccctctttcctcctcctaccccgcttcctgtaccttctccccttgggctctctctctctcaaattagatatcagtcaccccgggaagatgaaactttgaaatacactggagaacaggccaaggacacccttggttctgctggttcagcctctttccctggaatgaagggcggggtgtacagattcaggagggcaatccaagtatcatggccccactggtagcctagacctaagagaggctgtgccccactccccaccgcatctgattctaagaactgcattacgggaggtccacctggcacctcagggagatgggaggctctgaggcctgggccttctgaagcacctccctgtggggcagttgggactgaaggattgaagaatacatcttccttcctgtcactcctcttagctgttaactgtcattgccctggaaacgtccccatttccatcgttgggcctaagagagtcggccgaggcagccaagcccggggaacacatagttgaggctggaggaggcctggcagcagcccttccgagccctggcttggccttccttctgtgcctctgcatgggcttgggaggagggtgtgtttagggcaggctgcgaggaggggaaggggaaatctgcaggcagataattgagttctttgagttggagggaccatggaaagtggagaaggggccaggagggcatagagcgaaaaaagaaaaagaaaaaaaaaaaaagaccatctggcatagtctgcagagatttgtctttaaagcctgtgggaaaacttgcattagtgtgtgccttctcctggggaggcaggggctggggaggctaggcatttgtttcatcctggaggggaggtgctatgtgtgtctgtctcagtaggtgggtcggaggaactactgggtgcatctgtcttagaggaatatgccacgtaatattgtgctgatagaaacacctgagctctctatttctagccataggccccagaaagctctcctgggtgtgtgtgtgtgtgtgtgtgtgtgtgtgtgtgtgtgtgtgtgtgtgtgtgtgttttgaagggagaggagggtgttaaatgagtctagattaccttattgaagaatttctccaaagaccccttctcttatttttttggctctgatgtcatgagtgtactgttgttggggagggtgttgaaactatcactgtactcttctcatctaaaactgcctgaatgttagatttcactgtccttataaaagagtgaattatatgcagttagcgtatgaagccttcttaaccaaagcagacctattcctacaggcttgtcacgaaaccaccacagtttctcaaagctccagactcttcctctgtgtgacctgtcatcaccaaaggggttgtgtgtgagctggagatggactgttggaaatcacatagtggatggaggattatttggaactgggaaaaaatgagagaaactgagggttacgggagacaagatctgaggcaggaggaagactactggaaggaagcaggagtgaggcactgggcaaggggccctgggcggaggcagttctcaggagcagcaggtggtaatcgagagaagggctgacctcggaggcctacacaatttagcagaaggccagactgcccccagggagctcagggtgacagtgtcgtgcaggccctcagaagcactggagggggtaggggtggctggcattagggttaacacctctgtttgtttgttcttggctcagaggtgtctctggtgcccatctatgcagtattggtctgttcacccatttagtcagtgaatacggagtgtctgggccaagagctggggaggaacgcagaagtatcaagtatgggccttactcccatctatgtcatgttataatagacgttgtgttgtagttatttcttcccctctctcccccactctgtctgtgtgattaagagagaagcagcatagacctgctgcagttctgagttttgatggtagggttaatgaccatctcatgctcttaggctgggaaaaaggaggagggtccaacagactgatttcaagcacgattcgaatgaaggaagagagccaactgaaggactggaagtaggagggtgaggattctaggcctgtgttgaagcttctcttgacagtgtcaaaggatggtgtatgtgggagggagtcataggaaaggggaaatgggaaagttggaaaaaaactatcaagtcagctatttttaaaactctagttttgttcgaggaactgacttttggtgtgcttgtgacttggaacacaggctaccttatggagttctgacaactgagtattgtagatggttttaaaatgaactagcctgtggtgtgtttgttcaactctcagtgactcttaggtactcagtgagtgcgtggtgctgccttagagcaattctgatggaaccatttgcatttaatatgagtatctgacatgcattgcagtgcactgcagtgatgaacagctatagctcaggggtcttagaggcctagctttagagcctgaccttgctgtgtgaccttgggcaggttatttaatctctctgtgcatcagccttctttgaggcatctgtagaatggatgtaatagtacttgacttgatagagttgtggtaaggattaaatgaaatgatacctgtaaataggccagtgcctggtacatagtaaatgtccaatgctttccagtatattattatcaacttacagcagcattttgaagagagtgggctggtgtctctcaaacaggttgatgttactacgctgggaacaaaccagattcttcttttagaagtagctgctggttgggcgcagtggctcacgtctgtaatcccagcgctttgggaggccgaggtgggtggatcacttgaggtcggtgtttgagaccagcctggccaatatggtaaaaccctgtctctactaaaaatacaaaaactggccgggcatagtggtgtgtatcagtaatcccagctactcgggaggctgaggtaggagaacagcttgaacctgggaggcggaggttgcagtgagctgagatcgcaccactgcactccagcctgggcgacagagcaagacttcgtctcaaaaaaaaaaaaaaaaaaaagaagtagctgctattttgcatctcgttcatctttctgtcaagaccccaggtagtctggtctggggtctgtgcagtcctgggtgtgtaataatacaagatttcctaataacacaggatttcctccccacctctcaaagctgcttgtgttcagttcctgccacttgacagacagctcatgtcttatggctgctgcatcaggcagaatgatcaaagaaagggcacagggagccatggacaaggtagggagagaaagacaattgctttggaaagtcaccagcagccaaggaggactgccctttcagacctggcctacacgttaggaaggtacttgagagtgtcctttaagaggaaggagtaggggccaatgagattttgaggacacggcagccgcccacactggagaggccagaagtcctgagtctgaggtagtccttgtcaacccagcttcacaggttcagctctttcctcctgctgtgggatgctcactcctcacagacggggagacccgtccatccagaactgcttctcgcctgcccctttcctgctggccagcctaggtggagcccctgaggtctttctcagtgtggtattggaggcccttcacaagctgctctcagtgctccagaccccggcctctgcctcagccctccttacccctgcttccacaaatactgcccttgtacccttccagatgcagcttagagcatagaataggctttgcagccagctctgagggtccatagtctggtttttcctctatctgtggacctctggtgagttcatctctgtaaacctctgttttcatctgtaagttgggagtgataatattacccacctcaaagggttattgtaaggtttcaatgtgttaatttatgtaaggcactcgacttagttgtagacacaaatatgctctcaataaatgttagctgctgctgttgttaataatccatccttcctgtgaatttctctgcctacatatagcggtagaaagtcccagccaggtagtcagcaggtctggatgttagttctggttctgtctctaatttgctgggtgatcttggggaagtaacttgacttctctagggttcagtctccccttccagaaagtagaaggcatggattcagtgttctcattgacatcctgacttgacattttttttgagacagagtctcgctcggtcgcccaggctggagtgcagtggcatgatcttggctcactgcagcctccacctcccgggttctagcgattctcctgcctcagcctccccagtagctgggattacagatgtgcgccaccacacctggctaatttttgtatttttagtagagacggggtttcaccatgttggccaggctggtggccaactcctgccctcaagtgatctgcttgccttggccttccaaagtgctgggagtacagatgtgagccaccacacctggccctgacttgacttttcaaatgtgtatatcttgtgttttcaactagattccttgaagttgtatgaaatcaagtataatattttatactttttatttccccaaatggctaacatatatagttggtgcttaaaaaatatttgagtaacttttctttaaccccatcaaccagattctaggaagcattttgacttggttctcagaactcggaggctggaagcttgttctccaatgcggagggcagtacaaggaggcctcagcctttaataagtaagaaggtaggtttctcttggtgccctgggaaaattttggttaacagatgtttggggtacttatttgtttggctctgtagccttagaccaggtctttgaataaatatttccatcactgtttccttttctcagtggcgaaaaatgccagtgttttctgagcaatcccctctcctttagagtttagggtgagccagttagtgcccagacgcaaatctgtgtcttaggggaagagccatccaataggagagtaatgtttagagcctgggctctggggtcagattggttcaaattctgcctctgccacctaatagctctgtaaccttggacaagttacttgtccgtgccctggttcctcttccgtaaaattgaggcagtggtagcattatctcatggggctgtaacaaagcctaaatgccaaatgtaaagtgcctagaatagtacttcctgcctccttgctgaacaaaatgtttgcagttattgttttgtttattattctcttgtaaaccaagtagtgtttagttccttttttttttttttccagacagagtctcactgtcgcccaggctggagtgcagtggcacgatctcggctcactgcaacttccatctcctgggttcaagtgattctcctgcctcagccttccaagtagctgggactacaggtgtgtaccaccacacccagctaatttttgtatttttagtatcgatggggtttcgccatattagccacgctggtcttgaactcctgatctcaggtgatacacctgcctaggcctcccaaagtgctgggattacaggtgtgagccactgcacccggccctttttttttttttttttttttccccaagagagggccttactgtgtcacacaggctagagtgcagtggtgcaatattggctcactgcaacttctgcctccctggctcaagcgatcctcccacctcagcctctggagtaacaaatgtgcaccacacctggctgatttttataattttttttatagagatggggtttcttcatgttgcccaggctggtctcgaactgagctcaagtgatccgcccacctcggctttccaaggtgttgggattacagacgtgagccactgcacccagcctcaggagtgtttgtttctttctttctttctttctttctttttttttttttttttgagacaaagtcttgccctgtcacctaggctggagtgcaatggcacgatcttggctcactgcaacctctaccttccggattcaagtaattctcctgtctcagcctaccgagtagctgagattataggtgcatgctgccatgcccagctaattttttgtattttagtagagacggggtttcaccatgttactcaggctggtctcgaactcctgagctcaggcattccatctgcctcggcctcccaaagtgctaggattataggcgtgagccaccacgccaggcagctgtgtttatttctttgtggcttgtctgttgggtttgttctgctgagaaatgcaaggccctatccccttcttctgtgtcttgggcagacggtatcagcagagcagtgataagcgtcccccagtcagcatatagatcggagctcctgtaccttgcttttgtaaagaaattataaaccagaaggggagtctggctgaatcaaaagagcctctaggctgagcgggcccctctctgaggagtaatatgtgttgtatgaacaacagggatagggacatggcagacccagtgtcaaagagcagaatgggaattgggaaggctgatgggagggtgagggagatagacggctctagatagtgaagtggcaaatgtctctgggcatttgtggctaaggcagtaagaggcatcaaggtaagttcctggtacttcatcttcccaagagatagcctgatcccagccccaggtgagacttgccccagcagtctcactcctctttcagaggagtggtggattgggatgaggaggttctaatctgtttctaaagagaatgaatagctccttatctacaagtgtaaattataaagagattttcttttgcaacttcagggaacaggaacttttgctgccaaatttagcaatgtgttttaagtccctcaaatcttctttgagtgctaccaaagctctgagctttgttgttatctcttgttgaaatacagcctggaaaggtcatatcaacagtgccaatttatgggcctgctgagcccagacaggcctagggcagaatagggagttcctaagagtagaggcttcacaaattttctctttgagtgagggtgtttacaatgtaaggttatttttgctttagaagaccaaactctagatgatggtcaaacatcctgttcttcagctttttcacttctgcaggcttccacaggcaggggctcagattcgacagtagctccttgtagaaccaggagaagcttagcctcgatggtgcatagagctcccaaaactgtgccccgtactccttagtggaggtaagtttccttgcagagttatgctggaatctccctcccatttagtttattagcaatttgtgacctaatatgtgttctgatggagtaattaaaagatggtaaaggccggacacaatgcaatggctcacacttataatcctaacactttgggaggccagggcaggaggattgcttgaggccaggagtttgaaaccagcctgggcaacataatgagacccccatctctacaaaataaatgaaattaaccaagcatggtaacacatgcctgtagtcccagctacttgggaggctgaggtggaatgattgcttgagccctggagttcagggttatagtgagctatgattgtgccactgcactctagcctgggtgacagagcaagatcctgtctctaaaataataataacaataataataataataaatacatggtgaagactgaggactgtagacactacacgtggaactttgtactcatttgcaaagaccttaggacaaaaaggtctgacttgtgtgtatatactttgccacttagcaaaaaggaatgccagtagggaaaggaaattaaggaacttgaatgaccccagcaactataaaggagtgtgctctggttttgggcacctgtagtcccatctgcttaggaagctgaggcaggaggactgcttgagcccatgagtttgaggctgtcctgcgcaatgatcacacctgtgaatacacactgcactccagcctgagcaacatagcaagacactgtctcttaaaaaaaaaaaaaaaaaaaaaagagaaaaaggaggatggtacatgagtgtgagaagaaaatagctaggacatgtgagacaagcttggcaatggcagtgaccttggtttgcagtctgtggcttggactctggctggtatgttctgagaattgaggcttttgaatctagaaaggaaagaaaatactgaagtttcttatgttctctgcctctctccaacctcctgattgacttatccctttgggttgaaacataaatggaacaggtagcactgtcctttccgagtccctgcctctctgcatttgagtcatcactgatgctcagggtttgctcttggcttggctgtgctgggagagccagttgtgaagatattggaggtaagaagggctattggttttgtcaactgaactctaataagtacccagggggaagtggcagggatccaggttaaaaagaaagcaaccagggcagggtgcaatggctcaggcctgtaatcccagcactttaggaggctgaagtgggtggattacttgaggtcaggagttcaagaccagcctggccaacatggtgaaaccttgtctctaaatacaaaattagccgggtgtggtggccggtgcctgtaatcccagctacttgggaggctgagacaggagaattacttgaacctgggaggcggagtttgcagtgagctgagattgtgctgtttcactccagcctgggcaacaagagtgaaactccgtctaaaaaaaaaaaaaaaaaagcaaccggaaattgttgttttatttaaatctcattaagtggaaatagaaaagcctttttattttctttcctaccccctccagttgcaggacccacaactgtttggtaaacccaggtgggttttttttccctccatttagatgtaggtgcctattctgcttatgtgcccagatgggttttcaaagcagtgatatccagacttcttttcatctgaaaaacaccgaaggccagatgtctacatggccttgcaggaagaagctgagcttcttctggaaagctgtagaaacaaaaaaaggcggtggagactgcaacacctgtgccatcctcctgggtccctgatagcccttaatgttttgtcattgggggggttgggatggcttttattttttggtgttccccaaaagttaatcctcagtctgttctctttttaatttacaatctttccctgggattccatcttctactgtcaccagttagagaaagcgaaggagtgagggggaatctaactctgcctctcttgcttcggaaactgaatgtatttattcatccaataaatatttatggagcattccttctgttctaggttttgttctgtatgccgaggaggtagagataactaagacattgaagtccttgttgtcatggagcttgacgtgtagtgagtggggaagcatttcagtaaacaagtaaacaaatcaatagatgagatcaagatagtgctgtgagctcggaaggatataatggtgatgtaaaagagagagtaacagggacctgagaggttagagaaggcctctgagaatgacgtttgaactgtgagctcaaggatgagaagaagccgttaatgtgcagatttggggaaagttcctttctggaaaagggaacagctgtcaaagctcctgaggtaggaaagagcttgacatgcagaaaggacacctaggaagtcatcattgttagaatgtagggagcaagggggtgtcggggtggaggatggtggcacaacttgggataaagtatggaaatttgagagggagagagaggaacattgaatctgatggagaagaatcaggaaaaagagtagggtgctgggcatggtggctcatgcctgtaacccccacactttgggaggctgaagcgggaggatcgctggaacccaagagtttgaagcttcagtgagctatgatcatggcactccagcctgggcaacagagcaagactctttctcagagaaaagaatagaagagaagagacagagcaagactctgtctcagagaagagaagagaagaggaaagggggaaagggggaagggggaagagggaagtgggaagaagggggaagaaagaagagggaagaaggggaagaaaggggaagaaggaggaagaagggggaagaagggggaaggggataagaatatgaggaaacagaagggatctgaagtgggcatagacatacctgcttagctaaggaagtcgaattaatatagtctgcatacttcttgggatcaagcactatgtatttttaaattttctgcagattttaggttagcggtaagacattagtgtaatgtttactctgttctaagcattgtgttatactaggcatttttatttcattgttttagtaaatccttacaatgatctgtgagttaatttgttgatgttgtaacatctgcagggatgtggagtagctaacttgcttaaaatctaaatctaaggctgtttgattccaagcatgtgttcttgccacacttccactctggttggtatatcaaatgcagctcttctttggttatctagaacatctaatgagttttttcctttgtatcactatgtgttatttatggtcacattttgaatgtttgcagaattgaatgagttttttttagctttctctgaaaggggtacctggttaaatactgagaatgcgagtccatataaacaactggggagggtggggctgtggcaagacttggaagcagttaacctgacttacatctctccctctgggcaggaaaaaaatggcctttctccttaacgctccataagtagttagatgtcttagattgcaattccccctattgtataagaagatggaatttacttttggaaaaagtaagtaatttgtcagtaaactagtgtttgtaaataaaccctgatttcctagcgtacagatctcttctagagtcttcaagtttgttggaaatgtttgagaaaagaaatgtatcaggccacaaatttcacttcttggaaattgaacattgactagtttctatgggttgatacttctttttctttttcgagatggattctctgtcacccaagctggagtgcagtggcatggtcttggctcactgcaaccattgcctgcctggttaaagccattctcctgcctcagcctcccatgtagctgggattacaggcacacgccaccatgcttggctaatttttgtatttttgtagagagggtttcaccatgttggccaggctggtcttgaactcctgacctcaggtgatctgcccaccttggcctcccaaagtgctgggattacaggcgtgagccactgtgtccggtccatacttctttttttttaaaggtttgatcctgtttggattctatcagtagtgaaggcccgggattctgaaatgaaaatgtatgcagtgtttataaactctcattccttggtgttcatgagatctgtggtcagcccaatcagcctgcttagatggaatagtttgtgaagggcagagcagggtgagactgaatttcagatttagcatagattgctagaaaacagaggagtttctttggtaagtcactggattttgctttcctgtctccccttcccagtctgtttcagtaacagacttgcttctgaaggaaagataatgtagttgggaaaggttcctttacagggtgttgttcagatggtcttcatcactgattcacaatgagcagacattgaatggtcatctgccatgagcagggacacacagatgggttggaagatgaggctggaaagactggctgaggtcagatctttaagggattgaaccatccagaaagcggggaatcactttccccaggaagcaggaaggaaacacatttgaatatgatttgtagaaaagaaacctaggagaccatgtagaagatggaaatggagtgggaggaaacttgcctattttattggctgtaactggaggatgatattccagtccctcaaaattcatttagagcagaaagtaagggaagtctcagggtgggcgggatcagaactccagattgcagagctttctagagcccgtagagcagtggttttcagacttgactgtgcaccaaactcacctggagagcttgttaaccaatttagtagaaattttttagtaaaaatttgcatttttaacaagtttggaagtgatgctgctactgttggctgggaaccccactttgagaaccactgcttaagaggcttggcagctgagatgccaataagggtatgagggccagatgttaattggcttgctttcttttactgacccagaatttcatgtctacaaagctttactttagatgttcttaggtggcttactctaaaacatcaacaaagcctggtaaaggtccatgctctcaatgactcttctcaccaaatccgtatcacttctggatgagatttccaggtatgtgctcgtctttaaacagatgcttgtctgatttttggaaaatgcccatcctgggcacttgatttcattaggattggtggcatttctgccaggaaaagcttccccccgccagtcagcactactactggctggcagggctgtttcagggacagccagcaggggctgcacagaatgtgttctgttgattagccaaatttacacaggacatgcctgggagattatctctttaggccaggagttgaatttcaagggcaaagtccacagttggcagccgaaaggctgagaacacctggaagaggggaaggatttcacttgactttcacttccccaggcctcagtgcctcttcccacagaggctgggttttctccttgttgctgcctgagcaggtgaccttgggatggttcccacagagcagtgtggctccaggcactgccctttgctgtctacttcagcacctgtggcttcaggtgagacacttgcattagtcaatgtcagctgccctgtcctccttggcatcatcatttcttgaattcttttctgggcttgcttctttctttgcggggaaggccttcattttccttcatagtccatgactcgcaggttttccccgagctctccttttcttaccttccttcattagttcagtacaactgtagaattctgtttcaatgtaggaagggagacggctacccatacatagcctgagacaacccacctggggctcctgtagcctcagtgctgtccccggggtggaaggaccacgtgggtgggtccacacagctgtcgtctattttgcggatgctcactgggaacttggattcagtcctaggtgcctgggagttgagaggtgagaatacagagtgctcagggtggcagagtggggactgggactcaggtcttctcacctctgcccatttagggccttgctgtgtatgtaacactgaaactgtgtttcacattagcaggcaggcatcaaaccgtctatctggctaacttttgtttaagacattttttaaaataacaaaagcaacaccaggtgttctaaaaacttttgcaaaatggggaatacgtaaggcagaatatgagcatcttctataaaccgatgccccagaaaaatagttattgttaacagttgggtagcactgggttttttatttatttatattttttatttatatatttaaactaacatccttgagccataaagattctttaaatgatgcatttttatgtacatttagttttacgcgaaaagtttatgctcttaatttaaaaaaatggaaagtaagaagtgttggtgagaatgtagagaagttagaatcctcatacattgttagtgggagtgttagcggtgcagctgctgtgggaaagtttgattattccccaaaaagccccaaattgccatatgacccagcaattccactcctaggtatatgcccaaaataattgaaaacaaggactcagattcttgcatgccagtgttcattgcagcattattcacagcagcgagaaggtggaaacaacccaaatgttcactgactgacgaataaacaaaatgtacaaacaatgtgcaaagaaaatgtatgaacacagtaatacagactgtggactattcttcagctgtgaaaggaaggaagttctgatgcatactacaatgtagataaaccttgaaaatgctgccctaactgaaataagccgtatataaaagcacaaatattttgtgattctgcttatataaaatatctagaaaaggcaaattcatagagacaggaaaatagattagaggtaaaccaggagcttggggagaggggagaatggggagttattgcttaatcattgcggagttactgtttggagaagtttgggaaatagtggtaatggttgcacaacattgtgaacatagttaatgccactgaattgtacacttttaaatggggaattttatatactttactgcaattaaaaaatggaaagaaaagattatactgtactgaaaaacatatcacttgtaatttacctaggatatttttctacctcagtatgtgcttttaaggagcagcattgcatttcttcagagggatgtatcataatttatttaaccaagccccttttgacggacaattgaattgtttctcagttgttcctgttatatgcagtactgtaatgaacagcagtatccagctgtctttgcccatgtgtcctagtacttgtattttatttccttaggcagaattcctagaaggaaagatttgctgatcaaagggtgtgctcattataaatgttaaattgccaaactgccttccaaagaggttgcatcagtgtacttctcatcagcagggtatggaggtgcctctttccactgcgccctggcccaacacaggtgttatacatttttttactcttcgccaatctgataggtgaaaaaggatttcttattgttactttatttaggatgtcttcagttattaatgaaattagcatctttttatctttctggtagttgattttattcctttgtaaattttctgctcaaatacattgttaatttttctctttggtcactattttatcttgtagacttgtgagagcttttacatacatacggcattaggactctttgccatatgtgttgctgataatttttcccccaataaaaattttttttgactttgtttatgctaattatttgcctttcacatgttttacatttttatttaggcaaatattttccttcaaggtgcttctcctcatctcgcttctcggctgtggagttgaattttctgtcatacttggaaaaatcttcttcacttgtcagaatcacaaaaaaaaatttattcatgttttcttttagtgttttcttggttccagtttttacatttaaactgtaattaattttgctgtaaggagagaagtagtaactaaattttctttatttgtgtgtgtgtgtgtgagatagcgtctcactctgttgcccaggctggagtgcaatggtacgatctcagcttactgcaacctctgcctcccggattcaagcaattctccgcctcagcctcccaagtagctgggattacaggcacccaccatcatgcccagctaatttttgtatttttgtagagacggggtttcaccatgtttgccaggctggtcttgaactcctgacctcaggtgattcacgcgccttggcctcccaaagtgctgggattacaggcatgagccaccatgcccagcaggaattacattttgttgataagaaaacctaagataacctttttttctattaaattttttctttactaaaaatttgtgaacttcttttcacttaaggatgtaccataacaattaaaaacattttctgtgacattaaagaaatattccttttttttttgagatagggtcttgctctgtagcccaggctggagtgcagtggcatgatctcagctcatgcaacctcctcctcccaggttcaaatgattctcatgcctcagcctcccaagtaggtgggactacaggcacatgccaccatacccggctaattttttgtatttttagtagagatggggtttcactagttgcccaggctggtcttgaactcctgaccttgagcgatccgcctgcctcggcctcccaaattgctgggattacaaggtgtgagccactgtgcctggcttaaaagaatatttctgattaagtttacaaaaaaaaagcctttagtgagagaggcagattaaaaatttcacccaagtcttctgattcctaatcctgttttttgtttgttttctcttatcctatatacgatacaaccagatttcttttgttaatgtttggggatagttgcatgaatcccctttgcaaaactttccagtgcttcctatgtgcaattgtattgacatgctggacctagatcttgtgacgtagaagcttctcccttaaaaattttacctgctttgatgagctcaccctggctgaggtggcagcaggtgggcagctggtactgaggagaggcagtaggccaaagtctaagcaggtattaagacccagaaagggtgtggcttttggagaagagcagcttgaaaggtgtgaggaaatggagctgctttgggaacagattcaggaaggtttttgaagtgagagaaggaaaagaaataatgtttatttagtacctacttatgtcccagacactaagctagtcaggtcccacctaactgtattttaaaaggcagcttttagtgctggatcaacctggggttgtttttccaagggttgtgaacttgcgaactcagaaaagaaaagttagagtttaggagaccgagaaaagcaggatttagcgagcatcatttctgctccatcagccaggggcttaaacagaatttttctttgagactgctctctttctttgctctgttgcacgggctggagtgcagtgatgctatcacacctcactgcagcctctacctcctggactcaagtgatcctcccactgcagcctctggagaagctgagatcatgggcacgaaccaccatgcttggctaatttttaaaaattttgtagagatggggccttgccgtgttgccgaggttggtctcgaactcttgggctcaagtgatcctcttacctcagcctcccaaagtgctgggattacaggtgtgagccactgtacctggcccagaaatgtttttagtagaaataggctaagtaaggaagcaggagaaaccacttccaatcagcatacattcgttaggcccctgcaggaccagcgcacagacatatagcacttaccttcttggaacttaatagtttaatggacaagacatatgaaaagccagtatactgcattgcagtttatgccaccctagatgtttcactgggaggaaaggattaattgagttactggtgggaggagagtggggaaaaggagggcatggtttcacagaggaaatggtgctggtacagattttgaaggaggcatagttcctttataaggagacagggcagggaggggcattccaggtagaaggatttgcatgcacaaagacaggagtgaagctgtaagtgtagagtgtgcagggaagtcccagttggtcgtgtttgttgtccttggcagggtagattgaggagtgtcaagataagactccagagacaggtctcagggctggctcttgaaaggctggatttaccagtgtcctgcctaccagaccaccccaaaacatagtggcttaaaaccacaatacttgcctggttctggggttgttgctcggggtcttcttggatagttttagttagatggtgggggcctcagcctcctgagtagctgggactacaggcatgtgccaccacactctgctaaatctgctatttttttatttttttattttttgtagagatggggctcttgttgtgttgcccaggctgggagttcagttttagacacttcttatttcttaacatgaattcacttttcacattatggatttgtctgattgtttctttggggtattgttcaggttcttcctctctgccctgtgtattctataaactgtaacttagatctagagacctgattagatttaggttaagcattttagggagaaaacaaccctttatgaatgatgcagcagatcagaggcacatgatgtttggctggcccattattattgatgctaagtttgattactggttaaggtaggatcagctaaatttctccatcgtgaaattatagttttcattttgtgactagcaggtaatctgtgtgtgacctttggcattgttccccattaatcttgcacgtaagttgttttattgttaaactttttgttatggaaaataccaagcataaccaaagtagagagaatagatgactactgctgtgtccaccatccagcttcaaccattatctgtaactattaactaataactatgactattaacacatgaactagcttgttttatttctattcttgtccagtactcttccttttttaccactgaattttgtgaagcaaactccaggcatcataccatttcctccataaatgcttcagaatgtatctccaaaaggcctttcagaagtgtattggatgtgtggtatctgactagcaatttttaggtgtgcttacaaaggaatggagaataccatagttagagctttttaggtaggtacagtggaaagagaaaggagctgtggatttgagatggatccatttgtgatgaatcatggatttcagcctggattggcagaaggaaaggccaagaggtggctgatatactctaggaaaaaggcctaagggaacagaggcctggccaagttcagagagcagctgtcaggtagtgaatggtcaaaagatagacaggaagggaaattgtggtcagacagtagagggcaaggttttgagatgggtacgccaggttcagggtttgtgcaaaagtgtgggtgactcaagtggaagtggaattgatgtcagggaatcagttgtgagctaagagttttgagtggatccatccacatagctattgaagttgccagggtggagagagcgccctcagggagagcctggtgtgtgtgagggcaggagatggtgcacaattctgtgaagagtttgaagatgtggggtagttgctttactgcagagctggggcactgtggaatcggttgaaagcttagccagtggtggaagaagacaaggtgagaaaagtgcaagacaaccattctaaacagttttaaatgtattgtgctctgttggacattgctgcccactggttggagtggaggaaattaatgaggtagggggttaatactgaagaggaaaagaattgtgatacataggtggggttgaagcaggagcccttgagaggaaatgcagtgagcccctcttcctgttttatccctgagggatccctttgcatagtaaccccaatgcttttctggttggggtttgttttggtaggtagtctttgtgaagatctgtgttgcattctttacacttcacttacagggtttggatgggttgagtagagaaggggtggccgtccctgagtgaagcagtggtccagagaacccaccccagcattttcttgctgctggcgaccacttccctcttaaacatctagaaagcccttgatgcccaggactaaaggtagagtgaccccttttctgagcacatcatattccaaactttgtctctaaactaccagggaaggcatgcatgtctcctaggtaatagccatcaaacttagaggaaagaagcacattgtaggtgtcagagttttggagagctttgatttcaaaaagtcgtggatttgtagatgagctagaaattaaaacttgaaataattcttcttctcaaagatagtgtctcttgaaataattctttgagaatgatcatcactgaaggagatgagattaaaagggagttgagagaaaagaaggcctacctggccaaatgccagcatctcctggattctgaagcaaacaggagtctgtgcccatggacgttagacgtgggatgatttctcactatcttgccagacacctgtgtttaagggagtgactgacccacacacttgcttacgtgtttttatgagttttagtgttgagagaaaagttctcctcttaggctatgtttagagttcacttcctgctgagtttactggtgtgtgtgcagcagaaatgccagttctggcctggcatgatggcatgtgcctgtagtcccagctactcagcaggctgaggcgggaggatcgcttggcccaggagttcaagtccagcctaggctgggaaacgtgtccctgtctcttaaaaaaaaaatgaaaaagaaaactgtcagctctgctttatgcatcttctccttgaggatgatgatacttacttacatataaatcttgccttatagcatagagcatattttcatatacattgtttcttcagatttatatcctgtcctctcagaggagaaaattgatgtgtctggctgcagttgacataaaaacaccctactgtactttccatggcatagtggaaggaatgcgaattttgaaatcagtcctggtttgaattgtggctcctccttttactagctgtatgacttgggccttggttttcctgtttggtaaaatagaattggtaacatttacctcataggattgtgttacagtattaaatgaattaacataattaacacctgggaacaatgcttggcacacagtagataactggtaaagagaggccatagtcatgttaataacatagaaacagaaataacatcagcaccgaagaaaaggagagcatgcagctgttctaatcttgtttttttttgttgtttgtttgtttgttttctttgagacattgtcttggtctgtcgcccaggctggagtgcagtggcgcagtcaagatcactgcagccttgaagcctcgacctcctgggctcaagtgatccttccgcctcagcctcctgagtagctaggactccagaggtgcaccaccatgcccagctaatttttaaactttttgtagagatgggttcttgccatgttgcccagcctgatgtcaaagtcctggtttcaagagacctcccgccttggcctcccaaagtgctgggattacaggcatgagccaccatgcctggccttcctaatcctgttcattaacgtgattgctgtgaatggccttctccttggcagtcaacataccactttctcaaaggacaaagttatttaaatgagtttcatgttttaatgaaatttatatggatatgtaaggcaatattgaatgatataatagtaatttttactttttttaaaccaagaagtatgttttatttatttatttttttcttgtttttaccactacagcgacagtttccttgctatttttataaccagtgcttatgcagtcttggttttctatagctctcacagagactgcagacaaaatgcagatgttttacatgaaattgcaacttagtgaaaaccactctgtgaggagctgagctaatgacatctgtgtagctttcaggtgatctgctagaaaatggagcctaaaatatgcaggggcatggatttatatcataccccttagacagtcttccttaaatatcacttctttcagatggaattttgtgaagagttggacagtaattcaagaccccgagttctataatagcttctatattctgtatttccaactaaaggcagacccatagactttggaaaacaggtaaaaggattgacttcctaccagctagaaattggagccaagttagagccatgtaacttgtattcttgcttctattagaacattattttgtttaatccttatactagcctgggagggaagggggctgacctaacagttaattctttcttaagtatcaggtattggcctttccttccatgtacaaatgggaggctggctcagtgctgagggaccaggtgaaggagtgcattcctcccttctcttctctgtcatctcttgggtcacacatgctaggcaggagttgccctttgccttatctgtgcgactgctcatgatctggaaatgactgccatcactcctagataacaccagccctgggcttttgcggaatgaagcccacattacaaatcatgggattatagtgaccagggagaggtcctacttgggagggagtgattcttcctgaaggtgaaaaacagcagggcagggaggcgactaccttcatgaagtgctccttggtctgtatcctccttttcggttagaggcaggaagagtgaggggaatttcagccacagaagagtttgcgtgtgtgtcattttatcctctggtgacttttcctcttcgcagcagtgatcccagaaaacaggaaaaactgctatgatcacaatcagtttttaatgtaaagaaaagctgatgatggtttttcattgacacggcaaattcaggatttggggcctggggatgaagctgacggtctgtgaaagtgcaggcagccagctccttggatgaggtccaagtcaaaaagcctaggggtaaaagtaaaaggatggcttaatttcaatggacacccgtggcatcttagatgttgtaccttcctgtggcttcttagcaactactctaccatgtggcggctgtgttagagggggtactacatccagaaagaagacacgtgccagtagaacttccatgctgcatcataggtggccacagagccattacttccctgtttagtttcaagttgtagatgtttcgtatttgcctaaacacaagatcggcttatgattacccgctggcttaccagcccactttttttctcactctgtttcttttctttttttttttttgagaaggagtcttactttgtcacccaggctgaagtgcagtggcacaatctcggctcactgcagcctccacctcccaggttcaagccattctcctgcctcagtctcccaagtagctgggattacaggcgtgcgccaccacgcccagctaatttttgtatttttagtagaaacagggtttcaccatgttggccaggctggtctcgaactcctgacctcaggtgacccacccgcctcggcctccgtaagtgctgggattacaggcatgagccactgcacctacccatctgtttcttcagcttctcattatctcaccaattctagagaaacagagttgctggttgtgtaggctaaactaaggccactgtgatgtcattgcttttgtctcctttgacaccctttttttttttttttgatactgggtcttgttctattgccaaggctggagtacagtggcacagtcaccactcactgcagcctcgacctcttgggctcaagtgatcctcctacctcagactcccaaatagcagggaccacaggcatgcacctccctgtccatgcctggctaatgttttttttttttttttcggtagagatggggtctccctgtgttgtccaggctattggttaccttctttatcatagttcaatcctgagggtgtttccttggccttctgaatgtgtatgagggatgggatctgaaaagtctcctcctctggggctgatcttatgacagactttatgaagttctacccaagaatctttccttcgctcacacacttcgctcaccaaaggagctggtcctgtggcaggttcagaatctgtgaagtgaaaaacgtattaaaattttgtatggaatttgagaactgtgtagttctgtctgtactctctgctcttcagtcacaaacagctctcccagctgtcctcctcactcttgccttctttgttcttgttgctgaaaatgcccaacctggatgaaaacctctaagccttgctcttcctcctggctcttcgtttcggtagagcttttgttatacttctgtctatgatatctccctctttttctgcttaccttttccgttatttcaagtaaaactcatctgctattaccagattgtccttattctctttttgcgtgaaattaactagctttattgatttttctaataaaagaaatacatgctcattgaggaatatttggacaataacaaaaaatattaggaagaaagtaaaagtcacataatcccctatagcataattattgttaatttgtggtgtatcttgtcctttgggatcttcttcatatgtgttaacatatattgctttttcccccaaagtgccatcatttttcacttatattttgtaacctacttttctgactaatattacttggatatattccacagacagtacatacagagctactctataatgtttaatgctgcatagaattacattgtatggatgaattgttatttagttaacctgacgatggacttttgggttgtttctgttattaatagctatgtgggccaaagcaggaggattgcttgaggctaagagtttgagaccagcctgggcaacgtagtgagatgctatttctagaaaaaagtaaaaaattagctggtgtggtgctacatgcctgtagtcccagcttttcaagaggctaaggtgggaggatcacttgaacccaggagttggaggctatgttgagctgtgattgtgccactgcactccaatctgggcaatagagcgagaccccatctctttgggaaaaaaaaaaaaaaaaaaaaggtaagtggtggcaaatatctacatatctgtatagctgtgcctacttgtataacttcaggatagttattgctagaagtttctaaaaatggaattactggttcgaaagctatgtaatatacttaaattatttaacaatatcttttttttttttttttgagacagagtctcacactgttgcccaggctggagtgcagtggcgtgatctcggctcactgcaagctctgcttcctgggttcatgccattctcctgcctcagcctcccgagtagctgggactacaggcacccacccccacgcccgcctaatttttttgtatttttagtagacatggggtttcaccgtgttagccaggatgatcttgatctcctgacctcgtgatctgcctgccttggcctcccaaagtgctgggattacaggcgtgagccactgcgcccggccaacaatatcttttaaaacttggaaaagtatatggaaaagtaaaaggttaatataataaaaatctatgtacccatcatccaaatttcataaatgtaacactgtaccatattggcttcagatctgttaacataaattttttttaagtttgacaaatatgtactcatgcttggaggctcaggaaaaaaaattggacaaatatgactaaagctttctgcagtcctttcctcctcctgatactgataaaagcctcattactgtgcatatcttatccttttacatacatgtgtccataaataatgtatagtattgtgttttaaaatgttatacacatgatactattcttgcaggcaaaccttttgcaggttgattttttttcattcaaagtcatttctaaaaagttttcatgtgtaaaatcatttggtttaattggtgtataatgcaccattatatggcagtgagaaatggttaaagtctaatttttgtgtattacagacactattgtaatgactgtgcaagagtttgtgtacgccagctacctaggaatggaagtgatgtggtggggagtatgattctttagctttactaggtaattccagattgttctctatagtagttgttatgtgtttaccaccaatgtatataagtgttcatttccccttatttttgctaacacttggagatcccatgcttctcagtattttccagtctaagtatgatataatatctcatcactttaatttgcattttcccaatttatcaaagagattgagcaatattttattttctttgaattctctgttcatatcttttacttatttttcagttgggttttcgtctttttcctttagaagttcttaatatgttctgatttttaatcacttgtcagttatgtgctctgtaattattttcttcctgtctgtggcttatcttttaactttgtataggttatccttgtgaggttatgtgtgtgtgtgtgtgtgtgtgtgtgtattcctaaattgttttccagaaaaattatactggtttacagaacatccaacagtatatgagagtgcccagcttgccacaccctgcctgactctgggaatagttttatcatcttgcccagtgtaatagacaaaaagtggtattgccccttctttggtggcttttcctagaacattcctacctctttgttatagccaaaagctggcttttccctgaagatcttactttccttgtgaccctctccaatgaagccacctcacctcctcccaactctcgctctgaactccccacgttgcttccaagcccgggctggcaacctttcccatgagaagttagtccctcctctgctcactcttggtgcccttacctgcctattgacttcaggctaactgttaacaaccttcttcatatgtcctctttttggcataattaggatttgaggattcatactgagaatccatcaatgctccggcctcacagtccctccatccttccaactctaaggacttcgtcttcattcctcttcgggtacctttggctttatcacttggagcagtttcacttttaggatgctgaactcggagattcccttcccttccctggtctcctgtctgtttccacctcccactccttcgctgtcccctcccaagagctggctctccagctcttctctgcctgtgtagcctcttagccaccctggccactgcctactgatttttctgttcagcctgagcttcaaaggcagaaattctcatcctgcacttgctgcttacctcagttctctctctcccttgtccctcctgtgatcattagccctcgtggaccacttgaacagatttttctgccgtagcccctagacctctgagtattgcttcatctttcagaagcataatctctgacccatcattcttttctcagaaaacttctgtgattccccagagaaaaactaagatccctgatttggctctcagaggcctctaagagccgacatgtctctgtctttccaactctctttctccctggtctactttcaattaaactcccatcagactgacaaacactttgttgtccttcatacgtcttctgctttcctgcttccaagcccttgtgcatgtagttctatctgtgtaggaatacccctgtattcttttgccatttgatcttccaggcctagcacaagggtcaccctctctgtaaagtgttcttgatcctttatttggaagtaatctccttctacctaagcttcaacattgtatctctctaatggcatctctctagtggcacttaatttcatctttctaatggcacttaaaatagtcttcctggtatttatgagatttatatgtctattgtattcaccctacagagtggaagctccttgaggatggacccatacctgatgcatttggtgtccaaacagcactaaacatattggcttatgcatggttggtgtttggtgtatattagctgaatggatgcatgactgtaagtatgaatggaaggaggaaagatggttgtcctggcttccaggaaccatagttacaatttcatactgccccccttctcctgctctagcgagaaaagaatcagactcacagcttgacccaggccaacacaggaatagttcaagctcctggcccacactgcacctgggggagcctgaagcttgtcctaccgtgggagcaggagccttgagtaccaggaatttcaatgggatgtttttgagtttaggaagttaggctggctgcattccatgacatgcaagggagaggattttggagtagcacagaaaatggaaaccttggccgggcgtggtggctcacgcctgtaatccgagcacttcgggaggctgaggcggggcggatcacctgaggtcaggagttcgagaccagcctgaccaacatggagaaaccctgtctctactgaaaatacaaaatattagccggtgtggtggtgcatgcttataatcccagctactcaggaggctgaggcaagaaaatcacttgaacccgggaggtaagaggttgtggtgagccgagattccaccattgtactgcagcctgggcaacaagaatgaaacttcgtctcaaaaaaaaaaaaaaagaaagaaagaaagaaagaaaagaaagaaaaaggaaaccccgagcatgcttttggcagaggtaggtgcagagaggctggagagcatggtaacccagaggggagggttctgtttttaccaagtcacaccactttccttcctccatacctgctagggctgagcctcagttgaatgtgagaaaaacactatgggtgtgatatttgccactctctctgccttgggaccttgagtcatagtctcattcttcatctcaaacagtcttctgtctcattctgtccagctactgtttgtcctttacagtctggctcacatttcctctcccacagaagccccgtccagagctgctctgtcccctccaccactccattgtcctgtctttctagtttgtgtcccacacttgcatcgtttgctgttgtgtctcagtgccctacattcgtctgtgagctccccacatgtaagaatcacatctcatgttttgttctctcagctaaaacaaagtggtgatcaataattactgtcaatgttattagggagcctgctattggaacttggaagattatcagtagcagaaaaactgaagtgggaatggaaagacgtgaaagtagaacttagcctgggctagttctccagagtcttgagtctggggaggaactgccctttcatctttaccatgggtttcttgaattctggcttctgaagctctgcctttcgacagtaatcagcatttaggcaggtgacagaatcaggtgttcagggtgtgccctccagggaagaagagagagaggtgatggccggcaccccatgcagcagtgactaatgtgggccaaactggcaccatgcctcccagcccccgggtacgtgggagctgtaggcacacatggtagattggagctggagggatcatttaccagcccttccctgagctggaagcaggcggggagcagcaagccaattggcagacttgccttttctgccttaaagtactttgtttctgttgctaacaacagacatgggtagtataaataaaacacagacacacaggcacatagacacatgtggagactgaatatttgagctgtcaggggcagggggagggtggatgtggacggggactgaaatgtgtggctaagcctctcaagatagtgtgcactaggtcttctcttcagccttggagatgggtgtagtgtaaggggtggctgtgtggaaggccccctgaaagcagtcaagtaggaagtgatactgtctggatgccacaggcttcaaagactaggtgctcgttatggctggatgcagtcctcattaggcagactctttcgagctagttgctggtgatccaagggccaatggtaacttctttccttctgttctgccctttcaaggcttgactcattgatccccgttagtgctcacatgtggtataatggtcagcagctgctgtggcctttctggctgacctgagctgtacaagccagcatgcctaaatatgtgactgttgttttgggtaagctcctgaaggatgtgagcttccttagtagagactgagacccattcagcctctctggaaaagatggtcttagtaggaggctgaatagttcatgctataaaaagcaacagctaagtcacatgtgagataagcttattcagagacttgaggttcaggtagattacagggaggatggatgatgaggaagactgtgagtctccactgctggaaatataagtagggatgggttaggtgttctctcttttttttccctgggttgaacattatattccctggtatctaagattacatcaagagagcctcttctggttctgggaaaaagaataactgtattgataggaattttagagcactcccaatgtgtgtagctttgagcacttgattcacagatatctctgacacttgggatgatcatctgatggtgtgggcatttggagtagctcttagctggtctctcttttccatcttactgctttcttggaccatatgtgacaggcctaaggaatgtccaacaggaggtacctttggtccatatgaataccaagtcagtaatagttccaatcttctagaagcagtgagacgccactccagtctgagggtgagacatgaaaaatatgtgggccttttccccagtcattgatatagcaacatttgtctcccctgggcagggggaaatgaattaggattaccctctgggttgagcttacaagtctgtcttaggatctcttttttacccaggtagccctcttggctatccaaggtggggtgcctgggtgggggtggcacactggaagctcatagcagctgcttctctccaggcactgtaactcactagcagcttaggactagatgtgaggcatgtatcacgtggcatttgttactacaggagttaaaggaccaaagtaatcttaaatgggttacctattcttataatttagaaggtatgcaagattatacctataataatagcaagcccattcactctctcataagctttcttaaataagagagggaagggtggagttactcctatggtcagaattgcagattaccctttttccctaaagaggcctaagggttggctcccatgtgacccccatcatctctgtagtcaagtagcatcaggcctaggaacccctaaggagatcattctctctctgttccctggcttagggcagggatgtgaggcttttgcctggcactaaggagaggtagttgaccatggctattattgaatgaggttggacccagcctagctgataaaattctaaagcaagatggggcagtgctacccaaggtggtcacagagaatgaaggttcttataatagaatatattctaagccactaggccgtggtggcttctttgaaaggttgaagtcttgaaaggtaagaagaccccatctagctgggtttcatgtgctgccctcaccttacccctacaagtggcacagcaagctgcctgcgatgtctggtggttgactctgctgcctgcatggttcaggtgagcagagcagttcatgttgaagcccctcccaccggtcaggagcctgtaggactgtgttgttttccttcctgtgtcctcagtgactgggctagtgtcttgcacaaggcaggtgcttggtcattgtttgtggattgaatggcttctcagcctgagcttcaggggaccttggcctgggccttggagcatactaggagttggataagcagagaggaagaaggagagcactccaggctgccagtgatttgagcccagaaacatggggcagaaatggacacgtggacatgtttggagcagaaggtgtcctgcctggagagaggtaggtgtgtgtgtgtgtgtgcgcgcgcgcgcgcgcgtgcgcgcacgtgcgtgtctgtgtgcatgtgcaagtctgtgtatctctgtgtgggcaggtctggggagggtggtagggccagggctggctgaagagggaaggaagaattggaaagtgagattggttggaaccaattaagggaacctgagtctggtgtgattggcggttaaggagcccagaagaatgacatgatgatactgacattccaggatgcttagtctgtcacttatgagcagagaggactggaggtagaagaataaaggggagcttgtcatacaataatactgtttaacatttatttagtgcctcctatgggctggcactggataaagtgctctctgtataaccagagaccattgcagtaaactaggtatgaggtgataaagtggagaaaaatttcaaagaagatgacattgtttcttcatatttggctatatttggctcttatttggttaaagaagaaatggctccaaggacgtcttcctcctgggtcctgcttccggcagcgtgtccttgagcatggggctgttaatctggcctggttggagctgctgagattttgcatgctccctgccaggaaccagtgtccttgggtctcagctggggtgtgtccccaccccagccatctggaaggtcagaggaattagccactagaatgtgcccattagtggctttgaggggttacaacctgtcagtggaatctgaagcccgggaactgcctctctcccagggctttttggagttggaacagcctgactgttctagcactgactgctcccttatttggacagtaaattttcagggtgagattggacttctcttttgtcttgggagagttttttgtttttttaagtatttgacattcttgtgagtgattttcaaggagataacacgacatcagagctatacctttcttcacctgattctttccttggtctctagtccatccacttataagacccagatgggggccaggcacagtggcccacgtctgtaatctcagccctttgggaggtcaaggcgggcgggtcacttgaggtcaggagttcgagaccaccctggccaacatggtgaaaccccgtctctattgaaaatacaaaaattagccaggtgtgttggtgggcccctgtaatcccggctactcaggaggctgaggtgggagaatctcatgaacctgggaggtggaagttgcagtgagccaagatcacgccattgcactgcagcctaggcaacagagagagactctgtctcaaaaaaaagtgaaaataataattaaaaaaaaaaaacgaaaaaaataagaagacctagatagggttcctagactgcccactcatctcagtctccccaggggagaagcaagtaacatcatcctatagacaagaggcaaggtgtctgaggccccggggttgggcttcagggcctgggggcaacttcctgcccagccttgagacatatgtcttggttttggggaacttgctgtgccccttgacttgtggatttgtagtttatcagcccagcttcatgtggggccaggatgggagcagggcacagccaggagttggggtggtggtgatgagatggtggatggtagtggtgctactgaaggggaagaatcttctgtggcgattttgagagcacacttcctctctgtcagaagcgcaactctgtcagcttctggctttccttctgatggatccctgtaacccttaggaaagtcattcagctaatggcagtgacactagattctaatggaggaagggaaagcaggaaggagaacatgtttctgtcaacaaaggtgtgctttcactagtcagaacttgctataaggcagccttcagcctttcaggtgattactgtgctttgggattaaagtgtcctgccgtttctggaagagactgctagtcataaagacaggtagggctgaagggtggaggtagggtctccagctgcagttgtcaagaacccaacgtgaaggctgactgagcagagaaactgctgctgcccagaaagaaagcacttttagcagtggtaagtcctttgcatgcactatcttactcaatctgtacaacagcacttcgtggttggaactgttctctccattttacagatgagaaaactgaagcttacagagggtaggcaacacatccaaagcttcatagctggtagaggcagagtttcatacccaaagatcacccttttcccattgtttcttacagaggaaactgtgataagccattattttttataaatgttacattttagaatagtttcagatttacagaacagttgcaaagatagtacagagagacagagagttcccatagaccctgcaagccattaattttttttttcctccttttctggtccattttatgagaattcattgggggtggggaacagatttggaatgaggacattttttccagagattccaacttggtaatttttttcagtaggattttttgagcgtccatcagactacattatttcttccccagttctgctctgcctcagctctgctggactgggctgggcctggctttgacatctagtttcagagtcaaatgccccactttctgactctgtctcaatagggtcagatggtaattgggtttccgagagttaggaaggcaggtaggtgtggggaggatctttagcagctgggcttctggatactcttctgtctctgatggggctatgacaggggagtgttaatattttcagctcatgtttgatggcatggagccagagccctcccgagggtcagaggcagcgtctctggggtgaggcctgtttgcttggatgccctcgagtctgtccttgtatggtgccagagtggctcatggtggtcgctgctgtgggccctggccgtggtctgcaggcaggcaggctggctggctgtaggcaggagaatatccctaggtagctggtgtgctttgctttgggtcccaggcacattctccatttaagggaaaggggtctgcagtcttcttggctctgggtgtgaatgggctggcctgaagtctgctcatggcctttgctggatgtgctttttcaatgagatcattccagaattacattcctatgaaattatatttcactcaagatgtaaagctggatttgtgtaaaagcactggcactaaaactcagggctcagagcggggcagaaatgagaagagggataaacagctcttctttaggaggaggggaaggaaagacagaaagagagagaaaacagttgttaaaggattttgcattgaaaattggtgcgctgtaagcatacccaaggagttgggattgccactcacccctggaaaggcaggcttgatgtttgttgtcccagctgcctgccacccccaggcagtttggagggagatgcccttgaggcttcagtgtgtaaggttgctggaacgctggagccgcccaggtgtcccctggtcatggcactctaggcctatccctgcctttctagcctcattttgcaccatcccatatctaatttctttccctgtctctgtttccttctctctcacacacacccacactctcacactcactctactattagtatgatatattgctactcacaacactcctgacaccaaatgtgtggggttttttctctcacatttgccaatttgccaaactttctggacaccaactggggtttcttacaatttaattcaattttgacactacctggagctagcataatctccatagattaagtggggacaagactgtccccacttcagatgctaatcacaagtcagggccacccatacttttgaccaactcactataaagttggagggatcggttcccacaaccccctcctcaggtttggtaatttgctagaatggctcacagaactcagaaaaacagttgacttactattaaccctactattagtattatattactattagtttattaaggatacaactcaggaacagccaaatggaagagatgcatagggcaaaattttggtgtgtgtgtgtgtgtgtgtgtgtgtgtgtgtgtagagcttccattccctctcagggtgcaccaccctcccggcaccttgatgtgttcaccaacccgggagctctctgaactcagaagttttgggtttttatggaagtttcactatgtcggcatgccatattttgaatgtcccctccaagactcatgttgaaatctgattgtcattgtgatggtattaagaggtaggacccttcagagtgattgggccatgagggctccaccctcatgaatggattaatgctgtcattgctagagtttgtttctgataaaaacaagtccggccccctcctgccctctctctcttttgtgtgtactgttgtgcccttctgcctttctgctatgggatgatgcaggaagaaggcccgcaccagattcagccatcaatcttaagacttccaagcctctggaaccgtaagaaataaatcctcacttcattagcataaattcaggtatggtagagggacttgttatgaatcacaaagtaggctcctctcacccccatccctcaggaaatgccaagggtttttgaagctgtgcccagaactgggaagaaggctctctctctctctctctctctctctctctctctctctctctgtatatatatacacatatatatattccttattatatgtagagagatatctatatatattcattattttatatatggaatacatagatatatttatctcacagtaacacacatgtgcacacacgcacacacacacacactcacagcccctgcatgctggtagtgtgagattgtataccccatactctatatgattctgctttgtattcctttgtatatactgttccccatagcgtggaatgtccttttctccccttgtctgctgagagcactctagttgctctaaaacccattttagctttgcctcctctgaaatcttttgtgctgcctgctgacggttactttctggcgtctttgtgctgccacagctccttgtgcatcccgctgctcttgcacatttcatttgatatgttttcgaggaaaagcctctagtatggggcttagtaaagggtaggtacttgtgaaatgattgttgaagaaagaaactaaatgaatgaagaattggatctaagtgaaggtcatgtactgcaggcagggcaaaccacagaaaggtgtctaacatggcataagtgctatcagagaggctaggagatgagtgtcagactggcagaaaaggtggggtgtgcgtacttccctgtgcacacaagtatggagtcgttcgtggagtggcaagatagagtctgtgcagtggtgcacacctatcatcccagctacttgggaaggctgaggcaggaggatcattttagccaggagttcagggctgcagtagctataatgatgcccctgcacttcagcctgggtgacagagcaagaccctgctcataaaaagattttttaaataaattagaaaaaagaaaaaaagcccagtgagttctgggttccatagactgactatagggattaggtctggactcactcaaggtgagatgaaactattttctgagcaaaatgcagcaggatagaaggaaaagagctgtagctttggaattgaggattctgggtggtggtgattatactgttaataatgataacatagtcctaactatgagccagacactattccaggcactttacatatgttaattcatttatccttataatgtctctatgaagtagtgactactaattgttgatttatgaagattgcagagcaattctggacttggttctactcttactaattgagtgaaccgagggcaagatgcttagccttcctgagccccagcctcctcctttgtgaaatggagaagataccttttgcatttaatcctattgggcttattggtagactcaaatgagataatacgtgaaagtgtttttgaaaagtataaagtactctaaagtactttgcattggggaagaagggaaacttgcaaagtaattgtagtttagatactgggctcatacttaatgcagatgctgctctgagcatgggccacagttgcccttcacagctacacaaggtgggctactggcagtctctttgattaaatgccaggatttgagctgctgttaaaaaaatcaagaaatctttttttgcccctttctttcttttttatgttttgtagagatggagcctcactatgttacccaggctggtcttgaactcctgggttcaggtgatctgcctgccttggcctcccacagtgctgagactacagtcatgagccaccgcacttggcccaagaaatgagttttattggggccaaatgtatatgtgaaatgtcataagggacagattttttgtgctaaaccagtccttctttcccagccaggggaacagtggtaaagctgggtggtaggcatttgcatgggggaggattaggatcagtgtggccactgcaacaggtggcaaaaaggctggctcagagcggaggcacagcagctgactgcagggtcccatgagcagcaggtgtgtgaccccttttttctaagacgagacgcttatgggagtttttagaagttgctttatgaccaggcgcagtggttcacacctgtaatcccagcactttgggaggccgaggcgggtggatcagttgaggtcaggagttcgataccagcctggccaacatagtgaaactccgtctctactaaaaatacaaaaattgtctgggagtggtggtatgcctcccatacctgaggcatgggagcctgtcatcccagctactcaggaggctgaggcacgagaatcacttgaacctgggaagcagaggttgcggggagctgagatcgcaccactgcactccagcctaggtgacaaagtgagactcttgtctcaaaaaaaaaaaaaaagaagttgctttacgttgctgttaccttggcagtggagactgtgtccctcaaagtggttctctgctggcactagatacacaaatgtgtcagcacttgggcttggcaggcattgctgagtcaggcagtgagtgataagggagatgaaggggacatagggggagtgcctccaagagcagcaaggaggggcagtgtggcccttctaagccacattactacagtattctctggagcttcttagagccaagtggcttcttccatgaggttcctgcaggcctgagagttgcctggattgaccatgatgcctgagtgtataattataggtcactgaacagaacccctagtcagctacatccctcaaaaatgcctaattgtaggctacaaatatgaaaatatacaagagcttagaaacatgtcatacctcattacaaagagcaatggcatgagtcagctgtgacttgggtggctttagtgtgcttggtgagcatgctgactagtccagaagagggcaggaggcacattccccaagcttcctacagggagattgaggactttgggaaaagggagaaagtataagctgtgaccatagcctgctagtcacatctactaaaggggtctgctcacctgatggtagatttgattcctctttgggaattgtttcctgaccagtttacaaaccacattagaaaatagcacatttggccaggcacggttgctcatacctgtaatgccagtgttttgggaggcaggaggatcacttaaggccaggagtttgagaccagcctgggcaaaatagcaaaacccgtatctctacaaaaaatttaaaaacttagctggctatggttacatgcacctgtagtcccagccactctggaggctgaggcaagaggatcacttgagcccaagttttaggctgcagtgagctattactatatcactgtactccagcctgggagacagagcaagacctaatctctaaataataaataaataaataaattaaagatccttgagggaagtgaggtcatatgtaataccttatattacctaactgggccatacagattttattgctgggttgagggagcccactctgtctcagggtggggaggggtacttggataagtgcccagcctggttgctctcgtccggtctggcagtgctttctcaccgagaggcctctcccagctcagaaagaaggaacagctcgatctagatctctttcttttgtccctccctgttctcccaactccccttggtatagatgagtctatacacacccttgctgccagtggcttgccattccttttctgagtcactgcccttcattaccagatctctagtggtgatagtagaagggagggttaatctgtggcccttggggtactctttcctctcagttttaaactttttagtcaactctaagaatctaggaatctcagtattgaaagcgaccttaggtgccacccatgcccatctcaaaggcgagggggtagactaatcttatctacctttactgtggtattcccagcatgtaactgagtggagtgtggtaggaggtgcaaaaaatacttgcggaatgagtgagtccctgtaaatagcagcagcttcacaagaccactgtcattgcctcatttgttcatttttttgacgaatattagtaagctccaattatgtgccagttccttttaagttctggaatactgtgatgaacaacacagtccttgtcctctggaacgtattctgtaattgagaaataaggaattaaaaagaattgatagtctccaaatggaatttaagaattaaaacttcttcttcattttggcctctcagggtctctcattttctgaggtctccttgggggaccctagaaaacacatctaatccctttttcacacgagagcctttccgaattcccaagccaatgatcaccctccccgctccacagccttctcttctccagggtaaacattctcagttccttccgtcatttctcctgtgacatgcttctgagtgccctctccatcctggtcactgtccttaggactcagtccaaactgatagtctgtccctctgccagttgggagtccacaacagaataccacctcccacgcattaatttccagggagtgttccagcctggagcctctccttactctgggctcaggcgataggtgagggaaagagaaggtcctggacttggccagactgagatcatcttcatatttggccaatcctggaattcgaaattcttttcttttgtctcctccctgcctccccaccatccttcccttggtatagacgaatctacacacagccttgctgccagaggcttgcctttccttttctgagtcactgcccttcattaccagggaaattagcatgaaaaagcgaattccagttctataactgtattctattcttgtcctctgtcacattctccaacccagcacccccacctaaaatgacaaaagttgagtcctgtgacatcacaacagttgactattgtatcaacagctgtgatgtcaccaacagaggattatgacttcaaggaagaatggaggtggggcgcatagctggcaagaaaccccgtgggaacaaagaaggtattttcgtgcagatcttcacccagaaagcctgagttggcctttcagtggatggtctgtcagtggaagccctctccttggttcccattgctccctgtctctttggattaatgatttggcttgtggacattgcccaagtctgagcgtgtgtggaagacccctgctggccggcaggcttctgggctgtctttgggttttattcatgaggttggagctgaatagagcttttcagggagggagttcagaggggtgcctgggagcctagggtgaggctgatgtggatgtgcaggcgcctgggctgagggataactggtgtgcaggcacttctgttcaggcagaggggttattctaccagccactctgggaagcctgagtgtgctgccacaggcctgaatgttgactcctgcccacttctggggctgggttgggcctgccctgggaactcctcttggctccatgaacagagacttaaaaacacctgctgcagagactcccaaactttcttagttcatgggccttagtgtttcagtaatttttttttttacagtgtccatagcccaaaataaatacctaagttttcttttataagtaggttttttgtttgtttttatatgaagtctcactctgtcacccaggctggagtgcagttgtgtcactgtatcctccgcctcccaggttcaagtgatcctcctgcctcagcctccctagtagctgggactacaggcaggcaccaccacttctggctaattttttgtatttttagtaaaattagggtttcaccatgttggccaggctggtctcgaactcctgacctcaggtaatctacccgccttggcctcccaaagtactaggattacaggggtgagccactgtgcctggccttaagtaggtttaaacaattaagtatttatatcctaacaactgagtagccatctgaaaaaaaaatgatacaagaaattgaaaggaaaaatatttatattccattcttaaccacacttactaatgggatgtactaggtactgcatagcatatcagaccttggaaccagattgattagtgccatgcttatttcctgttccacattgcttttcacatggtatttgctttttatcacagcaactgctgaaaacccagcctcagaaagaaatgacatcatcgaaaagaatgtaatgcagtctgttgttgaagctgtgaactcatggggtgttcaacaaatgttgagtgttgctctgtttccctcaaagatttaaaatatttagcagtatccctgtgagttcatcatggggctttggggcacctcagcacacagtctgagaagcacagacctgaaactgccaagtagcacttgctctgtttaaaggaggaagaagaggcaagttcggtcatcatcatggcccttaaaggagttgggcaggtggatggacagactctttctctgcagtctcagctccagcagactgcattgttagggggaaggtctttgtttgaccagggtctgtgtgtgtgagcccctttccctagatggggaagaatgatgataggcatctcttacgcttatttgttgttgactcagagccttctgaactagatggcttaaagaaaaatgggattttgacaaccagaatttaggggccaggcgttggaccttctgctaatatccttttctaattcttttttttttttttttttttttttgagacagtctcactctgtcacccaggctggagtgcaatggcgcgatctcagctcactgcaacctctgcctcccgggttcaagcgattctcctgcctcagcctccagagtagctgggattacaggcacccaccacaacgcccagctaatttttgtatttttagtagagacaggacttcaccatgttggtcaggctggtcttgaactcctgacctcccaaagtgctggaattacaggcgtgagccaccatgcccagccccttttctaattctttatccagatagagtggggctgcaggggtgtacttgggatggagggtggcttcctgccacaagatatgacagagaccaaaggactaatgtgctctggtatcacttctagagcctcatgccaacctctccagactctggggtctgctgcttatgaaacgctaggcaaattacttaacctttcagcctcagcttcttcatccataaaatggagataatggcatctatttcacatagttgtaactaagattacacaagctaaatataaatacatgcatagaaccagcagagcctggctatataggtgtgctttcttctcctacttccaaatttgaggaaaaaagggttttcctccaaagggaaattgagccctaatgatctaagatctgtagttccagtgttaccctctaccctctactgcttcttttttcttttcttttcttttgttttttttttgagattgattctcgctctattgcccaggctggagtgcagtggcgcgatcttggctcactgcaacctccgcctcccgggttcaagtgattctcatgccccagcctcctgagtaggattacaggcacctgccttcatgcctagctaatttttgtatttttagtagagacggggtttcaccatgttggccaggctggtctcaaactcctgacctcaagtgatccacccacctcggcctcccaaagtgctgggattccaggcttgagccaccacacctggcctctctactgcttcttaataactttgctctgtggatccagtgttcccaaatctgctgagctctgtatcctgcttgctatattaaactttttaatgaagtatatcatacaacatgaatgtatatatgtatccaagtcaacaaatttttacaactgaacccatgtaaccaacactcagatcaagaaacagtctattatcaatatcccagaatctccctctagtcttcctatgggtaaccactctcctgacttctaatagcattgatttatttttgggttttattgttttctataaataggctcatctagtatgtattcttggtttctggctcttttattcagaataatggagagatttatccatgttgtgtgtagctgcagatgttcattctcattgctgtatagtaatcattatgtaaaataccaaaatttgccttctcttcttctgattatgagcatttgaatttttagtttatagccattatgaatagtgttgttatgcacattctcatacttgtcttttagtatgcatgtgtatgcatttctgatgggtataaaactaagaaaggaattgctgggtcatgggttatacctatatttagctttagtatataatacccaacgttattccaaagtggtagtattgatttacacttcctctgtcagtgtttgagaattccagttgcttcacatccttgccaacagtaggtattttctttttcattttatccattccagtgggtatgttaatgggtatcacatctcagttataatttgcattttgttgatgactaataaagttggataccttttcatatatctcttcactgtttgggtatcctctctggtgaagtatctgttctacttgtgccattcttcttttgagttgttttttatttatttgtagaagttcctcatatattctggatatgagttcttggttggatggtctactgagtacattgtcttatactctgttggtttgcttttcactgtctgtatggcatttgttaaatgaacaaagttcttatttaatgtagtctaatttgtcagtgtttttcattatggttatcactttttgtttgagatgcagtttcgctcttgttgcccaggctggagtgtaatggcgcgatcttggctcaccgcaacctctgcctcccgggttcaagcgattctcctgcctcagcctcccgagtagttaggattacaggcatgcgccaccacgcctggctaattttgtatttttagtagagatgagatttctccatgttggtcaggctggtctcaaactcccgacctcaggtgatccacctgcctcggcctcccaaagtgctgggattacaggcatgagccactgggcctggtcttataagcttttcagagagcaattttagttgagttcttgggctgaagctactcctgcccagaatcgtttgggttttcacagggggaggcccccttttgaattttctgagtggttgtggttgctgtaagtgggtcagacccttcactgggaaggccagaggtaactagagatgggcctggactgtggagcccaactgctgttcaccctatctagggagggcagttctacttacagggtacagcaggtgtgaaggccctggggtaggaacacacctggtgtgtttgagcacatggtatcggacagtgtggctggagtggagacagtgaaggagaaagagtagttgaaatggggccagagttataaaagggacccagacaatggagggccttataagtcattgtaaagattttggtttttactttgagtaatgggagctatggttttgagagttttgaatagatggggtgacaggagccatgatgctggtggggagtacatgtgatgagtgtagctcattgaggatctgttcttagtggaatcggaagcagaggcagctaaaagagtgaggatgagggaggaggtgttgaagttgagagctggagggaaagctaaaccccagcccggagacttccagtagcactgggctctgagtacccactgttctttgtagatggcttctcattgttctttgtgttctcattatagaggtggagtagtctccgtaagctatctgtggtaaaacggaggtattaggattttgcccagtccctttagcctttattatttcctagtcttactcggagaaggtgcagcttgtggatgataagtttcttctagagcagaggaggcagcttgccatcagtcaggttgagctcagctagaccagagagcgtgggaagggtgagaaggaggtcaggacttagagtcaggaagaagttgacacttgaactggatatttaagaaagaatggggggcaagggacactgaaaatcaaaggaattggttgaacaaaagcttggcggcatgaacattcctggcatgtgcaggaaatgtcatccagtgagatgtggctggccagagtgaaggtgctgctctaagataggactatggcctctggatcatcgaaattgcaggacccaccatgttctccttgccagagcgaaagagggcagtggttggtccccaggagcagggttttttatggatcaggcttccaatctgcctcctttttccaagtggtgacaagatattgggcagagtaggtgccatagtcttgacagagctaggataagccacttgctgagaggctgagtttccagaatggcagaaacagccatgtctaggtttttaaaactatgtgagaaacaactagatttcctttggcctgaaattgcctaacaagacctcactccaattcaggctttcaggaagtgtgtaaacccagctttaaacctctgcaggatctgcactgaagtggagaaggaccatctggcaggaaaagggattgaaaaatggttgaggttgaaaaagcagacttaaagggctttctttgagggaggagggttgggaaggaggatgtgggaatgataagtggacagtgaagagacggaaaaagttcttacttttttttctgattattatgcaacaacaaaaaaattgtctttcctgtggctgattgagggggatttcagcctcacgggggcctgtaaaaacacccacctatcctctgacctcccagcaaaacaaatgttggttcctctccacttgaccaggctcactatccccattacatttttccttgaagggctttctggacctggggctggaatggagaagatctaagatttacaatgtgtatagaagtagtgaaggagaaaagggtttactgttttgtagggaatgggacagtcttgagaaaatccttcctggtatttcttttctcttctcttctctttttttcttctcacagggtctgactctgtcacccaggctggagtgcagtgtcatgattatagctcactgcagccttggacttctgggctcaagtgatcctcccacctcaggctcccaagtagctggggctacaggtgtgcatcaccaacctcctgctaattttttatttttagtaaagacagggtctcgctctgttgcctaggctggtctcaaactcctgggctcaaacaatcctcctgcctctgcctcccaaagtgctgggattacaggcgaaagctcacatttttgagaatcttggtttgggtacttacaaggaacttaatctaaggttactgaagcttgcagcggctctgggttgtgtgggcaggtcaggggaagggaggtatggcagggagagaatggaggcagcactgagaagatagaaggaaaggggctcaggttcttagtatgtttctaggagcccttttatcccttagagaaccaggcaagtcgtcgatctgtcgggaggttaggcagagaggggctgtgccttttgcttatagcattggtgagcttagctctttctaggaagcaggggagcttttccacaggaatttagcaggaggccttgctgcttcaggaagaacaggggctgatgggaggatccagaagacacaagtgctgagggtgaggttgaagtcccatgcggagaaggatcatcctgatttagttgcatttgttaagctccttagaatctgagggccagtattggttgctgagactcttggcagccctcctctggggagctgccagtctgttcctcatgtccttggccagggcccatggatgaggagaggtgcaggaaggagttggcaagaaggtaaagagggtctgaggagatgtttgctgggcaggatgagtaggcaggttggtcccagggcaatcaggccacagctgcacactgttgggtcactatactgtcactgtattgctggccctttcctggctctcaccatgttctcagaacacacacaagagctctgttcccattcccaccttctctgtccctttaggctgctgcctaaactttgacttccacgtgagcagaattgcttaggagagtagtggaacatagatgtagcagaaattctctcatgtggttgagaggtttcctattttcgggcatcttgacttcttacctcggctataaagcagagtgctgggcaatgtttacgtttcctctcagtggtgacattaacctcagcagaatgggaggctttcctccaaatgcttgcatttcttcctcttcactcagggctcagctgtctcctgcttcaagagcaaggcatactgtcacatccacatttatgcctgcagaaaagtatcagacagacatttagaaatgtcacctaaacaaggacagacaggttttttgctctaggataggaaggtccattcttagaggtggggcacccctcagaaagagctcccttcagagactgacctctcatcggtcccttcttggacctttgagagagcctctgtggatcaggtgatgggatcgggtcagagggagaaagggcactcaggatggtagagagttgtctggtgaaggctggactgagcaaaagctgtcagccttccgggaggtctgtcctcctgtggcagtgaggggaattgatgggggtttcaagcagccaggaggctgtgccctgcactgctcctgcccagccgtccaggaggttttgtgtggctgttgccaatgccgtgcctcctaacccttcctgctgggatgcaggctagagagctgcgacacttacctgctggttgggaggtcaggttagagccgagtggaccaggtggaggccatggatgaggaggcacagcgctgcggtggagggagccgcggcatctaactgggccacttgtgctcagctctggcccactgttgtcatataggagtgcacacagtgatggtaaattttctcatttttcaaaagaagctagaatctgaatttttctttctattcacctgctttcttaagcttgacaactaattcaaattatttaaaaataaaaggaaggccaagtgagacatgtttttgcttctgcagaccaccagtgtatgactgatataaactctttttcccaggagcttagaaatgaggagaaagcaagcaaagggatcagggtgggtggcaggaagagtaatttcaaaatacaggaagacggagcacacctggagactgacgaaatggcttagatgagccattggtaatgctttcactggatcccgtggtgtgtgcgttcctttgtggttgagggccagtggttctctgtgtggtggaagaagctaatgggatgggggtaggaggaagaggggctgagtgccatcttttagttgcacatagctaggcagattcttgggaagatggtgagtccgtgactccattaagtccctagagaacatgctgtgggacacaagtttttgcacttcagggcatataagcttgatttaaagcgcttactaaaatgcagattcctaggccccatccccacagattcccgttcagtaggtggggcctgggactctgcattttaaagcaccccatcaatgttaaagaaaataagtggacaatggagtgagacagagctgggtctacattcctgctctgttccttcactaggtgagtgatcttggtccagtcatttaatttctctgaatttaaatttcctaatcagaaaaaaggagactgtattatcactaccttgtagaatggtgagaactaaattagaagacagttggaggcagtacagggtcctggcccagagctggtgcaggccacctggtcataaatccctgcccctttctagccgtgtgacttggagcaagctaattaactgctctctatcttggtttccttggtaaagtgtaactaaccctgtgaaatattaatagtacccacctcacagggttgttaaagggttaaatgacttaatacacatgaagtgcttgtaactttagctgttataattacatgtttaaaagtctagcagcgtgtctcataataaatgctcctttgcttttccttaggtccccttactgtgggtaacagattaaagcttaatccaaatgtcaccttctgatgaggccttcctggagtccactttttactttcttgtctcccttcacagttagcttctccagggcagggactgtgtcttccatgttaatatcctagcaccttgcacagtgcctcacatagggtcagtgaatggaatgatagtactagggagtctgaaagatgactcagacttgggaatggagaggttgtcttccaaatacctagggaagtgtgatctggaagaacaaacattttttaagcttctattgccagacagggcaatcatgggaggtaggtcatattgctattatggctgttatagtgacaaagtgagtctttgacactcactggagcaaggtcacataactagcagttgtcagaggcagggctggactcaaggcaggtgtttttccactgcccctcggggcctgcgactgtgcctgtttgtctggatgcagtttgtagaaaagttccagaggtaccttattctattcctttctctggattgttactcttcagatagttgtctataatttgtcagagctgtgtttttgaggaactttggatggatggtatatgctaattgaacaatttccttttctaaacatgcagtttctgcctagactttgccattgagggcctgggaactagcaaagaagcctctcatcatgcttgagtctctgctccattcccatgggcatttcctctgctttaggagtgtcttctctccctgcagtctgactagccaggatatcaggctaaaagcatagatgagggcctggggctgcttgtaggaggtggggagaaatggtgtagcccaggaagccagaatgctgagagtcctcaagcctgagcttcaggtgtaaagggttaacctggccttcagctcctcaagtcccaaattattctctgatcctgatagacctggcccagagagagcagttggtggggaggctggtgagtaggcatctgtgtttctaacctagtgcgcccctgtgaggttctcagcagtgccagctcaagatgcctgaattcccaggccacttctgagaatggcagctgcactcttggagaaatgtgactaagggtccctgtcatgggcctggaagcaattttgttctgcttctttcttggttacatcttcacaggatttttcttcttagccacccagatgtcagagtcaactacatttctctttcttagtaagttggctctgtgttctcatatacaactgcatgatagcatttcagagcagtgagtctaccctcctgaaagcagaaattcagggaaagaaagaatatgtttttcatcatgtttttttaacatgtttcagtttctggtcatgccacaaatcttttgccttttctccaagggcctgccctggaactgatagagcaggtcaaatgttgttttcatggatggtgatggttactgtgatcattgctacagttgaaaactgatgcttagcaagttgattcctatagcactgtgcttcctgaggaccctgaaaactggcctgagaaaatgtccagaggttgccttttctctcccttctctgttgtacatatagcaatatgatatgccaagcactttacttggcactgggctgatacaggtagagagtatctcactagagccagtgtgcgtagatgccctgggggcgagattgactttatcatcatcatcatcatcaccatcactaatgttatgctattaatatagacttaaatttatagggccaagcatggtggctcatgcctgtaatcccagcactttgggaggctgaggcgggaggatcacttgagaccagcagttcgagaccagcctgggcaacataaagaaaccccatctctaccaaaaagaaaaaagttagctggaccaactccattttatgaagggtaaaagtgaggcttagagttggtttcctttttccagaagcatctgccgtattcaccttggagggatgtttcattgctgtcaccatcagctaatcatcccctgcctactggctgcttcctctctttccagttaacataccactccctatcaccatcactaaaaccacaaccctgagagcttatgcgaagttaaaattagagctagtacatttcatcttgagattaggaaggaagtataaatgctatcaagaattaggacttgacttatttttatcatcaaaaccaatcacttatttgcaccaaagtaataagtaagatggtctccaggattaaggtcatcagtggccataaataaatatgtttaactttcaacatccagatatacttcattttggccaatgtgatggaggataccaatcagagggagagaactactgtttgtaaactgttcagcttccgtgatggtggtgttcgcctaggctgtggtgcaccttgacattggaaatatgcttgatgtgtcgtttgtgttgtcactcacacccactctccaaggcacttaaaaagatttatttagctcttaagttttaacgtctatattgagatgtaattaacatgctgtaaaattcattgatataatgtaatgatttctaatatattcacaagagttgtacaaccattaccactatctaattctagaacatttttgtcaccccaaaaagaaaccccgtactcctatcagccatgtcccattctgccaccctcaaccagtgctaggcagctcctagtttactttctgtctctgtaggtttgcctgttctggacatttcacaaaagtggaatcaaggtttattcatgttgtagaatgtatcagtactttactcctttttatgtctgaataatattccattgtgttgatatataccacattttgtttatcatcagttgatggacatttgggttagttccactttttggctactatgagtaattctgttatgaacatttatgtacaagtgattgtgtggacatatattttcatttcttctgaacagatacctaggagtgggtcatcctggtttatatggtaactctgagtataactttttgaggaactaccaaattgttttccagagtggctgtgccattttacatttctaccagcagggaatgaaagttccaatttctctacagtctcactagcatttgtttttatctgtctttttttgttatagaaatcctagtggatgtgaagtaatatctcatgtggttttgatttgtatttccctaatgactaatgatattgagcattgtttcgtatgcttattggccaagtttatacctttggagaatttctgttccaaatcctttgtctaatttttaattgggttacttttttattattgagttgaaagaattctttatatattctggatacaattttcttaggagatacatgatttgcaaaaaatttctcccattatttaggctgtcttttcactttcttgatggtattgcttacagcacaaaagttcttttctttgacatagtacaattcatgtcctttgtgtgtgtgtgtgtgtgtgtgtgtgtgtgtgtgtgtgtgcgcgcgcgcttttggtgttatatctaagaaaccattgcctaatccaatgtcataaagatttacttctgttttcttccagcgttgcttttgtaattgtagctcttacatttagggctatactacattttttactttatttttaaatatggtatgaggtggggccctactttattcttttgtatatggatatccagttttctcagcacagtttgttgaaaagactcttctttccccatgaattgtcttggcatccttattgaaaatctgttgaccataaatgtaagggattatttctggactctggattctgttgtgttgatctctgtttctgttcttatgtcagtactgcactgtcttggttactttttagtatttttttttaattggcaactcagagtcttctaactttgttcatctttttcaagattgttttggctgtcctgtatcccttgcatttccataaaattttaggatcagcttgtcaatttctgaaaagaagctagctggcattttgatgggtattctgttgagtctgtaaatcaatttagggagaattgccatcttaacaatattaaattttctgatccatgaatatggtatgtcttttcattttttatgtctaatttctttcaatgatgttttataatttacagtatacatgtcttgcattccttttatttatttctaagtgatttattatttttgctgctattgttaatagaattattttcttaatttcattttcagattgttcgttgttagtatatagaaataaaattgatttttttttctttttggaggcagagtcttgctctgttacccaggctggagtgcagtggtgcaatcttggcttgctgcaacctctgcctcccaggttcaagttactttcatgcctcagcctcctgagtaactgggattacaggcatgcaccaccacacttggctaatttttgtatctttagtagagatggggttttgccatgttggccaggctggtcttgaactcctgggctcaagggatctgcctgccttggcttcccaaagtgctggaattacaagtgtgagccaccacacctggcccaaaattgatctttaatattgattttgtatcctgcacatttacttgaagtcactcagcagtttaataggttttttagtggaatccttaggattttctacatacaaaatcatgccatttgcaaatggaaataattttacttccttctttccaacccaaatgtacccttaaattttaatcttcatattccttttattacttggcataaaatagtgttcctgaaagggtagtgcatttaccatggtgatatattagctaagaatatatggtacatgaacagacattttttacttttaaatatttaaataccttaatgtatattacttttattttaatgggtattagaaaaaatgatgagcacttctagctctcaatttcatgatgtgtactcaaatgttactttatcgtaatggttttccctgaacatcttatttaaaataagataccctcttcaccactctctttccctctaccttgcttaagtttttttctctctttttttttttgagacagaatcttgccctgtcacccaggctggagtgcagtggtgcaatcttggctcactgcaacctcctcctcccaggttcaagcaattctcctgcctcagcctcccaagtagctgagattacagctgcctgccaccacacctggctgatttttgtatttttagtagagaaggggtttcaccatgttgcccaggctggtctgaactcctgacctcaagtgaactgcctgccttggcctcccaaagtgctgggattacaggcgtgagccaccacgcccggctcaaccttgcttaatttttttttattccacttaccatcaccttacatattatacacgaaggtacacttattatcacacacgtgataattcatgtgtgctcattgtctgtttttccccactgggatgtaagctgcatgaggtcagagactttgtattactcttcactggatcacatttgccgtggacatgggtgctcagtaaatatttgttgaatgaatagtttattgtttagaatgaggtgacttttttctttttaagaaaaggaagtcagtttcaagtatattcaagaaaaatattgaataaatagtatgtcaggagatatgcaaatatggcaaaaaccatggactgtatagaatgatagaagtttaaggaaactctaacttaaggaatgaggagagatggatggagatggagtttcttgggcttctttgtttattttgttttctgtgaaattgtgtccggaattggtgggttcttggtctcactgacttcaagaatgaagccgtggaccctcgcagtgagtgttacagttcttaaaggccgcatgtctgtagtttgttccttctgatgttcggatgtgttcggagttttttccttctggtaggttcgtggtctcgctggctcaggagtgaagctgcagaccttcgcagtgagtgttacagctcataaaggcagtgtggacccaaagagtgagcagtagcaagatttattgcagggcgaaaggacaaagcttccacagtgtggaaggggacccgagtgggttgccactgctggcttgggcagcctgcttttattcccttatctggccccacccacatcatgctgattggtccattttacggagagtcgattggtctgttttacagagagctgattggtcctttttgacagggtgctgattggtgcatttacaaaccctgagctagacagaaaagttctccacctccccactagattagctagatacagcctgtggactgatgtatttacaaaccctgagctagacacagagtgctgattggtgcgtttacaaaccttgagctagatgcagagtgctgattggtgtatttacaatcccttagctagacataaagattctccaagtccccagcagattagctagatacagagtgccgattggtgcatccacaaaccctgagctagacatagggtgctgattggtgtgttcacaaaccttgagctagacacagagtgctgattggtgcactcacaatcaaattagctcacactcctccgtattccaggccaggggtttcttggggtctcttaagctgtaacacatggagttaaacattaagtgggaaagcagtttctactacctgccacagacaccctcttggcacttttggaggtcatctggaagatgttcaaggtgcttttggctgcctatagaaacttggcttaccggcattgtcgtctttgcagggctctgggtttgcagagagccgaaatgaccatgactgccaacaagaattccagcatcacccacggagctggtggcactaaagcccctcgggggactctgagcaggtgggtaagggagcacttgtgggaggtggcatcaagggacctaggtcctgggtgggatccctccaaaatgtaaatagtcatcatcttgactgacagtcatccaggtgactggtctaggccagctcatgctgaccattaggcagaagatattttctagttctgtaagtttctatgtgatatagcaaacagtaaccctaaaacaagccttgctttgtgtctagcattctaaggatggggccagcaagaagcagctgatgttcttctggcttgtaaccttttcccatggtggggagagcttggggcctgtgcctgagctaagctgcactgtagtgagggaggctgaccacattgggctaagggtagagaggcagttacgcatattagcacaaactccaagcagcagcctaggctttataggagtttagagaaaccgtggattttggaatcatggatttggttcaaatccaggttctaaccacttaccaaatagcgagctctcagaacgtttccctgtgccctataaaatcttcattatttcatctataaaataataatagtagttatcttacagagtttctctgaggactaaatgagataatatatgtcagtgcttagcattatggctgacataaagctactcaataaattttaacccccttttgaggatgagatcaaagcttccagaactcacagatgcacagatagatgcacagtactctcaccagggcttctctggtcttggccaaggctggacactgatatcttaaaagaacctttagtcttttttattaaagctgtgtacctctcatagccctttctgctgaatgtcaggtggacaaatttggcttttggggcctctgcctctaagatggatagctatgagaaggatgcttagctttggtttggatagggctagttcattcctggatatctggctgtgcagtgctaggctgagtccaatagggtctggtcagagttggtggtaaacatttggttcattcagaactggagtccagatatagttggtagaatagtgcacgggatgtagcccctggggagtgactgtcatgaaggaggcaggggttccccacaccatacatacaggactttgtcccaatagaaacagtctggatggactatgccaaacagggtttgatggactctgacttgttaagtacgtaagatcctgggacttagccaagcaaactgactatccacttgcagcagcaagactgataggaacaccccttgcccaggcaatccctctcatttagactgggcttggtggcataccagcttcccctgtactgagtgaggctgggagtggcaaggaacagcttcttgggcaaagcaggtggagaaactgacctcctccagaacatgttggtgtccaaggtagaaacaagtcaaggtctcagagtctttatctcccattgcctgctcctgggaaccatgttgttgggctcttgtcagcctagtggcattcttaccatgattgagctggcagatggggctgaaaactaaggttccagttttttagaatatcacactactgtaggagtgaaacaaatatatgtgattgtgtcattttatttgtaattttaaagaaattgtatatttaggacctgaaatggagattaccattcccagcaaccctcaactcctttaaatattctttttttttccttctaatttccaccatacaggaatggggtagaggggtgggaggggcagtatttacatcaagtttcaaagcagactcgagactgctgacaggtgctgcagtttctatttggagtaaatgcctacttacttctaagtgttttcagaaattgctcttcctttagcttctcagcatgcttgccatcataacatgctagatggtgtttgtaaatatctgagcctcagatgtgcctaaaaaaagcacctttcctgcctcccttctaagtcttctcttccttcctaccacatttccgcttctctccttccttccctcccccctttctttcctgggagcctggcttttggtgtgaagttgcaggcctctgtggctagtgacacccttctctcagagactacccctggggtgtaggtattatttagacattgtgatctggtggtttctttggctgccttcacccctggccacatctgggtgtgttctttgggctaaggcagtaaatcaccagttcatttaggaaggcattgtcggtgaactcagagggttctcctgggtgccaggctctgtgctgggcactggagggcaaagagggatgatccattctctttctccaaggtatttacaacttggattgatgatcttggcacctgagtttcttagtttgacctttcaataggtgtttggtagtgacctggggcccttttatcattgccagcacatgaatccaaggaggagactcctcggtgtgaccagagctttagttggggaggggagggtgttggggccttggaaagctgggcctttgacactttggctacgtcggggacttccacatcatccacatgaaggcagaggaacccagtggttctaagacgcatttgtatccagctttgggggaagagggaggtctggtcaaggaaaactggcgggggtgggcagatgggaccctgtgtaactgtcaaggtgtgtatttgaaggactgtacccttaatttgtgtaagacttcacctggtgctaccaccaagcctgtctgggttaaagaccctggattccagtccctaggttttcacaggtgtgttgctaatttattcccttccttttcctttgcagcttagtcttgatttggcaggaatgtgtaggaggggaaaatctaagcctttcatgtgactgcctcagttttgttctttgctgtatcttggtctcctggagcaggtttccttgtcttcgcttttgttgatgaggccgaatgagcatactgttcatccttacctgccagatacactctccccacaggctgttcccatttcagctcacaagatatggctgcatcccactctgggggtctggggtgggattctcaaacctcttctgaattctagaggtcagcctttactgtgttggtgttgatgacctggggtgggactggaagcaggttggtaacttgcaaaaaaggaagtattatgtttagagctaattcagctgtgtagatagggtgaactttgccacttactgctctcaggagatttcacttttgcagtaagacctggcaggcagcaggggctcttctctgaagacctgctgatttcctccacagcttcttcactatgaaactccagcacctgggtcattgcaacttggaaataacagactgtatcagccttgagtttgagaacttttgcttgtggtgggtgctgaaaatctgagtgtgtgagaatatataattcttgagggcaaggactttgatgtctttctgtgtgcctagagcctggaacaatgcctggcacgtagaagccattagctatttgttgattagtcaactagatagatgggagagcagcctcttagagcataggctgttgtactacttgagtccttatagtaccttcctaatgggtcatcttagctttggactctgttttcatctagtctgtagtttcttagaaaggtagagctgaaagggggctttgtagctcattcagtccaacccatttgatttacagattgggaaactgaggcacagaaaagaggaggtactccttaaggatacaaaactagtaggaagaggtactcaagcctgcctctcttcatccttctgttattttattatcccaacacattcccttcctatgagcactcctgggatcttcctgcccccaaagtactgctatccatgataaagtcaaacttagcctggtttgcagggcttttcatgatctggccctggtctttctttctgccctaatagttcactgttctctaatgcaaaccttacatttctgccaatctggatacaattattcacttctctcccagtgtttttcttgaccacccaactaagacaaatccctccctcctctgcattcactcagaatctttggttcaaaacggccaaatggcacttatcatatagtatctcataaagtggatatttgtgtgggtcttatttcccctactcagctggaactctttggaggcccgatacattctctgttgggatgttagagttggaagggatcttgagatatatctggctcagtaacttacattacaaatgaggaacctgtaagcccacacagctaattggcagtggagccctaatttcaactcatatttgcaggtttttatgcagagggtggcctcagtttgtgatacagtgaaatccagagatgtcttgaggttccatggccaatgtaggcacagatttggaccctgtgccttagatcgggggaagctaagagcctaaagagaagaaaaatctcctgagtagctgtgggtaaaagatagtgctgcagggcctgtcctggccgtggcaggcccctcttaggaggccctgtggcctcagcccctgttactcgagatgcttcctagaatccaaccatgatgctgtcagtactggtctggttatttattgctacataacaaatgaccccaaacttagtggcttagaataatatttattttgcccaccaattgcaatttgggtagggctcagcaaggaaagcttgtgtctgttccttgcagcatcagctgggggtagcttgaaagttatgggtgactcaatggctaggggctgaaatcatctgaaggcttacatgtatgacagttgatgctggcggtcagttgggactaaagctagggaacacctgcacgtcacctccacacttggcagcatgccttcatagcatgatatctgggttccaagagtaagaatcccaagagaacaaggcaaaaatgcgtggcattttaatgagctagcctcaaaagtcagatagtttgtcttctattgtgctgtattgattaagacagtaacaaagggctgcccaagttcaagagaaaggaagataatttccaccacctgctgagaggaatctcaacatctctttataagaaggtatgtggaatgggataggttgtggttcctgtctttggaaaatacagtctgccctctgattgcaacaattcacatctttcccagatgcaaaatacactcactctctcccctaaaatctcaggtcttctcttattcatggcatcagcttgaagtctattacaatggaatcttgtcaccaaaatcaggtacagatagggccgggtgcggtggctcatgcctctaatgccagcacttggggaggctgaggcaggcagatcgcttgagcccaggagtttgagaccagcctgggcaacatggaaaaaacccatctctacaaaaagtacaaaaattagctggatgtggtggtgcacacctgtagtcccagctactctggagattggggtgggaggatcacttgagcctgggaattcaagaccagcctgggcaacaacatagtgaaaccccctctctaccaaaaataaaaaagttggctgggtgtggtggtgcatgcctgtagccccagctcctctagaagctaaggcaggaggattcttgagcctgggagatggaggtagcagtgagccaagattgtactgcacttcagcttgggcatagactgaaaccctgtcttaaaaaaaaaaaaaaatcaggtctggatgtagatgagacttttggggcgcaggttcattccttgtgtgcagctccttaagtactgtttctcttgctgtgaagacctgtaacttaaagagaatgtatatctgctacccaaaagacactggtgggacaggcttagggtaaccactgaataggcttcttttcaaaaaggggaaaataagaggtacccagcagtcactggtttgatgtatttcttatattcagtgggacagctgttgctaattctttgactaggtgttgactcatttaccttgtctctagctgcaccctctgggcttttggttctgctctctgactcatcttttcttttccatagaagtagctcattattgcaggtgagtagtttctccatctgcttcatgcccataatatgttaagggcccaaagtcttttcttcattttgtactatctctgctctttttactccaagctgatacatttcctttaaaaacttcatgggttggctgggtgcggtggctgatgcctgtaatcccagcactttgggaggccgaggcgggtggatcacctgagatcaggagttcgagaccagcctgaccaacatggagaaaccccatctctactaaaaatacaaaaattagccgggcatggtggtgcacacctgtaatcccagctacttgggagcctgaggcaggagaatcccttgaacccaggaggcggaggttgtggtgagccgagatcacgccattgcactccagcctgggcaacaagagcaaaactctgtcccccaaaaaaaaaaaaaaaacttcatgggtttcttatgaatcattttataatccattataatagcaaaaggcacacatacaaatcacttcaagataagccccttggccaggtgcagtagctcatacctgtaatgcaagcactttgggaggctgaggtgggaggattgcttgcactcaggagttcgataccagcctgggcgacatagtgagaccccgcccccatctctacaaaaaaaaaattaatcaggcatggtagtgcatacctgtagtcccagctcctctggaggctgaggtgggaggatcgcttgagcctgggaggtcaaggctgcagtgagccatgatggagccactacactccagcctgggggccagactttgtttcaaagaaaaaaaaaaaaaggaagagataagcccctctccacttcgatttggatttcttgggagattgctatgggacaaaggtttttaagattcttaggagccttactgtcttcagagaggatttacaggacccactcataagattcttaggaggccttttgtctgtctgtctgttctatgaggcaacactttaagtaatttaaaaaaaaaaattttttttttgagacagggtctcactctgtcacccaggctggagtgcagtggtgtgatctcggctcactgcagcctctgccaaccaggttcaagtgattctcctgcctcagcctcccaagtagctgggattacaggcataagccactacatctggctaatttttgcatttttagtagagacggggttttgccatgttgaccaggctggtctcaaactcctgacctcaggtgatccacccgcctcagcctcccaaagtgctggaattataggcatgagccaccgtacctggccagtttttgggggcttaacaaagggtttttcagtctcactttagattttttttaaacagatttattgagggacaattaaagtacaataaattatataatttaaagtatacagtttgagttttcacacacacactcacacacacacacatactcaataaaaccatcaccacaatctggaagccatttctcttcttttctttttctgagatggagtttcgctcttgttgcccaggctggagcgcaatggcgcgatctcatctcactgcaacctccgcctcccgggttcaagtgattctcctgcctcagcctcccaagtagctgggattacagccatgcaccaccatgcctggctaattttgtatttttagtagagacagggtttctccatgttggtcaggctggtctcaaactcctgacctcaggtgatccgcccatctcagcctcccaaagtgctgggattacaggcgtgagcccccgtgcccagccaccacaatctggaagccatttcttaatttgagaatgttttcctgcctagaggtactggaagtgaaaaccagcaagccctttctcatttgtgattcctttaaattttaacaacgaaacagctccttcttagtttacctcttttctcttttttactgtaggcagctagagcaagtcagatggcaccttcagcactttgcctgcaaatctccttaggtagttcatcagatttattagctgtatttcctattatctatgttaccacagctgacaagcttttcaacactataagggttccttcttttctagcttctaatagcatttccttactctcctttatgcccctactgacagcccaaaagtcactgttttaagattttgtttcagtagcacctctcttgcaggcgccaaaatatattccagacatctactgccaaccacccacctcaaaaaaaaaatttaatggcataaaacaacatgttcttatgctcccagactccatggattaggaattcagtcagagcactgcagggatggcttgcccctgctccatgatgtctgccttggctaaaaagacttcaaggctggctgggcgcagtggctcacgcttgtaatcccagcactttgggaggctgaggcataaggatcacttgagcccaggagttcaagaccaggctgggcaacatagcaagaccctgtctctacaaaaactagtaataataataaaattagcccagtgtgctggaatgcacctgtgctcccagctactcatgaggctgaggcgggaggctcgcttgagcccaagaattccaggcttcagtgagctgagatcttgccactgcactgcagcctggcaacagagtgagacactgtctctcaaaaagaaaaaagtaaaagacttcaaggcttgtggtggggctcagtagctaggggctggtatcacctggagatgtcttaaccccacgtctgggggattctagctgttgctggggctttacctgggactggcagccagaacacctacatgtaccctttccacgtggcctgggcttgctcctagcatggtagacaggaattaggagctgctgatttttttaggcctgggcctgaaaagtagcaccacatcacttgtattgtatgctatcaatcaagcagtaacagagcccagatttaagaggaggggttattttgactggaggcatgtcaaagaatttggggaccacgttttaaaactaccacaagtgccattggcatggtttcctggaatcggatttgcctccctcttggctttgtctaatgcctggctctgctttatacagcagcccagtctttactggactagggcactggggatgttcctgtcagggatcagtaacctcagagggggcttctgcagtgtcagtattctctctgtgttcacttgccactgctccttagagagttcatcattccctcccggagaagagctcagcggtccacttggtgcttccttagaaatcagcttgggggcagacaggtgtggcttccatagattcttagatgtgctttctggaattgaaaaggcaactcaatttatgctgtgactctcactacctttcacgtaactctgacaagctgtagggacctggaaaatctctatagatggtggcctagatatagccccagttgggggctgaggctgccctggaccctgttgagggctcacaactgtttgagatgcttgctttgggagcaagaaagccaagttgtgagtatcaccctgtcctttggctttttctcaggacttttctggaatgggatgtctatgtcttgttactgggcaagtttctgctctaggctggggaacaaactcttggacttgctgactgaggcactcttcctcctttttctcctccacgctcaagagtatggctttagggtagcgcagtgagaatgccatccccagaattggggcagtcactgagtggcaggaggatggtgatgccaccaagccaacagggcccttagtagagaagcccgagaatgctgaatggccggccaccttccaggcagtttcatttgaagcaggctagacattgcttagtagggatggaagcattttggacactgagccctgtataaccttcacctgcagacaggctcacttcatggcactcataacactcatggcactcatggtacctctcaggctgtttccaggactactaggactttttcccaactagctccagcttagtcccttcttgttactaacacttgtagtagccctataaccagaaaaagcagagcaacttggagcatgccaagttcatcaaggactaaagacagccttccctccagaaaagttcctcggggcacctgacaatatatgaggcattccttagcacaaatgcttcttgtgttactgaagaggggcctgtgttactgaagaggggcctgtgtcactagcccagggattggggcgtgttcctgtgagacagtgccagagggaatatttattatgcactttaactctcactttctgtctatgtgcatgcgcacacatacacatgatgctttttcttttcttgtttcttttttttttttttttaatttttgagacaggatctcactttgttgcccaggctagagtgccatggtgtaaccatggctcactgtagccttgacctcctgggctcaaggatcctcctgcctcagcctcttgagtagctgggaccacgggggcatgccatcacacccagctaatttttaaattttttttttgtagagatagagttttaccatgttgcctaggctggtctccaactcctgggctcaagtgatcttcccaccttggcctctcaaattgttggaattagaggcatgagccaccatgtctggcccacaatactttttctttaaatttatttctctttccataccttagctcatattctttccatcctaattatgtgtcttacatatttgtgtgtgtgtgtgcatttatggtgctctgtttcttttaaatgtcctttgcattctcccctgctttcttttatctgttcatcttacttcatctctccttaaaatgttggttttggccagttgcatgctgcagtgttggcatccatgcctgtgttgagcagcagaactggctgcctgctgacaaggccacggcacaagtgcccagttctacagtgtctgcctcccaggggcatactctgggattgtagaataacagagagatgataagagcagtcttgggtgtctgatggctgctttgtatttacttttaaaaattatttattttacctttatggaatgatttatagtgttcaaacactgttagagatttgcgtcatcttagccacacagctggtgtgtgaggacactcagagtaagtgttgtctgtgtttaaagaacctgaggcacagagaacttagagggcttgcccatgagcacacccagaaagtgatgggaccaggacccagccagtgtgtagctttcgtgcctagtgggagagggcttcgggggctgacggcgatactgggctgcaccgagtgcttcgtgtacctttctctgttgttcttcagctcatacaccacaaagagaaaggcgaggaagtctgcagacaatgttgtgagcaggcatacaagaggcctaggtttttaactatttacattttcattcatttagtcattcaacacaaataataattccttttaagttctaggcactttgcagggggctatcaagattaacaagatactgttaccaccttcaggtgggctcactcatagtctagtaagggagaggaaacagtctggtgcaatgcagtgttatacatgccatcacagatgtctccccagtggaggcctctgcataggccatctctacctgaaagggggtagggtgtgaaagagctaagagttggatgtgcctaagggtgggatacaggattgataaggagggaaaacaatgtgggataatgaaggggaaagtaggcagggaccagctcatggggtcctcatcaacaatgccagtgaatttgcattttattctgtagatatgaggagtttcaagcatgatcagtttttcattttgggaaaatgtcagaagatgagaggatggatcaaaactgctttaacactgaaggcagaaagaggagttaagagaccaaagaagtagcagtagcagtagggatggggaggagggggacacatctgagagatgttaggaagtagaattgataggacatagtcatcaagtagatcaatgtgtttggggagagggctggatccagatgcttgaagcaggaggggaacaaactctgaccttttctcccccctctggaatgagtttctctagagcgttaagtgtagctagagaagtccaagcgctgggacgttccagtgttttgaggtctggacgaggaagaagaactagccaaggaaaccgactgagaagagcatttagtgagaaaagaagaaaaccatgaagagtgatgtcctgagacgctcaagaaacagggagtgatcaactgaagcgtaaagcagcatagggacgagactgtgagagcagacgtccagtgcaggcacatgggaaagtgggtgctagtataaggccagcccttttagacgggcgttgggtccccacctcttcgttgcctactcaagcgtgttattcctgcatttgtgccctctgtatctgcactgacaacctttccctctctactggatcattccaattacagtcacaaggttggcatggtggttcatgcctgcaatcccagcactttgggaggccaaggcaggaggatcactggaggccaggacttcaagacctatctgggcaacatagtgagacccccatctgtgaaaaaaaaaaaaaaattagctggacctggtggcatgaacctgtagtcccagctattcatgaggctaaggtgggaagatggcttgagcccaggatttttgggttacagtgagctatgtactccagcctgagcgacagagcaagaccctgtgagagagaggaaggagaggaagaagaggaaggagaggaagagaagaaagaatgaaagaaagaaaagaaaggagggagggaggaaggaaggagagagagagaaagagaaagaaagaaaaagagagagaaagatgcttccattatgccatattcttctccagctaccatcccatttctttgttccttttttaggaaaactctaaaagagttgtctgtactctgtctccactgcttctcctcccttttcttgaatttttccagtcgtgcttcccttcctacctctctaccaaaacctctcttcgtcaggtcacagtgacctccatgtttcaaatcatttctcagtccttctcttacttagttgttggcaggtttgactcagttgatcactccctgtttcttaagtgtctcaggacattgctcttcatgttttcttcttttctcactaaatcctcttctcaatcggtctccttggctagttcttcttccttgtccagaccccaacacactggaacgtcccagcacttggacttctctagctacacttacgctctagaggatcttatttggccacatggttttaaatatttctatataccactaatgactcccatattgaaatttataacccagactctattctaccagtgctcaggccaaatatcctgatgctgtcctagacttcccgtttgtgtctcactgctcatctaacccatcagcaaattgcattggcccagccctcaaagtagatccgtctctaccagtacccttctgatccgagtcatcataataatcgtttgtctggattgctgcagtggcattctaaatagtctccttgttgccacctttgtacccctgcctgtcatcctctgatgtgaagtcagattctgtcactgtcctgctcacatccactcaagagcttccttctcttgagagtgtaagcccaagtcttatcagtggcccatggggccttccataatgtggcttttggtgtctctcaggctcatctccagcccacacttcattgtttccctccactctggccacactggcctccttgttgcccctggaatacagtaggcatgcggttatctttgccctactgcactttctgtctggaacattcctcccctggatagacacattgctcacttcctttgggttgtgttcatgtgtcccctggcaagaggggcttccctgacctccctatgtaaaacagcaactcatctctactgctcatctctgatccctttccccttctttattcttctttattggcccccaaaccgtctcacagagttgatatgttacctgctcactctaaacaaataaggcaacttgatgtgtgtctaccagaatgtaacctatagaaaaagagactttgtctgtttttagtctctgctgatcctttttttttttcttttgagacaaggtctcactctggtctcactctgttgcccaggctggagtgcagtggtatgattgtggcttgctgcagccttgacctcccaggctctagcagtcctcccacctcagcctaaaatagtgcctggaatagacttggtgctcaatatatctggttgaatggatggagagccaaaatgtatctccggcctggtggggttgcacactgtggtcttggtgataggtggcttccttcgttcagatgcagagaaggctagcaaggagctggcctaggaaccatgaagaagtgaagctagagactgtcagtggctttgctcccatggtggcatccgaaggcaggccctgcccttctcttggccgtggtctcctcttgtccaacaggggagaatgatcttactttccctccgagtctcagtttgaggaactaggaaacaactagacagagaggaactgaagcccaggaatgagcactctctcccatccatgccaggggatgacacctgctgtgcaaactctttgtcacgaggatctagacatcctgacacctggctcccattgtgtccctcctgaagcctccctagtgttccctctctaggtgagactctcctgaccctccttcagcctgggagcaaagactggtggaagctgattcttagggtggctgaactagctccacttccagggggtgcccccataagagcatcagagcctgtagtagtgagagagagatccaatccagacatcatggaagctaagctggcctgtggggaagtggggaaggaaggccagggcagtggctctgcattgggatgggatgggccaatgatacgcaggcgtggcctttcccacctgcatctttttactgctgccgtggagcaaatcaccccaaaacttagtggcttaacacagttgattgtttctcacatttctgtgggttttctggtggttctctgctggtttcccctgggcgcactcatgtagctgtgtccggctgggtctgggtccaaggtggcctcattcatgagtcaggcagttgtaggctggctattgacagaggtgcctcggtcacattccatgggacctctcgtcctctaaaagactagactggcttccttatgtgacggtgtcagggcagcattccaggtgggtaaagggagaaactacaaggcctcttgaggcctcaagtttagaatttgaacaatttcaatttccactgccacattgtattatactcaaagcaaatcaccgagatcaaccaagattcgagtgacggagcaatagactccacctttccatagcctgagctgctgagaattcatggtcatatttgatttactccccgccctcccgcccccctgccccgacagcgttcaggatccattgacagtggcaaactgaccaaatttcccaggtgattactctgaagagccagccccttgtgaatatgagtaattatcaagctaagatggaacactgtgtgttaggccccaagctcaatgcgcgacaggtactatttctcacagggattctctgagatatgtgatctttcttttttttttttttttttttgagactcttgttttcactcttgctgcccaggccggagtgcaatggcgtgatctcggctcactgcaacctccgcctcctgggttcaagtgattctcctgcctcagcctcccgagtcactgcaattacagttgcctgccaccacgcccagctaatttttgttatttttagtagagactgggtttcgccatgttggccaggctggtcttgaactcctgacctcaggtcatccatctgtctcagcctcccaaagtgccgggattacaggcgtgagccactgcacctggccgagatacgtgatcttccaacacccattttagagttaaggaaactgaggcttagggagagaagattacttgctcaaagtcatgaagcttataagtggctacactgaaacttgaaccccaaggctgtgatgttcttaccctctcttgagactgactggctagccataacctgataaaaaaaaaaaacagtactaatgataatgagcattttgcatccatggtctcattggctcaatatgacaaccctgcgatgtaaaatggaacagttttgaagaaatgaaactggatgttcagagtgtgagtccattgctaataagaggtagaatcagaaacatgcagacagataacagagaattctaccctcaagtgagaatgtcaccccaggagggcagggccttatctttattgtttaccagaccttggaatgagtgactggtgccttctctgtgatatggggcttcaggtcagcacaggcaggttcctctgtggtacagtgcactgggcctggcctgtgtggggaggctggggcaagggtagcacgtgaagccgtgggtcccaggtcagcagtgacaccaaagacaggaccttcagaggaaagggccagtctactctctattttatgctgcatgagaggggagaaatgaaacctcagttgaagcagggtaggcattgagagaaagttcttaacctgtgaggatttattcgtgctggagccactaagggaagttatagaatcactctttctgaaagcatgctgggatcagatggaccagaggacctgaatcattttcctatcccaaggagccatgccccacactaccataagtaacagtggttccatggactggtgaattctctcctgggccgctggggagacacagccctagggaaccacatatcaaagtgcctgagcaggtgaggcatgtatagtttaaaaaggcttcccaagagattgtgagtctcattaggtgcctgccatctcccagtagaatataagcttcacgaggacatgaatttatgtctgtgttgtttattcttgtatctagcacctagaacaggcctagcacagagtaggtgctcactaagtatttgtcgaatgaataaacaaatgaaattgtcctctgtcaaatgcatcttcagttgagaactaaaacagagtcctttgtgtagcacagacactcattcacttaggggctagactgatgaccttttgtatttatggttctataaaataagagagacctaaggcctccatgaactgtgaggaagttgggatctccccccgcctcaagcctggcgacttgccctgccgctccctaccccagggagtgcggaggcttactctgttcacacctcctcactgagcagagcctctttggtcattggcttggcttggcactgaatttctctcatctgtgcccatatacacatgggatggctcttgtttgacttgccctttgaaaaacaacttaagcatgttgaggtttcctgttgattgggggcagccagaggcctgtgacccagcagggaattgtcagccaatccctgactcacccaaactccagttttctgtgtgtgagcgagcagtgacagcagcctggctcaggggcagctggctgccttcctgtggatagcatggcattccggagcctgagaggctgggcagcccagagctgagggccacggccttagggtcaggtaggccttgtgctgtgcagtgttggcaaatcctgctgtttttgaactgaaactgtttggaaagaattctgaaagttgacagtggttactctagtagacaagtagaaaagtgtgcccaagaggaagtatgctcatggtgctcttcaataagctcacctttcccttccttttgccttcatcattcaccgagcaccttccagacactatttgtttgtccctgggcctagaagaaaccatggtctagtagggaagaccaagaagtcccttgatacttacaagtgctgtggcaggggtgtgctgagtgctgtggggatttctcttgagttgcctcagggccctggcagttcagaaagtggcagaggcactgcttcctcttcagagagtcagcccagtgtagtggaagttcacgtcctggtttcacttaccagctgagtgacctcggatgagatattaaacctttctgtgccttagtgttttttatttgtaaaatgaagataataaacatgataacctcatagacttttcaggaagattaaatgagttaacatatgtaaaaacatttattcagaagtgttccttgtagttgccaagatctgcatatggatttggagctgggacatggtagatgccaattattggatgtgatgccactgctggagggtggagctgcctaaggagttggcctccccaccccattggcttcctcaatgatagagtggaaaagactctttcctgaggggcgcttctgacctgtctgaggccctcagggattctaattctggtcagaacccaacatgaagaagtgagatgttatgtctagtagcagaagtcccaggggagacagaggcttgttaaagggaaagatcaaagggtctgagtgtatttgggggccacttcagggagtagtgttcaagaaccaccttgcaccagttcacaagagctgattagtggcatctcttctcaactccacagccagtgacgtcacattggtagctcagccatagttggaatatttatactaccaaagttggcaagtgctaccaatctgctgttgcccctagagagccggttgttcagacttgtttggttttggggtttttggtccctttttccctctttttaccatacacagagtctcactatgttgcccaggctggtcttgaactgctgggctcaagcgatcctcttgcctctgcctctctaagtgctgggattacaggcatgagccaccacaccttctgagaactggttgttaagcatgtggcagcacaccactgggctttctgtcctcttactggcagatgttagactcttgggatgctctcgcttggcacagaacaggtgtctgtttcagacattactcagggtgcctggggatggtttgggcagagaggcctgttgagtttggcctgctgtgattaaggagctattgctctccttgaagacagccttcaaggtatattacttgaatagaatactctttgagagtcctccaggaaaaagatgctgagttctgtaagaataaaacaggatgccactggttggtcagccactcactgccattttcttttcttttcctttgttttgttttgcccccaggtctcagtcagtctctccacctccagttctctccccaccaaggagtcccatctacccgctcagtgatagtgaaacctcagcctgcaggtaccccagccactccagctcccgggtgctcctcaaggaccggcaccccccagctccttcaccccagaatcctcaagatccctccccagatacttccccacccacctgtcccttcaagaccgccagcttcggttatttggacagaagcccttcggcgtgcaagagagacgcccaaaaggaaagtgtccaaggcgcagcccaggatgtagcaggggtcgctgcctgcctcccccttgcccagagcacgccattcccggggccagcagctggcccccggggcgtcttgctgacccgtaccggtacccgcgcccacagcctgggcatccgggagaagatatcagcatgggaaggtcgccgagaggcgtcgcccaggatgagcatgtgtggagagaagcgggagggctctgggagcgagtgggcggccagtgagggctgccccagcctgggctgtcccagcgtggtgccgtccccctgcagctctgaaaagacctttgatttcaagggcctccggaggatgagcaggaccttctccgagtgttcctacccagagactgaggaggagggagaggcgctccctgtccgggactctttctaccggctggagaaacggctgggccggagtgagcccagcgccttcctcagggggcatggcagcaggaaggagagctcagcagtgctgagccggatccagaaaattgaacaggtcctgaaggagcagccgggccgggggctcccccagctccccagcagctgctacagcgtggaccgggggaaaaggaagactggaaccttgggctccttggaggagccggcagggggcgcgagtgtgagcgctggcagccgggcagtcggagtggctggtgttgcgggggaggcgggcccacccccagagagggaaggcagtggttccactaagcccgggacccctggaaatagccctagctcccagcggctgccatcgaagagttccctcgatcccgctgtgaaccctgtccccaaacccaagcgcacctttgaatacgaggctgagaagaaccccaagagtaagcccagtaatggtctacctccttcacccacacctgctgctccacctcccttgccctccaccccagccccgccagtcacccggagacccaagaaggacatgcgtggtcaccgcaagtcccagagcaggtaatgcatgcccctccggtgtgttgtagctgaataccgtggctttcttttaaatggacagtgcaaacacagattgtaggatgggtcgcagtcattagtgcttcgtaagctctgaagtgctgaataattgttaggtggtagttgtggtagtgaaaaatgagattgttctgctcttacaagatacttggacatgagtgggaatgcttacaggatacttgggacctgagtgctggtcactgaaggtattggctgggtttggcctttggggtagagctgggctgtgtcctgcccctgttgtagcttcctcagtcttctgttgggagtaggtaaagcaggcagtcctttgcggagtagtaggatcttagcctccctaccacctgaagtaccagcattagaaattaatttctttgaatgaagcattatctgaatactgcattttatcattaacatggtagtgtcggcaaatttaacacaattccttctctcctgaaggcctcctggccatatacgaaccctgggcctatatcaagaggggattattgggaagattgatgaaaaaaggagtaaaacaggaatgagcctgttccgaggctcacgttggtttcctggtcagtctcaggatttctaaccccagattaccaagggctgtctccccggtaacttggagctggagctattggaattggtgaaagctggcaggcgtcttgttctctgaatcagggtaggctgggagtgagcttccttgggaatacttatcctcctacaccttactgccattctcatctaaccccacgactgatgggtattcaggtttgtttcacttctggggattctttagtttgtccccacacttcaggcttcatctaacatatcccatctcatatataaactttcctgccatgtgcagaaaggaagaaatttcaaagattcagacccccgagccggaacagcccgtggctaagggtaatcccgtgtttgagtccaccccagaatgctcactggctctttaattcttaaacggcctgccaagagtgtttgctttgtccttgttcatccatttctataaacattcttctagagcctgctgtgcaccaagattgtgctggtcaagaggatgcagaggcaaataggacatggttcttccattcaaggacttcgtggtctggtgcacagataaatcatagataatgtcatacgtgccatgactcatggcagtgcaggaggccgcagagacccagagaaggggcatctgagttagatgggggagagaagggaggctcctcatagagggagttgctgagctaaatttagaagagccaaaagcagttggctaggtgaccaaagggagtggggggagagttcatcagcctgaaggttttacacatattccaccccacactgcatttatatataatatatacacacgtataccatatatggaggagtcccttcatgtaagaattaacttagcaaacttaaatctgtgctcttggaaaaagagaaacagttccagaagtgcagtctgttctgtatgccatttcacacagtgaacatgttccatgaggagtagagatggtaagtttgtgtctgttataccaagtgtgattcttatatttaatatacttttttattttaaaaaaaatgcagtccaggtgaggtggcttacacctgtaattccagcactttgggaggctaaagtgggaggatcatttaagaccaggagttcgagacagcctgggcaacataatgagacctcatctctacaaaaaatttaaaaaattagctggagtgttggcatgtgcctgcagtctcagctacttgggaggctgaggagggaggatagcttgagcccaggaggttgagggtacagcgagtatgatcacaccactgcactctagcctgggcaacagcacaagaccttgtctctcaaaaaaatttgcgtgtgtgtgtgtgtgtgtgtgtgtgtgtgtgtgtttgtgtaaaatgcaagccaagccaaatgtttcttctggcattcagccaaaaaaaaaaaaaaaaaacctggggagaaactattagttttaatgagagacagcatgttggtcctcagtgtgacaccttcctgggggattttcaaggataatttgactgaacatgatttgtgtcttatttactgacttgagggctacctgcatacgatgctgagtctactgtatatgccaaagaaaacttgctctcacactaactctggtcctgggccaacatttgcgaaccactgtgctcagccattggatgtttaactagttgagaatctctgggccaaagacagaaatctgggagtcatcaagatagagatggtagatatggcaatggcccatggatatttggtccctagaaagtgcagagtgagaaagagtttttaagacagaactctgagagacccggacacttaaaaggcaaatggaaaaggagaacccctcacaagagtctgaaaagtagtggccagagagttagttgaaagccaggagggaatgtgtcacagaggcacacggaggagatgtcaatataaagagtgttcggttgtgttgagtgcttggggcggggcaggggcaggcaagctaagaacaagctgtagccttcaggacacttttagccctttacctacaccctaggactctcaggagaagctgttagtaaacaagagaaaaagggctttattggctgaaaggtctgatggtgccccaaagaagagggaggtgttcatgggtgggaggagggatccagtcagtgcctttccttctttccctccccaggagcctgcggggacttgccttggagagggagagggtacagttggggtctcagatgagggacgtacctctctcatgaaggagaggggcagagagtgctgtaggctcagggtgtcttaggagacaacaagctgtggtcttgaaattatacagtagagaggaaggttgtccaaaggatggaaaggagcaagctagctgaagggaagcttggtcttggaagcagcttctggctgcaaattgtcctcccagctccaccttggcagtggtcttatttgttttaagggctcagcccttcctgcttcaacaaaccacccagcaacaactgcttttccaaccccctgacagccctgagtgggaccctcccagtgttgagccttcctacctgcttagtgcagtggcaggagtccccagctaggatgcagatgaggatgtgagactccagaggcagaccaggcactcaattccagtggaatcacagacacttctcaaggaggatattctctagggctcaaggccaaaattatagttaagagctcaggccctggagtgagacgtcgcctgggagaatcatgcctctgtcacttccatctcctctttcacaagatgtcccaatactggtggcactgttgtgaagattaatgagataacacatgtaaaggtggatttgacgcagcacctggaacagcatgcttttaagctggggtagttgttatctaatagcggtattattcaggataaggcacattgcaggcacccaggctggggcctttcagaccatctgtctcttcatttggatggtaagtttggacccaccttgatgctctttcagaagctgcctttgtaaggagggcctatggtctttgctgttgccatggacattccccagcaaggcagcagagatctgattcagcaggaatgactcttgctcttgttatccacagaaaatcctttgagtttgaggatgcatccagtctccagtccctgtacccctcttctcccactgagaatggtactgagaaccaacccaagtttggatccaaaagcactttagaagaaaatgcctatgaagatattgtgggtaagcaatggcagaggtggcacctgggtcatctcagggggctgcagaagaacaggaacaggaggagacacctagattgacctccttcactgtgggcaggcatggtcccaccttctggaactcctcctggaatgggacatcaggggaagcaccttagcttagacagagtggctttgtgattaaaagcctggctcttgaatgaactgaaatccaaaggacctttggggacacgagaaggagaaaacaacatcattcctttcctttatttttggaaggctttgaagtccaacaggccctcttccttagctgtgtgcccttaaggcaaatcacttaacttttgtgaagactctgtttttctcttataacatgatgatgtgactatattaacaacaacaataatagtaataatatttcgagccgggcatggtggctcgtgcctgtaattccagcactttgggaggccgaggctggtggatcacctaaggtcaggagttcgagaccagcctccatctctactaaaaatacaaaaaattagctgagcatggtggcaggcacctgtaatcccagctactagggaggctgaggcaggagaattgcttgaacccgggaggcagaggttgcagtgagctgagatcgtgccattgcactcctgcctgggcaacatgagtgaaactccgtctcaaaaaaaaaaaaaaaagtaataatatttcataaggttattgttagaattaaataagattgagtgtctggtgcaggcctgctacctggtcagagatggccatcttctttctgtgttcttacatggtggaaggggcggagggagttctctggggtctcttttaaaagggccctaattggtgaaggccctgcactcatgacctaatcacctcccagaggcctcacctgtgtttccacataggaattttgggggacagaaacattcagtctattgtacaagctaacacatttcattgccccagtttcatggtgctggcagaagacacgagacccctgggtcgcaaaggactttattacttatggcacagtaggcagcatgagcttcgtgttcacacgggtttccccttgtgcctaagtcccatggggcggtgtggagaaggcccaggtggaagctgcacacactgcaggtccatgtcccagctggggagcccaagcgtaggaaaccccagtcttttcagagactgctggcaaacctgcctaactttgtccttggaggagacattatctttatcactctggtcaggaaacaaatctgcctctgccctgaagggagacactatctctgtcttccaaggctgtttgctgtataaataccctttaaaatacagtctggaactgtcagttcctcttgttcagaagaagggcagaaatgcgagactccattgggatttgtcttccaacaggtgggaagacatggtattggcaaacttgtgttcacagatcagatgaaagatagaatgctctagcctgggttgcatttgttttgttttttggcgttcatttcaattctattagcatcctcatcagtaaggggctttgattctgcccaagtgaagtgtgcgtgtcagtgtaggtcagtgaggaggagagaggctgtgtgctgcctgcttgctggctccctctctatgtccctgtcttgcctctgtcttgggccttgaatctgaagaatgtggtgttagttaatacatgagagagagaagtggcccagggtagagggaaacctccagattatcagaagcctggaatcttttttttttttttgagacggagtctcgctctgtcacccaggctggagtgcagtggtgcgatctcggctcactgcaagctccgcatcccgggttcatgccattcttctgcctcagccttcccagcagctgggactacaggtgcccaccaccacacctggctaatttttttgtatttttagtagagacagggtttcaccgtgttagccaggatggtctcgatctcctggcttcatgatccgcctgcctcggtctcccaaagttctgggattataggcgtgagccagaagcctggaatcttatgaagagagggccatctgttccctcatttgatctgagccattggtttcacagccgtttccttaccacttgctgggccattgtttctggggagacagcagccatgctgggatgtgcagggacactgctttcccaggaacagagcgtatagtatgtagccatgcaaaactgggtcacagcaggaagactgtgggaatgaggtccctagaaccgcaaaagagtttggggagggaggccctttcccttaccactggggaaaagacagctttgtacctataggccacccagagcagaggtcaagagctaggggcatcagaacaaaagatccagaagccaggtgggcagttaaggaagatgccccaactgcagcccataccccagttctactcagccacccaagaggcagccaatgctgttcctgtatttctcacctccttatgcaagactaacatcccagagtggaagaaagtcctcccggatgagtgagtaggcagaggcctagaaacacttgccctcctctttcccttctctcaaacctgacctaagaaggcctggggaacagctgtgttgcccagaacagttcttccaaaattctgccccccaaacattgccccaaaaaatcctgaacagagccctggatggtggaactctggacagagagaaatggttgaagccgtccctttctcaaattatttcagttcagatgatccaagaacgtatccccacaggaaatccttgtcagataatagagaatgggaggaccacaggattgccagcacccagcatagtcaagggacatcagaaaaacacagccctctctgcccacggcagcagccacactgggtgctcccagggtcctgggcagcaaactgacacattgcagtttctgccaaactagaatgtaccctgcaacaggaggtagggagggggtggggcaacagagctgcctccccactcattagggaggactctcttccactctgggtgttgcatgaggagttaaaaaaaatatgggagcaccttggctgcctcttgggtggctgagtacagctaggggtcagcgctgtgtgggcagaaggtagaggtagctgctcacctggcttctggatctttggagcacttagagaacagggaaagaagagagggggaggatgcaggagaaagggaggggagcgacccaggcaccagtttgggaatatactgcatcggatgtttaggttttgctttggcctcgtggggtggtgggggtggtttccggagtctgcagttaggacagtgccctgtgcgtgttttccctttttatgtccccatagcagcccaatctgaatttctgggacctgactagggaggccagagggaaatacagaggaaaatactctctttctgttagattctggtgggtttccttttccttccctggggacaggcccgagagtttggagctccccacaaggcttcagggggtgtcttattgctgaactcagaatggcagtttcccgtcttgcttaggactgatcagtggctcggacttcctgggagccgtctctctggtcttggcccagcctgtgctctgtggggtgaaggatgactctgaccccgctggatcaggctcctgcaggcatgcaggaatggagctgttgggaggcagagagcctagtgctcatctccatcttgggtcctggtgattggactggagtcctgtctgtcataggtggagggccagttggccccaagacaaacatgtctgtctgtgaacagtggactcgaatgggggttgtggagggtttgctggcctcctgcctacactaggcatgatgcctgaggagctggggtggggtactcccaaacatactgaggtttaccttgctaacttgcagaaaaggagttcggaaagaaagttactgccttgctgcttccagggctgctatttcccgcctgtcccatctcacatctgcccctggaagatgctgctattctacaaggccttatgtttgcattctgagcctgacacttaaaaatgcacccaaggaagcagcttgttaaggaattatgtggagtggcctcggcgcctgagctgcattcctgcagattcccactcccatcagctagcctgggctgagggagcgtttccaggaacttcagtgggatgcaagccggggaccgggccagtcagcctggactgcaaagtcttttgagcctccactctctctggttgcttcccttatttgcccccaggctgggaaacagtaaggagcagagggcacccactgggatggaggttgcagtgggaaacaaaacagccaagaggtgcagcccagggaaggtgccggggctgtcgagaaatggtgtcaaggcttggagggtgggcaacagccagccccttagaggccccagtctgatctgttgccagggagttgggctcttatcctggccctttctgtcctgtgtgagagagggaaaaaggctgagaaccaggagaaacagctggttggaaccggaggttgttggggagggaagctgcagacccaggaccctagtaatgggtgtggtccaggaagcttaggactgtgtttggagaaattctcagtgcctgtgcgtatacacacacccctttcctaactggtttttccagttaggttggggctgggggagtgcagtatgtgtggttaagaccaaaggagttatggggaggagtgaaaggttgtggagaggagtgggaggttgtagggaggagtgggaggttgtggggaggagtgggagcagggcccagaggggctggattcttcctttaagaggatttgtgtgacacctttgggctctgataatccccttttagaagagtgcaaagcagaaattctcggtgatgccttttgtcccttatttcatcatccaagctgggaaaggttgagacctctggcttctccagctgggcttgctgagggccaggccttcagggaagagggtccacctcttcgtccctctccaagggtcatgtggactgtcccaagaaagctgtgtgggcaggaatgcaggtagaaatttgcagtctgccaggctccctgtctcccattcatgcccctgctgaatctcccattcagccttagctcctttagctctgtcctccctaggatgttctgcacaccatttcccagcctaccgtctcctccaactctgagccattcctttgatacttatttgctctcagctggttcagtttagtggtccaggactcagggtccacttgtctctgtacatctccatcccctggtcccctgtccacctggagagatgactgggagaatctatttgagacagctcctccggggcagtcaggaatggtccaggaagctgagagatgagttagggcagtgaagggaccaagctgaggctggggaggcagcgtgtgggctgcagccagccgtctatttgctggagaactgattagtggctttgttacattagacaggatgttaaacattgctggagaagagaggctggcacaaggggctggggaggagcaggccttcctgaaattgagtttccagagacaggacctatcttgagaacctgatgttgctggctgttttcccctgggttgtcagtgatgtgcaccaggcttgtacatctattacttccctgggcctcagtatcctatgtctttttcttggagctttggattttgtatcaatattcaaagctcttactgtagggaaaagaaggaaggaaggagggagtgaggtgaaggagggaaggatggaaaaaaaagagggctagtcttgggactcatgtcacactcagaagccattggaagtttagaaagctctatctaaagcagtggttctcagttgggggacaacttcactcttccctccctccattcctgcctccctccctctctctccctccttccctctgtccgtcccagagagcatctggcagtgtctggagacatttttggctgttatagctaaggagatgctaatgtctcctggtggatagaagccaaggttgccactaaacatcctaaaaatggacaggacagtctaccacaacaagaattattcaaccccaaatgtcagtggcttggagaaacccctgggattgggacaaggcttcctataggttggggatgacaataaaggccctggctgatcatgcagtccaaggcagtttcgatttgttgagcttggcataaatgttctccctgccgtgatgtggacagtgatgctctggtcctgttttaggggatcagaagactgtgtcctggcattctcccttcttagttcccccacctcctcactcctgcagggcatatgttggggaaggatcaagaagtagagaatccatccccaacacctccctaagtgccccacagtggggtaggctggagaaaacatgcagggggtgccgggtttgctatttggcttcttgcgacagggctgctgggccagctccgcttagtcagggctctggaatggagacaagtcattttaatagcatgactgtgttacaggaaaaggtctgttccattgctggggactctgcttggagttgggaatcacttaatccagtcccaaatcccagtgacccatctttgactcataagtttacagagatttatattgctcccactgcagtctatttagctgtcactgaaatccctccttcacacccacaccctaactctgttagagcatttcctaaattcgttgtggttctgcataagtagatgccacaatgtggagggagctccactttggaaatggaggaatctgcaagcatatagggattggctcttctcccgtgtcctctctaggaaagcttcactctcagcagcctttgttcctcgtcctccagctccttcttctgcctgcttcctgaggagtggggtctgagttcctctggggcgtaaggcacattcagacatctgtagaacaagtgtgggactcagtggcacccaggctcaatcctgctgctgagcagaggtgctggagtgagtcctgctctgcagcaggaaaatagggaaaggggtgcagagagggctgtgttctgagttccccagggacctgttcaccccacggattctgccaccaggattgagctaggactgacccggcccatggtgttactctattttagaaaatgtgtgtgttggaggggtgggggcaggagatacagcttgtggaaaggagtgccactcaacatcttcaagggcagggattctgttttggacttttctgagattttctggtaatgccaatacaatgcccgctgccagagattttagaactagtcctgagaagcaagaactcccctcacccccaccctttggcccagactccttccaagcctttcacacctcccctgtgtcacagcaggagagtttgttccaaaaggggagtgttgatggttctctttttgctgagatcagcggtagagggaatagacactacagtaggagagtcatcgaacagatcattactgaacacttcctccttgctaatcactgttccgttccgaggttgcctcagtgaacaacacaaaaccctgccctaaaagacttgttgaacggcatcgtaggtgagaagggggcctggcgaagccctgctccctacggttctgtgagttcctccatgcccaccctccaaagtaggtccccagggagatcccctgagagttgggtgaagggacagccatgtgacctgaaaacccttcctaccttgaactgtgttatctctggggtgtttgcagcagagggaagggagccaaggaaagactcttgttgctggctttgtcctctggctgggcacaggcaggggtggctgagccagtcttgtgcaatccctgaatttataaagcagaggccaggctgagctgggctgggggtggggggttggggggggtgggggggtgggggggtgggctctgcttctggacttggagccaggatctgtttgtagcctccccactgcagacgggcagctgcatgactcatgagctgaggggccaggcagaagccattctctttggttcacaggaattctgcttgtttatttgtgtgtgtgtgagttcgtgtgtttccttcttcccttctcccccttctctaactcttcctcctctgcaggagatctgcccaaggagaatccatatgaggatgtggacttaaagagccgaagagcaggacgaaaatcccagcaactgtctgagaactccttggactctttgcacaggatgtggagtcctcaggacaggaagtacaacagcccgcccacacaggtaactcagccctgacatcggcctgtagggttagcgtgagggccacagtgggggcctgctcttccaagacttgggcccagcttccactcaggcttttaccctcactagtacttgataaagggtctacggccataccaccctgaacgtgcccgatctcgtctgataaaggaggtctcctcagcaaaggactgtgcactcaaggatgtccaccatgttgaaacctctgtggacaattggcacctgctctgaggggcatcctgtcctatcttctttcccttcctacacaagctctgagctgcaaaactcagccaggagcccttgcagtctcctctctgattatttatcaccctgtgggaaacaggaagacagggccctagtgggagtcttggcattctgcaactctgccagaagtcatctcagtactggcattagggggctaggtgtaggtccccaaaccacatttggagagccagacaggtgtctgtgacacctggagccagtcctgtgggagagagtaagcatgaatctttaaggaatggatggggagaaggcagaatgacaggaaaggtgaaaagccaaaggaagctcttggacttcagctccttctgtccttgtccaggatgtcaggaggcaggtggagaggcttctctgacctccccaggtaactctaattctctttgcaaatggaaggacctggatattatatagcattggccagataatataaaatgataatataaaaatgatttcttctgcctttggaataaggtgtttgtttttataaaagatttaccccatagctgggagtggtggctcacgcatgtaatcctagcactttgggaggccaaggtgggcagatcatctgaggtcaggagttcaagaccagcctggccagtgaaacctcatctctactaaaaatacaaacattagctgggcatgatggcgcacgcctgtagtcccagctgcttgggaggctgaggcaggataattgcttgaactcggaagacggaggttgcagtaagccaagatcgctccactgcactcctacctgggcgacacagcgagactccgtctcaaaaaaaaaaaaaaagatttaccctctaattaggactcttttcaaacaggcttcccctgagtttgcattgccagattgattgggtgagaacaggaaattgggggctgtggaggaaggaggatttgctgaggagtgaggagaggcaattccagaaccagacagtggttgggtgtctgtgggatacttgcctcctgacagggtccgcgacaaggatggtgccctgggatgagaggtcagcgcatatggagagaggcagagagtagatcagggctggggagagggcagccagggccttgtgggtatgggatccaattcagtgtgaggcctgcctggcccagctttggtggtcagagcccagagcccctgtgttctccatgggagcagttaggagggccaggctgcaggatctcccagcccagcaggctggccagtaggttatggcctctgctgtcagaaaccttttaggattggctcgggagcagaggtccggaagactggttccatcacccaggcccagtaattcttgtcccatagctcaggaggacccccgcaaaattcccacttagtcttctttttccactcagatgagagcacaggtgtttttagcctctgctttcgttttttgctggcagtagtgaagcttcctttagggaaggcaagtatctaatctatccctgacctggctgattagcagctaaagtcttaagagagggatggaagttccagggcaagatggcggggatccagggatgccggcccttggcctctgtgtccccatcccagcagacagacactggccaaggcctctgtggcaagcccctctcgcacgtcctctcccccacgccagctttccctgaaacccaacagccagtccctgcgcagtgggaactggtcagaaaggaagagccaccggctgccacgattacccaagaggcacagccatgacgacatgctgctgctggctcagctgagtctgccgtcctcaccctccagcctcaatgaagacagcctcagcaccaccagcgagctgctgtccagccgccgggcccgccgcattcccaaggtaccctccccagaggcagcccactggagccgggcaggtgggcgggcaggcagccagcctttctctctctttcctggcttccttccttccctaatctggactgcttcctcgattccctttgaataaattctgggtccgtgcactggcctctttttcatctgattaattcccctttcttatcaataaagatgcattaactgaccttggtgctcagatgttagaggaaggaaagtctagccgaggttccccattagtaagtgtggtgtatgaattttggggtatccgcacacataagcatttccaggctttcaaggacctaggactcaaacaagggttcttcctataactctcagcattgaagaattttcagcaatgattttcacacataggcagccaggcccaaatccccagcccaacgcagcaggatttagccagatggtatttttaacctgcaaacaatgcttgggtatattgggaatttagcttcttcctgtcggggccccaggttatggcccagaggggaaaggctagaatccttgttcctgttattgcatctcagaggctctttgtctcagttggttcaatgactcttgggacccaggagctaccatcctgtctagtttgatcacagttccttcctctggggagctaagtttagtgtccttgtcttggggcaggagaccactcctgggggactaggtatatggagagctaccatgcatggctggtgagtcaccacttgaggtcggttctgcagttagaccagtcctggacccagcgggtgcaatgcagaaagcttgtaccattaagggcagggatgggctcctactcagccttcttggaagtagggcagctggtgttaaggttacctcacccatcctgcttttctcacccagcttgtccaaagaattaactccatctacaatgccaagagaggaaagaagagattaaaaaagttgtctatgtccagcattgaaacagcatcactgagaggtaggctttggtgccagagctggttcagctgtttggggcccttgggcattaggaacgggagaggcatcaatttacctgtggagggtagagccctgccaggaaatggccacataggagggaggagcagacagggaagaaaggtctgggatgggttccttcagactttgggctgtgaggccctgagcagggaggtgggtgtgggaatcggcttctgcaaaaggaaaggccagactcactgagcattgcggtctgtttcccatttcaaatcttgacctcctggaggcagggtccatcttttccaggcctgtaggcccctcttctggctcagcctccaactcaggccctcagcttccctcatgggtttgaatataggattcgcagtgtgagctctgaaggagcctggccccaggccactcagctccctgcctgcagatgcctgaccatgggcccagagtagcccagagaaggtagagatccatcccctgtgagaaaagctggggtggtgggggagcaaaaaacattggctgtgaggtccagcaagtatgtactctgctgttccttttccagatgaaaacagtgagagcgagagcgactctgatgacaggttcaaaggtgaggcacagctcccatgagtacggaagctctcccagcagggctgcagggaatcagccttcccttccgatgcatgtgtggttccagtgtccctaaccggcctgatgtggagaggtgacagacaggccagataccagaacaatagagcagggagccacagggaagtctgtccttatagacatgtgagctcagccctgcaaggttaaatccagatgtctccctttgccaaatgtaagggtggtgacctgcccaaactgtcccaagccattgtccatgggagttgggtgctagatttgcctggtaaatgttgtagatctcagccgggcgcggtggctcatgcctgtaatcccagcactttgggaggccaaggcgggcagatcacgaggtcaggagttcgagaccagcctggctaagatggtgaaaccccatctctactaaaataatacaaaaattagccaggcacggtggcgggcgcgtgtaataccagctacttgggaggctgaggcaggagaatcacttgaacccgggaggcggaggttgtagtgagctgagatcatgccactgcactctagcctgggcgacagagcaagactctgtctcaaaaaaaaaattgtagatctggagggtcagagaggggtacagaagattacaaggacctcttctggcaagaaatgtgccgtagactgaggaaactgtttctctggaggccctgcagtcccccatctcccctgtccccagagaggagcttgaaaaggttctggaaccttcacattccagggtccttggataaatctttgtgctttctctactgggaaaccctgcctaggccttcctggatgattatcctctcatccccaggcaaatgggcaagtggactttggatgtaggagcatggtcctgctaggggcccaaggatgaagccttcgtggatgttcgtgtattctagtccttttggtacagggacagagtgggtgccaagatacatccctgggtttgcctggcctcggcagtcctcctgccccagctcagtctccagaggctccaggaggaccaggcccgcagcttcctgtgtcagggcagagtctttgtgcaggggtcagcaccttgtgcctgccggtcctcctgcactgtgagctggggatggtatcagactaggctcacgtacttaaaagtgctccacagcaatggagccctgagccaggggtagaggagttaacatgaggcctgtgagggtccattccctgatgtgcaacctgcctccagcccacacacagcgcctggtccacatccagtcgatgctgaagcgcgcccccagctatcgcacgctggagctggagctgctggagtggcaggagcgggagctttttgagtactttgtggtggtgtccctcaagaagaagccatcgcgaaacacctacctccccgaagtctcctaccagtttcccaaggtgaggccttctctctccccaccttgcccatattccccctcttccatcctctatccgccaggcctatctggggaaggagagagatcttgttcgtcatacgtcctcaccgagctgccacagccctgaacctgcctcctctcagccaggagggaagacagggctgcagcgggggtgggtttgggccagtgcttgttcaaaggatgaggactaagaaagaacctctcaatgtgcttataataaaatccagaacaattgaataccatacagttcacccacttaatgtatacagttcagtgtttgggtgtattcacagaattgtgcaatcatcaccacaatcaattttagaacatttttatcaccccaaagagaaactctgcacccactagctgtcactccgcacttctcccaccagcctgtctctcactccgccttccctgcttgtcgccagccagcctggcctccctcttcttcctctcacactcaacccctctctctctgccattgcctctgccaggaatgtgctttctccagctcttcacgtggctgctggctccttctcatttctcaggctctgctcaagtaggacctctttcaggaggtctgtccagacacctgcatggagcccctcccctgcccagcttgctctggtacataaccctgcttattattttatttttttattcgagacggagtttcgctcttgttacagaggctggagtgcaatggcgctatctcggctcactgcaacctccgcctcctgggttcaagcgattctcctgcctcagcctcccaagtagctgggattacaggcatgcgccaccactcctggctaattttgtatttttagtagcgatggggtttctccatgttggtcaggctggtctcgaactcccaacctcaggtgatccgccagtctcggcctcccaaagcgctgggattaacaggcatgaaccaccgcgcccggccaccctgcttattttttttttaagccccgctctgagatgttgtggttgaccatctcactctgctgacgagaatgtgtaaggtcggggaccttgtcccctttgttttccattgagagccaagagccctggcgcatagcaccgtgtcagatgccatatagaaagcactccgctggcatttattgaatgaatgaatgatgactctgggctctgtaagaattcggagtgggacaagggttgctgagatcatgcccgctagtcagtggcatctagggccctcaggggaggaggggcttctcagccaccaccacccgccctcaggttccatgtcatctcctggttccttcttccctgcagctggaccgacccaccaagcagatgcgagaggcagaggaaaggctcaaagccattccccagttttgcttccctgatgccaaggactggcttcctgtgtcagagtatagcaggtgaggcctggcctggcctgagggaggaaggagcatagccttctttacccccatagcgtgggcacctgagtggggcctgctctagtctcatcctctcctacagcaacctggcccttcaccccacgtgaaaatgacggtccctattcttgggggctgtttcctaggtcctctcacacctccctgatgccagacctctctttgttccagtgagaccttttctttcatgctgactggggaagatggcagcagacgctttggctactgcaggcgcttactggtgagtgaggccattcggtcctcaggccagcaggcaggggataggccagggtgtgtgtgtgtgtgtgtgtgtgtgtgtgtgtgtgtgtgtgcccttctgcaattttagcttgtatgaaatcctatgttatgcttcctgaggccaccccgaaccccctgccaacacacacactttcacaggtgaggctaccctgggagagcagggctcagagtggtgcttctgagggggccttaggatcggaggttatctggagtaaggggagggagtgggttttcatgtctttttagtttttctctactttttcgtcatttcccttgggatcatgggctctgattgctggtctctggttgcaggatcgaatcgcccccagcagtatgtgtatatgcatcagattaggtgagggacaaccttcctcacccccatacctggccagcctgtagtggggaggaggcctttctgtggtgtggtggggctggagattgggcagggacagagacataccttctctgggaatctgagagagataccttgaatctaggggaaagggattaggttttgaaaatgttagccattttgtaaagagaagtccctcaccatttcccttcccattagtcctgggaaatagattgggtagaggctcagagcctggcccctgctgcactcccagcttggagctactgggttgttgacaatgttttggggtttccaggccttagcaagagaaagcctccccagataccagtctaggggtagatgaagggggcaggagccctgaaggaaggatttggggccggccattcattcattcagaaacacttatcatcccttatcagaagccctgacctattgagagtcaggcacgtgctattgagagtcaggcacgtgctcatataaagatgagtttaacatggatctccctctcgaggaactttagatggcctgttacaggagattggactttcaacacaggagggaagggccaagggaataagagggaataaatgttgtttagaacctgtcacattccaagctagatgcttcaagtatgtcttttaaaagaaaatgatcacaatagcccatgggttattattatccctgatccatagattggaaagtcaaaactcagaggtagaatgacttgcccaaggtcatacagaaccagaagggaagtcgtttgtcaccaatttgtactcttggatcacccccagaggatggactggggagagggggcgtggggaggtagaatgcccatggaggggcaaagggcgtatgcacaggagtgatgccaggtggtgagccaggcagaggccagcatgcctctggccgcctgggcctcccaggcttggaaggagtgttgcgaaggctgcctttgctggaacatagatggagcagagctgctcctttgtagtggggctgctgcccccagggaagagcgtgtttgtcctggcgtgctcagagagggcctgggctgggtctctgccaagggggctggcactagctcggcattcctgcagattggacacaatgattctgatccaaatcccacatacttgatttaatcacttggggctttaggggaggcgggggagagggaaagagacaggagtgagtttcaggcctaatatggacaaaaacagattctgccttctctttagatctgtgacgtgtggccagcaggtttggagactgaaatagccccatctgcatttgcttagcagcctgcacgaggggccagcacctgctgctctgctccctccccactcggacttgccaggccctccaggcctctgagtcctgctggagaaggcactgcagcctgcatgggggctccgggcctgggagctctcagtgcatgtctcccctttagctacccaccttttttttttttttttgagacagagtttcattcttgttgcccaggctggaagtacaatggtgtgatctcggctcactgcaacctccacctcccgggttcaagcgattctcctgccttagcctcctaagtagctgggattacaggcgcatgccactatgaccggctaattttgtatttttagtggagatggggtttctccatgttggtcaggctggtctcgaactcccaacctcaggtgatccacctcccttggcctcccaaagtgctggaattacaggcgtgagccaccgcgcctggccatgcctaccttttaagtcccattcttcttttgctcctttactccatagcaaacctctacccagtgtctttgttttctttccttcctgtcagaaagcagcaggctttaggggtaagacagccaaacagggccaaagcaaactcctggctccacagcttctagataggtggccttaggcaatggctttatctttttgaactcagttgcctcatctataaaggggataataatccctctctcacaaatctcttgtaaagtcccaagcccaggagtcaggtatagcaaatgttccataaacagtagctcccatctcttgttttcagtttgctctcttagaatggaggtggatcaagaaagggagaaaagaagcaaaaaaaggaatggtatgccgaatgtgccctatggggctaaaaagctacaatggcttgtcctaaggatgtaccctagtccttcccatctgctggggtcccagcctcagggctatgaatccacagacaccctgtagcctctgccaaactgctttgccctttgccagcccccgtcagcgtcctcctgggaggaagggtggagcctgtgtggagcctggcaggagcctggtacctggtgctgggagaccctgcagagctgaggcctgtcctgagagtggtggctgttccttcagggctctggttgcagagaggtttagaggaggcttaaagtcttcctccactagaagggcagtccttactcctccgttcccaaggaaaaggagccagaaatggtaatcatgcattctctgtgtctgtctctctcctcctcctccttgtcctggcccagccaagtgggaaagggccccggttgccagaggtgtactgtgtcatcagccgccttggctgcttcggcttgttttccaaggtaagaggctctggcaggcttccctccccgtcccccagctgacagctcccacaggagtatctgcagccagcttagatgagaaaaccacctgtgactgtgagcgagcgggagacagaatgcaggaacaagtaccagtgagctctctgacaccctcccattccccggcctggttctctacccagctggctggcatttccccagctcctgtgctggcagtgtctgcccctgtcacagcccaccctgggccctaggcagagccagagtccttggggaagcaggagcgcccagggagctgactcttgggtggtatttcctttgcccagctactccgctcttggggactgaagcaaggccagttagggaacagaggagtcactgagtgccaaggaaaacgggaagggtagagtgtgcagatcatggcaagaccaccttcccgtctcccagcttctgggctagcctggtcagatgcttggctgccctcttctctgccaggagggggaagggcagtgccctgacacccttcctctttgggctgctggcggtgggcacaggtcctagatgaggtggagcgccggcgtgggatctccgctgcattggtctatcctttcatgagaagtctcatggagtcgcccttcccagccccagggaagaccatcaaagtgaagacattcctgccaggtgctggcaatgaggtagggatttctgcaccctcttctctcgggctacgggctggggtggcaggaggaccatgctggccaaggtcgtagtctttgggggttgcagagcacggtccctccttgctcaaccatgtctgtgtaccccatcactagggaccaaaagagcaaacaataggaatgtacatgttgtccagccctctgttcctcccaggggccttccctgacccatttggactaaactgcattccatctgccttccttttgttcattcattgaacagttactgaatgtgtgccatctcacaatcagggattgcgccagacctcagagcagagtcagaggtagagggacgtggctctgtcctcatgaagtttgtagtctagtgggagatactgctattataaacacttttacatataaatagataattcctaaatgtgttacaagccaagtgaaagcacaggaccttatgagagtgtgaaacaggggagtctgctttaaataaggggccagggaaggtctcctctgagaaagtaacactttatcagagacctaagtggtgagtgggggcaactaaatgaagcaggaggagggagatggaaagagaaggatatgaacgggagaagattattccaagtagaggaaccagcatctgcaaaggcaaaagttgggcaagtgcaaatgctggtcagagggttgatggggtgggggtagaggggtgggttggcaggcaagaacccaatcacgatgtccctgctaggccaagttaaggatttggggttttatctaaagcaggggtatgataagatctgacgtatattttcatttcattttatttttttgagacagggtctcactctgccacccatattgtgcagtggtgctggagtgcagtggtgctatcatggctcactgcagcctcaccctcccgggctcaagcgatcctcccgcttcagcctcctgagtagctgggactacaggcgtgcaccaccaaacccagctgacttttgtattttctatagagacagggtttcaccctgttgcccaggctggtcttgaactcctggactcaagcaatcctcccacctccccctcccaaactgtagggactacaggcgtgagccacctgtggccagctgatacatgtattcaaagcccactgtggctgccatgtagataatggtcggagtgaaaacggggagaccagcagggatactgttgtggcactatgggtaagagatgatggcagctttggattaagatgtggtagaacaggggaagggaagtagatggattttagaattaggaccaatagcactttgcgtttgattggaaatagggagtagttgttacagagactgtaaggctgactcccagttttctggctggagccccagggtagatgatggagccatgtactgagatgggagctcgtgaaggagaagcaggtaatgaggaggaagagcaagagtccaaatgtgtacatgtcaagtttgagatgcccatgagacccccaagagaaggtatttagtagcaaagagtgtaaatagggaagagaagagagcccagtatggggtcctcctcagtcctggggaaccccaacgtgcagaggccctgcaggagaggaacactcaggagagggctgcggctcaggagcacctcaaaaaggaagccgtgatccggatcaggaaccaccaagaggtcaggatgaggcgtggcaagatcttgacaagtgcaggggcccagaagttgggctggagtgagttgagaagtgatgggtgtgaggaagtggaaacagcctgtgtagacatcttctcaagattgcatggctgtggagagaaatagggaagagggcagcaattgaaatgtggaactagggaagcttgttagggatggtagtttgtatgctggtgggaatggctgccagaggaagaggtttgagctgcaggagcaggaggggctagcagagagtactgagaagatgtgggtgttaggctccatggagggcttggtgtttattaggagaggagggagtggcttagtagattttggattctcatctgatggctttgattttctcaaagtagaaaaggtcagaccgggcaccgtggctcatgtgcttgtaatcccagcacgttgggaggctgaggcggggggatcacttgaggtcaggagttcgagaccagcctggccaacatgttgaaactctgtctcttccaaaaatacaaaaaaaaaattgccaggtgtggtggcgcatgcctgtaatcccagccactcgggaggctgaggcaggagaatctcttgaactcgggaggtgaagattgtagtgagtcaagattgcgccactgcactccagcctgggcgacaaagcgagactccatctcaaaaaaatacatatgtcaaaatagaaaaggtcatcctttgagagtaagaggtggatgttgggttctaggagagggaagaataaataaattagttgtagagagtgggagagggactgaccaaaaaagcataccaggcttgctgagcagtggcaaatcctagcttgagggctttctcctcgcctcttttctccccttcatttagaggaactttaggcttcatggtggctgtggggcacaggataggggacccttcccttatagcgcagcatcatgcctgggagctcttcatggtctggccctggccacctcactgggctctcgtcttctgacttgatacttagtgttgcctcaaccctacttccttttgcctagaagacacttctcttcttttctctttggggagtcaagtaccttgtgctctgagaggcttccctgacctctccccacccacatgagcttggctgcccttctagatgtcctgcctgtccctgtgcagatgttggtcacatctgcctctgtcctgacactggactcccaggctgtaactactcagctccttcagccccctgggcttgatctccttgaaggcagggatgcagggaacaaggccgggagtgggagcagcctgtgtgaattctcaatccctgggggaagggggagggttgggccccagggacagtagggactggagctgggtgctagagagcagagcctgttgggctgcatgcagggagcttgcgaattttggggcggggacagggcctggagcaggtataaagggctctggcatcattgtgctacttctttctgtgagtccacgttcactgaccatttggggtgtacccagcatctggcggatcactgggccttctgggagtacaccatcaggcgggagagacagtggacacagaccgttaccatgccctgtgcccattttgctgcttctctggggcccagaaggatggatgctgagttaggagttagaactccttcatttgcttagactctgaggaacaaatgagatgacgtgggtataaaaactccttgtaaagcattacctttgatgccatggggcaatgagagagaactggtttctcaccctagttttcaggaggcctgcacatctatgctgcacacacatgctgcgggaccaaggaggaggccaggcagaccccagggacagctgctttggcacggcctgagcgtcagcagttcctcctgccctcaccgctggagtcactcactaccttccacccctgtgactcccccagagaagtggctctctgagctgtggcactcaccttgggagcagcctttggaggaaagagggccaggcctggccctgataagacagtcctgcttcctggcaaggctgcagaatggccagccctttgcttatgttttccttgtgactggcatgggacttagggtgatggagataaaggccaggatagcaggacaaacagcctctggaaggaaactctttctgcaggaaagggagggggacagggcaacaaggaccccagcattgcccttccagaggcaatggctgggattagagtcctgggatgcggagatgcctggagagcagtggggtctagtcagcactgggggcttagacctttgtctggggaggtgggcaggaggaccctagagatgtggctgtgtggttcccttcttctccctatctctaagagcagtcagctctcctctcttcctgaggtcccgatggatggcccctcaactccttccttctggagccttccccgctttcacaggcagccctcttgcccacaggctgggtgttcgagtgctacgagagcagagctgtagtccgagggatggagaagaggggtttactgcatagcagggtagacgagagacctggaaaagagcaggttggaaggggaaagcagctccagttgcttcgtggagggccagagggcagcacccacttggctggccccggcccactttcccatcgctctcctgcaggtgttagagctgcggcggcccatggactcaaggctggagcacgtggactttgagtgcctttttacctgcctcagtgtgcgccagctcatccgaatctttgcctcactgctgctggagcgccgggtcatttttgtggcagataagctcaggtagggcccagccgggcaagaaagcagaagggaggggggaaggcacacccacaagcgaatcagcaagtgttcaggagcctaagcaggcgccggagaccagtgctggagtggggctgtgcgtagggagatggaagactaggtggaaaggtagcacccctgtgtgggtgagggagcagggtttgggagcacacagatggcaggattgagaaccctgtggagggcttggcctgaggggagagggagggatatttcttcctttgcaacagccaagactgtgcaggtgccgggatatgtaaaggggaaaggttaagaaattgagatttttggtggatggttgcatttcttctggagggggaggcaaagccatctcaatgggatgctgagtttgaggaaagagctgctgtgaggaaggggcaagagcactgaccggggacagtgtgaggaatgctgagccagccagcgagggtcctgtggagggtgtcccctggagaaggcaactgcagtggcccagggctgggcaatgggagggctggggagaaggatgtgatgggggcactgaggtgcagagaggagagtgggtgaggaaggctggccagcccacaccgggaaacagatgatgtgcagggcctggaggtgccagggaagtcggggagctggtttaggaggagtaagaaaagagctggatgggtcacaggtcttggtctgaaatgctggcatttatgattttagaggtagaggtgtcgagaaggtctggtggtggccatgggaggggtggcagaagtgatggtcactggacgtgaggcagtttaggaagtaagaagtcggagctcttctagacagccaaggtttaaaaaagaaaaaagttttatgtcagtggtggttagggggtgacacaggcaaggcacaagtgatacggctccgatgagtgcaggaacactagggtttttggttcttatgctggtttagataaaacgacaccgacacacgtggagtggttttaaggagcggagagtttaataggcaagaagggaaggagaaaggcagaaagaagaaagtacagagacagagggagagaggctccaaagccgagagagggaaccccaagtgttgtggataccagccagtttgataagaaggctggaggaggcggtgtttgatttgcatagggcttaggggattggtttgaccaggcatgtcattcatgtagcccctccccccccccccccccggaagctggccttcccatcctagccttttaatatgcgaatgtagggcgcctgatgttctacacacgtgggaatatgcggggcagccatgctgctaggcacctgtaggggcaagggcaagaggacaacggtgggaattgccatgttgggtggacccaatttctaatggtcttcatttgcatatcaaaggttgcctgcctggctctaagagccggggctttctttccagacaagaaacatttttgagctgctttaaaggaaatgaggtacagtggctcacgcctgtaatcccagcactttgggaggccgaggtgggcagatcacaaggtcaagagatcgagactctcctggccaacatggtgaaaccctgtattagctgggcctgtagtcccagctactcaggaggctgaggcaggagaattgcttgaatccaggaggtggaggttgcagtgagcggagattgtgccactgcactccagcctgggagtgacactctgtctcaaaataaataaataaataaaaatttaaaaatttttttaaaaaaaggaaacaaaaacttttcctctctccataaaataatttcttagtaagtcctacaacaacaggatgggttattggcaacatgttacatattgttttggtcaaagaatccatcccaagcagtggtttctctagagtggtcatttggacattgattaagccaccttaaatgtcaggtgctcacaggagggcagtgaaggaaaatccccgttctggtttgtcctccaataagtcctgaatccctggggtatttccttccgtatgtatgaggaagcagttgagaggaaaccgagaaatgaactcccgattgccttcagagggacaggaacgcaggcccatcctcagcccaggagaagaaaggaggaagaaaaaccagagctgctgacttttccatagagcaccagggtttagaaaggaaaactgcccctcacttgttcccatcacagcctcaatgcttctgtgtctcacacttctaggtgttctgtgggcccatcaggcccttgtgaagaaatctagcccaacagctggaatgagctgggtacagcagttccaagaggcccctcctgtgtaccagccatggtcattgtcagccaacaaagcccctgactgcccagctttggtgccctggcctggcctgaccttagtggcccctaagagagcctggaccatgaggtttcttttcctgaaggttctaccctctaattcagggctgagcttcctctttgccaccctgcccccccccaggccagctcccgtggggctgtgaatacagctattgtttcctgtggttgcagctgcctctgagcacattccaggaccattctgggagggacgatcccaaggtcttgttcttggcctggccgggtattcaagttctgccaatctggggtcttggaaaagatgtccttcctgttctgcctggggtctgcctctggctggagaggggaggggtaggtccagccagctcatgatccgttgctgatgttttaggttttccacaagttctttgtccctcttgcctagttctgatgtggggtgggagagggtacccacgatctgcattcactggccctaggggtttacaaaacctactgcctcctcagccacgggcccactgatgtgccccccaaacccgagacagcccttttccagatctttgtcagatgactgtcctgcgggttgctgcataccttcctggctgtttgcaggtacatttccctaagagagtagcattgttgtccttgaggcgctacgcagtgggaaagcggggactttaccagtctgcagggtccctgaaccccattagcatttttgttgcactgggaggtttacgatcaaaggctgtcctgagcctccagcgagctctaagttcctgggcctgggctcaggtactctgtctctctgtctgcccatcagtaccctctccagctgctcccacgcggtggtggccttgctctaccccttctcctggcagcacaccttcattcctgtcctcccggcctccatgattgacatcgtctgctgtcccacccccttcctggttggcctgctctccagctccctccccaaactgaaggagctgcctgtggaggaggtgggccaccgggggaaccagctggggggaagggtggagggggaagcaggtgctgggatcttacttgtggcccctcggcctctttaccaggctcttatcctttctccctgggaggtctatccccggctggagtacttcctgttagctgaccctgggaacctgggaggtctggaggcctggcagagggcattgcgggactcatgccctgagccactctgctaatgactccttttctcaggcgctgatggtgaatctgggatctgaccgattcatccgacaggtaagagggtgggtgcttgctagagttgggctcctgagcaccctgcaccatcacacacactactcaaccttcacaacctgtttgttgagctctctctctgggttcagtactactcacagactagtcaagggtggggagaagctggtcttggaatccttgaccttagcagggtccgcctttccagtgacatcatgagcttctagaaggcagtgtgggaatttgaagaacacggcctgggagtccacagacttggccactggactttgccccctttgagccacatggtcttaggcctctaaattcttctgagctctaaaggagaggtggtgacaacacctgccttgaaatgtttgctgggggttacacaaataactatagattgttatgtaacgtacaggtttgcaatcattgttgtcaactacaaaaagcctttgttagtcgtggaaatcctcctggctctctacaaaggagcacaacccagtgctctcccctatggaaatgtacttattgtctgttacacaccaatgacggagctgaggactccctgggtaccaggcatagtgatgtggacacagaaacagagtatagagacgaaacaacagtctaacttcattcctgagacacaggctggccacagtccccctgccccaagccaactgtgcctcctgcctggagctgaagatggaggaattggggagacctaatcaggaacccctggctggtcctggtcacagaggccagtgaatgccacactggctctaccccctttttttttttttttttttttttttttttttggagacagggtctcactgtcatccaggctggagtgcagtggtacagtcatgacactgcagcctcgacctgcctgggctcaggtgatcctccccatgtcagcctcctaagtagctgggagtacaggtgcatgccaccatacttgactaattgtttttttgtgtgtgttttgcagatagagggacctgctaagttgcccaggctggtctcgaactccctcctgggctcaagcgatcctcccgctcagccttccaaagtgttgggattactggcgtgagccactgcgcctgaccctctaccacttttaatctctgtaatcttgggcaagtttcttaacctttctgtgcttcagttcctcatcttaaaatgaggttgatgatagttatgagggttactgggagagataaatgagattatctactcacgctcttctaacaggtcttagcacatagtaagtgctcagtgtcagctatgattgtcactgtgctttctttctcctgcagatggacgacgaagacacgttgttacctaggaagttacaggcagctctggagcaggctctggagaggaagaatgagctgatctcccaggactctgacagcgactccgacgatggtgagaatagtgcccgggcacggtcagctctgctccaggctccctctgctctgggtcagggccccatagggccagaactctgcctctgcacaccaaaccctttctggctgatgaggaccttggtctcactctagcgtcttttctaccccaggtagtttaggaaggaaaacccaaagacatgtggcaaccccaaagatactttctgctgacagaaaactaattattcctccttctgaggccttgcctcaagccattgcaggagatgaaaggcacttcctcttccttggaagccagaaaaatcacttagggtgagggatatgatgaaagtggtgctctggtttctactttaattcatccagcaattatgtttcaacttccatgttcagaacatagtttctggccttctgcagctcgtaggctagttacaaggctatgagcacaagaaagcaagcttccagaggccgggtgtggtggctcacgcctgtaatctcagcacttggggaggccaaggcgggtggatcacctgaggtcaggagttcgagaccagcctggctaacatggtgaaaccccatctctactaaaaatacaaaaagtgcacctgtaatcccagctacttgggaggctgaggcaggagaattgcttgaacccaggaggcggaggttgcaatgagctgagatggcgccattgcactctaacttgggcaacaagagtgaaactcggtctcaaaaagagcttccagaacagaagagtggtactggctggaagtcttgttggggagaggaagactacaccaggaagattgaggaaggctttgcaggctcttgacctgaacctcaaagattgtcttttcccttccagaatgtaataccctcaatgggctggtgtcggaggtgtttatccggttctttgtggagaccgttgggcactactccctctttctgacacagagtgagaagggagagagggcctttcagcgagaggccttccgcaaatctgtggcctccaaaagcatccgccgctttcttgaggtttttatggagtctcagatgtttgctggcttcatccaagacagggagctaagaaagtgtcgggcaaagggtaagtcttggttatcagctctcttctctaattttttcacccacagcagggctgaagaaccaggcactatgatggaagctcttggacatcagctagggccaggcctcttaacatccctttacctctgttagaaacttcaaggtagcattcttctcctccggccccagtaaatgccttcacaaggctatgcacaagctaagccacatggctagaggtaggactcatctccacctaggagcagcatgccattggttgcccaccccctcctcaaagagaaagataggagaaagcccttctatccagagaaaaggagcagactgagcaatttcgggggttctgagaacccagtggttgggaattcccttacagagcattgggccagctgtcgtaggttggtggcagtcttcatttaaggcagatggttatcttgttttttgctatttcatcagctcattcgagggctttttcatctcatcacaatttttctgtctaacctcagggttagtacttcttctgtcctctaatactatccatttagtataacaacctttttggaacaacatggtagagttgtctgaaggaagctagagatgtccacttggggcagctctgaactgagaagcagcctcctcacctagtgcagcttgggaatgtgcatggggaggcagggtggcagcagcaaaccccggcaagatgtcactaatgatcgccttgatgagccagcccgaattctagtaagatgctcctgcaaattatcatcccagatgttttctttctccttttttggcatctgtgctccatggttcccttcatgtaggcctctccttcccttcctccaatgactgttctcttccctgtgcctgtttcttttacccaggcctttttgagcagcgagtggagcagtacttagaagaactcccagacactgagcagagtggaatgaataagtttctccgaggtttgggtaagtggccttgttactgatgagatagatgttcagcaagaaggaaggggctgggagatttgtgttcccgaatactctaaatcaatgtcaacaggtgttatactggggctgtagacagaacaggatgtagacatcccatagtgactagaaggttctcagccagaattccaagggcattttgcacagtagtggtccttcaatatctgtgggggattggttcctggatacccaaggataccaaaatccacagatgctcaagtcccttctataaaatggcatagtatttgcatataacctgtgcacatcttcccatatactttagatcatctttagattacttataatacctaatataatataaattttgttattttattttatattttatttattttattttagaggcaaggtctggctctgtcactcaggctggagtgcagtggtgcaatcctagctcaccgcagcctcaaacttctggcctcacgtgatcctccctcctccacctcctgagtagctgggactacaggcatatgccattacacctggctatttttaaaatttgttttgtagagatgatgtcttgctatgttgcccaggctggtctcaaactcctgggctcaagtaatactcccatattgacctcccaaagtgttgggattataggcgttagccaccatgcccagctgtaaatagatattatactgtattgtttagggaataatgacgagaaaaaaaaagtctatatatgttcagtacagacaccaccatccattttttcccccaaatattcttgatctccagttggttgaatctataaacatggaacccatggacgcagaactcatggatatggaggacaggctgtatttaccatattgcattacaaagaggaatcccaggttcccacatacatcaggtctttctgtttgcactccttcctgagtgaatatgaaggccattagagccagtgagctttcctctagaccataacaggtctgcagacacagcagtgcgagtgcccttcctgcaaaatgcacccctccctgcagggtgctcagcccgccagatcagagaatcatagcatgtttctgtttaaagagaaattgagaccaaagaggttaagtggcttgcgtaaaaccacacagtgattaataccggtgccctaattagagctctcacgtgttttcactaccctggatcagatcacagttataatccagtcttcctaatccttcctctcccactgacagggttagggctacaaggaggagagggagtggaggttggaagggataacactgaacattctctcttgtcctctctggcccacaggcaacaaaatgaagtttctccacaagaagaattaagcctccttctcagtagcagagtccagtgccttgcagagcctgaagcctggggagaaggcccagcctgggaccctctgggctgctgtggctcctctgcccccacagatcctatcctccaagccagcccacctctgccttcatcatatcccaggatactgtttgtaaataatctgctgtaagctttcttaactgttttttgtaacaagcaaagagaatatggcaaatatttgtatattcccaaggggccgggtgctttcctgtcctgccagagcatggatgaagtttcgctgggtgctcgtgactggccagttttgtgcagctgactgtctcagccaaaccactgatcttccctggaggccttcggcctgcctgcctgcctgaggtccccgctgccagtcccgggccctggagagcagatgctgtcttgttatgtacaggaggaccttttaaaaaaatcaagtttctattttttgctggtagtccgcatacccataccctctgtttttgaaaggcaaaggccaatcagtccccatttgtagcatggcaccagggtcttaggcctagtcctctcattcctcccaccctccgagatggtcagtgtgtcatgggaagcccacccccagctctgccagtgctctctgggcctggctcccagtcagtggtggccacgatgcggtacagggcatccctccttcccatctacgggtgttctcaataaacaatgtacagttgtttgggcccagagcctcatgtgttccttggctttgttatctagttctctctcctgggaatgggctgggactggccagtcagggatgaaacaccatcacacagggaactgagtactagattaaggggttagcttcagtgtgagtcactgacctcccctgaaatggagttctccagcctaagttgcatgaccggtcttaagagttagaagatacccagtcattgcagtagttcagcttccctcaactgttcagcctgtgcttaagtgtttccagtgatggaaagaatgctctttgcccttcggccccattattaggtaaatcttaacattttcctcttctgcctgaagcccctaagatgtcattgagtgtcctaacattggtagagtaaagcccagctaatgccaacccaggcttgggcatagccctgacctactccctgtgactcttgcatgtcactctgtgaatcgtttttccattggaaccctaggttttcatacagaaagtacggttacattccatggaagaggaaggagagaagcaaggtgggaaataaggacgatttaggcttttcacccaccaaggcctttggagagcagagactttgcaaactcccaagtgaggcattaagctgcaactattttctttggtattgtgtttgggtctgacaggatttgaaccatgagtaaagttttcctgtccttccaccctgttgagagatgatcccatcctaagtttccttcccctcttcctcctccccatctccactgaggcctgcacaggccccaacctgtccatggtttgggcctgccgtcagcctcacagaataaagtggagggtttgtcttctgggaaggcaaagtcattttctggctctgccatttgccaggactaggacagagattgaagcctcatgagtcttcagttcagatcaagagaaaagacaaggattacaaccagaagactcagagtgggaagtagttccctccagaactcgtcgctcttaactcagcctgggcttaggacagtcatagaaccagattccttaataagaaaaatacaggccatgcgcggtggttcatgcctgtaatcccagcactttgagaggccgaggcgggtggatcacgaggtcaggagttcaagaccagcaatggccaacatggtgaagcctcgtctctactaaagatacaaaaaatttgccaggtgtggtggggtgcctgtaatcccagctactgggagactgaggcaggagaatcgcttgaacccggaaggcagaggttgcagtgagccgagatcgcgccattgcactccagcctgggcgcagggtgagactccatctcaaaaaaaacccaaaaaaccagatttaattcctaaaaggctaaaaggtacatgcgctctctctcccttcctccccaattctccacccctcctttttcagcatggctccaaagaaccactttagacatgtgatccgatcacaagatgtgtatgtgtaaattttttttttaaatttgcattaacggggtctcactatgttgcccaggctagtcttgaactcctgggctcaaacagtcctcctaaagtgctgggattacaggcatgagccaccacatccagccttattcataaattttgccacttttatgtgtctttaaaatctagtatgcccttccgtgaataccagagcggtatgtctccccgctactgtggctgcagctctggtcccaatccagaaaatcagtactggcatataatggcttagaataggctgcaagggcccatagagtgattgccatggccaaggcacagcagccttatggggagaggagggtgtggacagtgggcctggcttgaggtttacaaaaaatattcagggcttctttccacgttctttcacatgatctcagggcttctttccacgttctttcacatgatctctggacctctaaaccaatgattttcatccctatcagatccaacagttttttttttaatagcaaatactttaattccctccttcactaccctgaaatgaaattcaaagataatataagctaccgaaatataccttaactgtaatataaaaggggagaaataaaacagaaatattttgttataatatttaaatatgtaaatgcttgtgtacaactgtactagaagagataatcagatgcctatactgtacacagaattactgtgaatgcaacagctacatatgcagatggagaaaagtgttgtatcagcatctcagatcctactgagtagttattggtgagttttctgaaatgaacaatttttggtaacgttctcaacaaaacaaagtatgagcttcccctgatttaaacagtagttagaatcctaggaaacagaagtatatgaaaactgcaaaaacaaaaaacaaaccaacttttgggttatgtgtaaatgaagttagattttaagttagatttctctttgttgtgtaggaccagctcatccattccaagatatttagcatccctggtcccttcccctccatgactgtgacaacaaaaatgacccaacatggccaggcgtggtggctcatgcttataataccagcactttgggaggccaaggcaggaggatcatttgagctcaggagttttgagaccagcctgggcaacatagtaaagaccccatttctattaattaaaaaaacaaacaaaaaaaccccactgtttccaaaacactcctgtaaaagatggtattgtggccattgagagggagtatccttaaacagtggctttctgacaacactggggcagttgctcagggataacagtgctatctcctctaccagggaagtcccctcacctataggagtgtcagttctcctctattctgtaattaagttagttcttttaatgcagggcaggccacttcattacacggttctaaatgctctgataaactgtagtcttgaaataagtattctgggctttttaaaaagcaatattttgaagaattgcccttaaacagcattagtcaaactctggttgacattggaatcggtggaattagggcccatcttagtccattttgtgttgctataacagaatacctgggactgggtaattgataaagaaaaaagacttatttggcttatggttctgatggctgaaaagttaaagattgggcagcaatacctggggagggcctcaggctgtttcagctcacggcagaaagcagaaggggagctgggcgtgtgcaaagagatcgggtagtaagagaggaagcaagagagagaaactgaggaagccagacgccttttaaacaacctgctctccattcccagcagagtgagaactcactcatccccacaggagaacattaatctatttgtaagagatctacctccatgatccaaacacctcccaataggctccaccttccaacactgccatactgcgggccaagtttcaaaccacatccaaaccatagcacgacccaagaaaataagtgggattagtcacagctcagttacatttttgttaaaaacatcttttcgcatgtacacttataacctactttataccaaaatgacttacagggatacacaaactaggttatttgaaacaacgtaaagtgggaatgagaggaaaataaaaattgggatgtaaaatagagccaggaattaaatttacgctttaacctatattcttgctaggggagctacacaaaatacgtttctagagccagatgatgtggtatgcattccaaaacaaatttatttgcctgtggaggtgggggtgtaatttaaaaggccatgaaaactctcgaaagagaaaatattacttttcagcaacggcaagttctggtagtttttttttttttctcaagatactttcgctccatttatattgcctctcaatatgaaaatacgcattgggttgaacaaaaaactgcaccaaaacatacttcgtgctcatttccctaacctcctaagaggaaattccttttatgttcttctagaatatttccatccgtgtacaagcactttcttttttagcccaaagtgcccttgaatgtcgctgacgctcattaccttttagacaattgagacaaattctggaggttcccatctcgaagatttacgtaaaggccacgcccactgttcttaaacgcaccctaaaggggctcgaagtgcggcgaggttggccattcctccgcttcgaaggggacccacggccgcccaaggaccaggggtggagttgaacatcccgcctctccaggggagttatctgcgctcgcgcaccactggccggctccgcccttgccggaagtggccgagcgaggccggtctccgccgggcttcttccggtctgggacgcgggggagtcatcgtctccggaagtagaagctactcaccggaagtggttctcaggtgccggggtaagacccaaggtccggtctgtgttgtgaggacgccactgaggtcgggtcgtgctgactgatgaacgcggccgatggagccaccaggtgggcgctgcacagcttccgcccgcgcttccgacttgcagtccgtccgtgggctgtctgctcttgggctagttagccgctaagtagggtttagtagtacatttattttgattgaaagctcgcctgatttagctgcccttgacgagcactgcttgtgcaaattatgtggcagccatttgtcataaaatcaagttgcacctgcagctcccacgtttgaacgcaactatatttaaggcatatatacattagaccagaaattagatcttttgcaattcaagctttagccagccactagagatcgccagtatgagcctccatgaacacagcaggctattcaaagcttggcagtcatgaaaatattttagtaaatgcgggttcaagaaagcactggaatcggcggacttagggctcaaaactattttcgtctgttcctcatcacatgaaacagtttttagaactgttagtagctgtagcttctggtgagtgaacaagccagcaacgaaatcagtgtttctttcccaggccaggggatcggatggcctaacaactcctggggaagaaggtagccattaagggactagggatccttccccccaaactctacttccttccatgccttatcattttgtggtcggcccactacaattcagtctccaagtcccgtccattatgccgtctgaatcgtaccttttccatactcactcccattttcttggttctgccttcagcctcccattgtagccgtcctttacagcccggccagagtaatctttctctccaccatagcacttcccgtttgcctaaccttcccaaaccagtttcctgaaccagtattccctctgcttggaccaatttcccactgacaatcacatgaaggccaattgactccatctgctcccgtaatagtttgcacttaagttactaagtcaaacacaaaaattaagtgcctgggccgggcgcggtggctcatgcctgtaatcccagcactttgggaggctgaggcgggcagatcaggagatcgagaccatcctggctaacacggtgaaaccctgtctctactaaaaatgcaaaaaattagccgggcgcagtggcgggcgcctgtagtcccagctacttgggaagctgaggcaggagaatggtctgaacctaggaggcggagcttgcagtgatctgagatcgcaccactgcactccagcctgggcgacagagcgagactccgtctcaaaacaaaacaaaaaattaagtgcacggtttccattttaatctacacaatcctcaggtaggcactttcactgaaattttaaagatgaggaaattaggactaaaagtcacacaggtattgggtgaagaccaaatattgagtcttttaattcatcatgaactactgaccacttattgtgggatccttggattcaggttccatattacaagtcctctatgggccctaatggagagcccttactttttttggggggggtggacagagtttcactcttgttgcccaagctggagtgcaatggcacgatctcggctcacagcaacctccgcctcctggagattctcctggctcagcctccaaagtagctgggattacaggcatgtgccaccacgcctggctaattttgtgtatttagtagagacaaggtttctccaggttggtcaggctggtctggagagcccttatttctaacttctccagcacaacagaagatacaagccaaatgatacatttgtttaaaattgtccagctgaatcgaggtttcactacttgtaattctagcctattcttatgtaagccaattcagtgcttctctgtgccttctatttgatccccaacatcctctaaaggttgtcctgacagatgtgtcccatagacagccatggttctcggcttattatgaccccacagtgcactaaggaaacctccactaactaaaacccaggagtctaagtgccatcttatttgtctatagttttagactgtattattttgggtcaaaaaaagctcaaaatcacaggaagaaccataaaactgtagcaaattataatttaccgagatctatgaggatcttatttgtaaacatgaattggtcaccatcagttttccaatagcaagagacacaaatcctagaaaaacttatttcaatttccagccttcaggatttccaaattttcccgatacatttcagactagaagaaaaattaactatttcaaacccactttgacatacagaaaagccctggcatactgaaatttcagattgctggacccccatctcgagattttgattcatcacattctggatgtaacaataatttggatcaagattaaggagccatggccgggcgcagtggctcacactataatcccagaacttttggaggccgatgtgggcagatcacttgaggttaggagttagagaccagcatggccaacatggtgaaaccccatctctactgaaaatacaaaaattagctgggcatggtggtgggcgcctgtaatcccagttagtcaggaagctgaggcaggagaatcgcttaacctgggaggcggaggctgcagtgagccgagatcgtgccactgcactccagcctggcaagagagactccgtttaaaaaaaaaaaaaagatgagggggccacgtggaaaaaccttgggctgagaacttaagtcctaaaggaccatctcattcctatcacactgcccctctttagaatgtgacccatcaaaatggaatctttccttttgagccctgttgaacaattagggtacattctctcattcactgtaaaattcagagtacaatacatgcaggcctttcagtgatcaacaggtattattctgactttataaacagaaatgtttaactggccaacgtctgtgttggtcttacgtttaccatatatttgagggaagtcaggagaggaccccatgtcttcataccctaagtactagaacctgggctcccaatgcacacaggatgtagaggtgccactgaagaacctacactcacaccacaaggaaaaagtagttagcatttaatgaaactccctccatgtggcttcaagccaccaggacacaggcccccccaacactcttaatcttctcctcagctcttctgctgaagaatttggccttcacgatgacaggctgctttgggagctttccctttcccagaactttgtagtagccctagaagaacagagaaaaaagtttacaatacactgtagtaggtaccaactgcgtgatgggcgtgaggaaagactgccaacccactttctaaatccctaggcagggtatgtatgtttctgatctgggcactaacgggggcaccgactgcccccaccagtgaatcaagaccagtagattctcttcgagtactctagcacaccaggacaagagttgtgtcaggatgtgactctagtctcggcaaagcataagcctcctcctgctcaaataccccctgctaagcaaaagaagacaaccaccttcctgaccaccagaactactcaatggacattaaataggctgggaagtgaatttaaagcgtccctagggttctggcctcttaacactacctctatattcatgagagttaagactgacacagggaccagaacccccgcaaggacagacataatacatctgttttgggggaaaatctcttcagataatgcatggcactgagtatcaatggaacatattaggattctattatctggagaacatgaagggccaagagctgtgctcagtgaaaaccagctatagttcaagcacgaaatgcaaacctgatacaacctgggcagtgacagtaggcactgctacggatagggaactacctatgataattctaccacaggaagaatatcaatgtctggtaggtaactgggaagtacagattatataagtggattagattaagccagagttttgtaagggaaggtatggaagtacagaaaaacatccaattaacttaccgatcgcaccacatcaatgatgggagcagccccagtcttgtttttagcagcattcacccgtgtctgttcactgaccaaagtccacaatttgtcaaggttgacagttgggcagaagctctggttcctctttaagtggtaatgcttcataccaactttcccaaagtagcctgggtggctaggaagaggtaacaaccaccttcatacacactccaattaagatgctatgtttatcatctttatagttaccaccccctattagagtgtaaattattcactggtgtagagcagtgtcaggcatatgatacatctgttgacttaaacaactgttttaaaaaccaccaaagactatcatgaggaaaaggctagtcttatttcctggaaccaggataaaccaccgacaatgtcagaggcagggccgagactaaaattcaagtcacataacagcactctatggaaaatctacatactcctataataaacgtcttctgaatagccaaaatttatcatccactagtttgtgggtaggtgaatgtgaagcatgtctctaacctggtgactgactgtgccataaggcccacagccagtgaataaggtcagcagttactcttcgaggactctagcacactcaggcaatagccgatacccaagcgtgactctagcctcgatgacaggttctcagttcacaccaagtgttaacttggtaaaaaacagcaataggcaaggcttgcttctaaactttttgtttaagccagccctctctctgcccctacctcccaagctgtgtcaataaaagcagtccaaggacacttactatttgtcgaagttgatccggtggtgatgcagaccaccagcattaccgcggccgccggggtgcttccggtgcttgcctgcaggaatacaaagctacgtggggccggtgtgatggctcatgcctgtaatcccagcattttaggaggacgagggggggtagatcacctgaggtcaggagttcgagaccagcctggccaacacggagaaacccccgactctactaaaaatagaaaaagaattagccgggcgtcgtggcgcacacctgtaatatcagctactcgggaggctgaggcaggagaatcgcttgagcccggcaggcaggggttgcagtgagccgagatttcgccactgcactccagcctgggcgacagtgatcagtctcacacacacacaaaaaagctacatgcaccacacagccttctcatgcatctcaatacttcctcgcacaaaagcagagtgtttcccagacttctgtgtcccgcttacgctgttcccaccctaccgatgccggttttcagcaatgcgattactttaggattccgggtgaaacatcttttcaggttccacatcacagcattcccacagtactccatgtcttcaactaacccaataccgtgcctgctcaattcctattaccccactgatgtgaaattccttagaactggaatactagaggatcgtcagaaaaaaatcaacagctgtgcaacttgaccacaaaaaggtcttattctaacccacttataggctaccgatctccagactagctaagcacccgaagagagcccaaggcccaccccgaggggaagccggcacttacctatgcggccgtggccgtggctcacgtggcccctaagtttccgggtcttcctcagtctggatggctgtgtggaaaaagcttggtggtaaggcctaaggaattaggggcagggggcgatgcccgccagccgagatggtcctgtaagcctgtgggtcaaagacctaacttctggagcgtttgggaaagctgagggtaccgatccgctcagggccgtgaggtctcaccacggtagcgcaggggcccgcgtgtcctagagatccgaaccgcgggcctaacacacggctccgggagccccgccccgggcccgcgccggccaccctggcccgcaggcggccatgcgcagcctggaagccccgaccatggtagggagtggatgactaggggcaatgggaatacagcttaggggtctccgccggcaaggaagaggaggcaagaaacgaaacacctaccatgttggcagcccagacgaaaaaggaaggccttcgccaagtctcgcgaggtatcggccacgggggcggggcaaaacgcctcacttccggtcacagaggccgggcttcgggcggggcctcctggtctcgcgggattgcgcgcctgctagtcgcttcctctttctgagggtggtgatcccccatcacggagtgtcctggtggcggtgtacggtttcggtgaggctcgttgtgctaggctcggagggcgagaactgttgaagaatcggggctaggtgtgctgtactgcacgccgcccgtgcttgcttgagccaggcccttttctggcgccttggtcagggaaccgcctaagccgaccctaagggcctcgttgtctgagctcctcaccaaatgcgccagccctgagccgccccgcgcacctccacagttcttagtggtctgcccggggctggtgatagtggctactggtttgtctcccggccgcagtgcggaaccgcgaggccctctttaatcctcagtgtgcccacctggtgtctcgctcggtttcctgaagctcgggcggctcccgaaatgccttctcccgctctcacacttctgagtgggcactgcagcttcctttctcttttgcccttttgctatcatttggttgtcctctcaagtttgagcaacttaaattgcttcagggacttagatgcctggttgctttatggtccttttaatgcagatgttgtaaatactttttctaaatgccacatttaggccaggcgcggtggctcacacctgtagtcccaacactttgggaggtcgaggcgggaggatttcttgaggcgagtagttcaacaccagcctgggcaacatagtgagaccctcgtctccacatacaaaagtaaataagtaaaaataaatgctatttttgaattttctccagaatctacataacacgcctgtgaccctttcctggacacaatgcagacagttgctcgcttccccacctgtaccaccacacaatctagtataacccttatgtaatttattgacctacgtttgtcttccctactagacctaattccttatgtggtcaaggactgttttttttaatccacactcaactagtgattgttgagtgaataaatgaacttaccctcacctccctgtcttcgctaatagcagcatgtcttcgctcttaagtcggttccttcaaccagtgttcaagatcccatcccctcgctagtctattaatagatcccatgggaaaaatgaaataaatttttaaaatcccatcccctcagttattctctgtgtgtatgtgtgagcgtgtatttatttatttttctttgtcttgcccccttcagctaaaatatattttagctaaaatatccaaaattctggccgggcgtggtggcttacttctgtaatcccagcactttggaaggccgaggcgggcggatcacgaggtcaggagatcgagaccatcctggctaacacggtgaaaccccgtctctactaaaaatacaaaaaattagatgggcgtggtggtgggcgcctgtagtcccagctactcgggaggctgaggcaggagaatggcgtgaacccgggaggcggagcttgtagtgaaccgagatcgcgccactgcactgcagcctgggcgacagaacgagactccgtctcaaaaaaaaaaaaaaaaattccaaaattctcccatgtccttgcccttacagccaagctccccaaaagagtagtctacaaatcctgcccatttgcaccttcccatccattgttcactgcggtctagctcacagcctgtgacttcagtgaaattgctcttactaatgtcattaatgaacgaattgccaaattggactcttcctattcttcatatcacttgttctttctgttgtactttaatctgttggcgtctttttctagaaaaagtcttgccttcctcctactctttggtcacttttcagtcttcttttcaggttcttccatccagcgttgtccaccatttgaatgttgatgttcctcagccttctgtccttgtccttatcttttcacagtacatggtcttcttgggtggcttcaattcacatccttattgctgagctccacacccatatggtcacttaattactggttagtattccttggacattctacagacaaagtaaacatatccaaagaactcaatctgcactgctcactggtgccttctcctttattctctgtcttggtgagtggcaccattgtccacctagataatgaaaattgtccccaagccttctcttcttctactacactgtcaccctatccttttgtttctgtatctccccaatgtgcttcctctgtttaagccttagtgccctgccttcattcaggcccccatcatatctcttaactggagtttacaacaccttcctttgttcactctgcctgcattctaaccctcctccaatttctgtatccttcacacctccaccacgttagtattccgaaaacatgactttcattcttttacttgatcaaaaagttcggtagctccttatgaccaacagaatatagcccacttgcctttccagccttaccccagcctctcccttacacaagctttctactgcagccgtgcctggtatatcccatttgcatttttgcctttgctcatgctgtttcccatcccggagtgcccatcctcttcctgaccacatgtcctgaatcttcctcaacctttaaggccaactttatattctgcttcttcccagaacacttcagtccacaagggataacaaccaacattttcagagcacttggcaatttacaaaatacatctgcctgaaggtacagcactaccagcctcattttacgtgtgtgaaaactgaagcacagaagaattgggtgacttgtcagacgctgcataggtggtcaggtacagagcctgggcctagcctttagtcttctctctccagatcccctgcttttacctcagtgaccagtccctctctgaccttacagcattatggtcttcatccctccatcaaccttaatcacatactgcatgtgaccagcaggaagaggggtcttgagaataggaggggagatcaaagaagacatcgtcgtctatttgacatcaaaactggccagtaagtgcacaagaaatgagctgggttacctggaacctaaccttgggaagatgatctgtcaatggaggtaagctgggcagggccttgggaatgaaagggaaccatcagtggtattagagctggggcctacaataaggaccaccactgcaaggggttgaggtagggttctgggtgctaagacactcctcttggatagtttgccaggttccttggttatagaggagctacgttctgtccctcaggtcacgcggctgaacagaaggcctcccagagtggacccagcactacccgttgggttctgtgttcacctaacattcttctcatcaatggcttgatctggttgtagagggagtaccctgggtagttgtctggctcaatccagttttctatccagctccctctccttcaaaaggcaaccacatgacttaaacacacagctcatgtggtgtttgttcagtgtgtgtcacttttcctaggttgacagaggtctgagagagcagacaaagctgagttttctgtctgcaaagtggagtagcagccagatatttggcattaggggacctgtccctcccagctaggcacatgggacatgacctttggccatgactcctgaggggtgtccttctctgtgacatctcttctgaagtacagcatggctttgtgacatctcaggcatctgggcttcctcagagtgtgagggcctcagaaaatacctcagaaatgaacggaagagatgataccagacagcagcctggtgaggcaggcaagtgtgctgattttttgctgccccaggcctctctccaggtggccttgggaacacatcatcaccctgaagaaggccctggtgatccctcttcctttctctcctcactgggttcctgaattcgacatcagtccttcagatagcagcaacatcctgaatgaatccagctctgttttcttgctctccatctttagatgtggacatttggaaatatgttcgttttcttttttaagtagagcactgttaatcaagatgggaagaagcagtgtttctgctttttttccaagtgagaattagagaaaagctcagaaatcccaatttacttcagaaagacttgaaaaattatacgtaatagacagtacaacagtaaagaaaattctgaaaaaaatataagtataagcaactcaaatcattccaccctgtgatgccattttcttttctgagtattacctttcaacccttgtatacatggagacatagctgtctgcaaagttagtgatcatagtatacaaatccttttgtattctttttatttaataccatggcagtttttcgtatcactacccagtcttcatgattatttttaacagctgaagaataatttattttcagcatgtgctatcttttattaagccactttcttgtgtattttgtttttttaaaaaattcttattgtattctttgctgttagagacaatgatggaatgagcatttgtatataattttttcttctcctgttgaataacttgtctaggataaattcccagaagtgagactgctggattatatggtatgaacatttttgtgactcattttatgttactatgtattttttccaaaaggatcgtaccaatttattcaccagcaatatgtacagtttccagtttcattttaacctccctagccttgggggtttttgtttgcctttatcggtagtttttgatatatggcatttaggggaaatccataggatcaggcgaggttttcttcagcacaaagtaaaaataatctaattggaagattaggaatttttaggagtctttctttcctgtgttggatagagtgttctacatggcaattacattcctaaagctttattggaaactagggtggaaaaccttgttgccattaaactcagagtaacaaaacgtgaaaagagaaattctagagtctttgagaacagcttatacaatagcagaaaaaaggagttacatatttgggttttactttaatttcagaggataagattaatggaaagaacacagaaagttgggttcatttcctagttctgttttttttgttgttgtttttaaagataaggtcttgtatgttgcccaggctggtctcaaactgctagcctcaagcagccctcctacctcgccctcccaaagcactgggattacaggcatgaccatcacgcccagcctcctagttctgtttttactcactgaattatattgaacaaatagcatgttctctttgaatctgttttcttgtctgtataatgaaaaaataatgagattcattcattcgttttataaatattaattgagtgtgtactatgttcctacgctaggtgccaggcaagtgaggggcaggtacaattgtgaacaaaagtccttccctaagactatgtctaagacatacattaaacaagcaaacaaataatatatcacatataacacagcctagcaaagagtaggtactctcattacctactatttctcgctcacattttctccctaaaatgagtgttatttttatgataatttgttctgtacccttcatgcaaacaatctttgaaattcttattcccaatgtgatgtggaatgacttgttccatcattccttagcaaggttaaggtactccagtaaatattttccttttcttagatatagatgtggtaagatgttaaaaggaggtggtttgtggcaaggcaatgttttaaaatttaactttttgttaacattttaaaatgtaaataaaaataatttcctgggttttggaaaactaagatttggagacattagacccacattcttttaagtaaagcacttcgttcatatagattgcccagcccctgtaggcatttgaatttactaccttggcttaagtacagtcttgcaaactctgtcccctacactcttctaggtcaggggagataagaaggagagggaagaactaagttatgatgaaagcagccataagaagggggcagaaatggggtcatttgacccttcgtcttctcaaatcagaaactcattgtgtggctgtgcctttaaattaaccatttactttcatggagttacttcaattgctcttctaagacataaatgagatgcctgtttctttatattcttaccctgtgtagtacttgctggtggtggaaagccatgctacctccctgaattcccaggattgtgatgcaaggtctaatgcagtagttctccaagtgtggtctgtagaccttatggggtggggggtccctgagaccgtttcagggagttcacaggtcaaacaattttaataataaagctaacgtgttatttgatcttttcactgggttgacatttgcactgatggtgccaaagcaatgttatgtaaaactgctgatgttttgggcaccaaactggaacaaaaccttatattctttaccactaagcatctgccggttaaaaaaaaaaaaaagaagtttaccttaagaatgtccatccatgatgaagtggtaacaatttttattaaatctcaatcctgaaattcttaagtacttttttagatttctttttgatgttctgtgtgaagaaaaagtattcctactacatatcaaagtgagaaactgtgcttgtgctattgagttgcaagttaaactagccttttaaaaaatgaaacataatggacgatgtggtggctcacgcctgtaatctttgggaagctgaggcgggtggatcacgaggtctggagattgagaccatcctggccaacatggtgaaaccccgtctctactaaaaatacaaaaattagctgggcgtagtggtgcatgcctgtaatcccagctacttgagaggctgaggcaggagaatcgcttgaaccagggagtcggaggttgcagtgaatcaagatcacgccactgcactccagcctgacgacagagcgagactctctcaaaaattaataaataaataaataataattaaaaaaataaaaagtgaaacatcagtattacacgaaaggacaactggcaggccgggtgcgatggctcatgcctgtaatcccagcactttgggaggccaaggcaggtggatcatctgaggtcgggagtttgagatcaccctaaccaacatggagaaaccctgtctctactaaaaatacaaaattagctgggtgtggtggtgcatgcttgtaatcccagctgctcgggaggctgaggcaggagaatcacttgaacctgggaggtggaggtttctatgagccaagatcacgccattgtactccagcctggttaacaagggcaaaactgcatctaaaaaaagaataactggcagacaaactgtggttattcaggcttgggaatttgtccgatattttctcaaaagtgaattgacagtatttgttgccaatgataaaattcaagcgttcaagcaaaagttagaattctggtagtttttgctgcctccatgaatttggcagcttctcaatgcttaaaagaattttctgatgagattcgaggtgattctaaagaatgtgattttttgttattgtgtaatgaaatgtgtcgatatttggaacatctgcataagtcattgaactggtattttccaaatgaccaatgcttggtgttaaaaaactgtgcctggggaaaagactagttcaaagagcaagatcagcagattttaatataacagaataagaaaagtttggttcagagtctaccttataaataacatttaagaaactactaccactgttgaattttggtgtggtatcaaagaatatccacaattacctgataaggctattaaagtactcctatcttttccagctgtatgtctgtgtgagactggattttcctcatatactgtgaacaaaacaacatataacagattgactgcagaaacaggtatgggagtccagccgtcttttattaagccagatgttaaagggtttggcacatatgagaaacaatgtgactcttctcattaaattaatttttttgaaagtagttgattttttttttttaggctgggtgcagtggctcacgcctataatcccagcacttcgggcggccaaaatggaggatcgcttgagtccaggaatttgagaccagcttgggctacatagcaagacctggtctctacaaaaataaaaatgaaaataaaatagtcgggtgtggtggcacatgcctatagtgctagctgcctaggaggctgaagcaagaagtttggttgagctcagaagtttgaggctgcagtgaacttcgcacgactgccctccagcctaggcaacagagcaagaccctgtctcaaaaaataaataaataaataaatggaaaaaaggaaatagttattttttccaaaaagtatgttattcgtgttaacatataacaagtttattattttatgaaaattaatgttttaaaattttctcagctttaacttctaatgtggtaaatagcaatagattttctcagctttaacttctagtgtggtaaatagcaatagttcacataaatgaactctctttggggtcttcaatgagtaaacatatgtaaagggattcccaagaccaaaaagtttgagaactactggcccagtgaaataaactcaggcatgcttgaaccttctaatagagactgtcctcgtctctaatcatgctgctgctatggctgttttctgctaaataatgcccagaaggaattagaagtgcaggtctatctatagctttatgtagtggcatctttctggaccccaggcagcctggcctctcccagccccatcacccttcctccttcctgaaggcttggctcctaaagacttcagactggagtgaaatttttctcaaacttgcataattaccaagacccagatttgaattaaatgatttgtattttgtttcttaaataagtacaaatataaaactagctacaacttcctttggcttttagctgttatacaactataaaactgaatatagtttacaaattgtaaaaaactacaaagccatcaaattaataatattaatttcacatgtatgtgatgtttttctaaactaaactatcattatgacttaaatgtggtgctcactcttgtagctaagttcagcaaacatatgccacaatggtgatggctcagttttcccacttcctttctctgttccaagtactgtaaaacatgcatcattttgtgccacaatgttgtttagacttcaagtggcaagaatacattatttgtgtattaagtctgcccctctctcagctcattaacctgagacaagtaatactgcctagtgtgtactaaatcctagactcttaacactacccccaaaatcatattgtggtagatatgtagataatccagactatactttttaaaactttattatcacaatgaaacactaattttaaaaaattagtggacagaacttatgaaaatatgtgtgtggacctcagcttaagaacatttcactaattaagagtgtgggccgggctcggtggctcatgcctgtaatcccagcactttgggaggccgaggcgggtggatcatgaggtcaggagatcgagaccacggtgaaaccccgtctctactaaaaatacaaaaaaaattagccagggcggtggtgggtgcctgtagtcccagctactcgggaggctgaggcagaagaatggcgtgaacctgggaggtggagcttgcagtgagcagagatcgcgccactgcactccagcctgggcaacagagcaagactccatcttaaaaaaaaaaaaaaaaaaagagtatgggccaggtgtggtggctcatgcttgtaatcccagcactttgggaggccaaggcaggcagatcacttgagcccaggagtttgagaccagcctgggcaacatggtgaaactctgtctactaaaaatacaaaaaattagccgcatgtggtggcatacacctgtcatcccagttacctgtgaggctgaggtgggatgaggtgggaggatcacctgagcctagggaggtcaaggctgcagtgagctgtgattgtgccactgcactccagcctgggccacagagtgagatcctgtctcaaaaaaaaaaaaaaaaaagagactggagtccagaatcagaagactgacctggatttgaatttggactctgccatttgccatctgtctttgtgcgtgacccagcctctctaagactgtttcctcagcctgtccctcttggttttatttaatttgtaaaagtgtctcaacccctttgaaatacagtatgtaaagtgcctgtcataaacttgtcaataatgcaattttcttcctttttccaaaattgaaacttaggtcaagcttgtctaccaataaggagaggcacaggtacgggacacttttgaagggtttgttcgccttcagacaaacagcagacacctccacgctttgttttccacggcagagatggctagactctctttttggtcccaggtgaggaactgaggctgaggcatgagcctccagctctggagaggaacatggcctggacttttgaggccttgttctcgaaggcccctctggcctaagatttttttctgctcaaaataagtagatcactctgctttgtgcttcacttacagggagtggagctggctcgctctacacgctgcttctcacctgaggatatcagtggaaaagccccagtcctgggcacaggcatggctgtggacatgggcatgagctttatggggctgccactagctggccagaaacactgccctaagagtggacagatggaggccatggtaatgacctgctcattgtgccatcaggacctgccaggtatgggctctcatctcctatcctgccagcatttgctctgtaaggactgcttccagggcttgatacaggagctagggcagattgccaaggctcatgagactgttgcagatggtaagtacaaaggcaccacaagttcacctcccactacataacaggtctcttcctgtttcataggaactgaattttgggtgtagaaagaatcagaatttaaatgcccaagggacactcattgctgaaagcaatctttgggggaatctgtgagacagagtgaatcctcttgatgcctaatatatctgttttgtaagctggaacttttcatgtttgggatttccttaaattggtggcagactaagaagcctggaaaggttttgattcaaagtttggctgcctccccagacggagaggatgtgttctgactcactaaatctccaaggcagagagagaatggctggcctcctagggttagtcaggaacagattttgaatagaatcacactgactagtgaactattcagtatttaagctgctgcccagcagggaggagcctgtgtcttcctccagaatgtcaggtttcctaggaaacggtctcactgggaactgtgcagtcactggagacgggaaccgggtcacttcattttattattctagcacaggacatgtcacagaggtacagtgaatatccattgaatgaaattatgcagtgagaaagtcaaataagttggcaacacttagaaataccgttgttgatcttttctgtttgttttgttctctgcagtatttcccaagtgatttgaagcacaaatctaggctctctgtgaggcattatagcactggttaaaaatggggacttcaaagtgctgggattacaggcgtgagccgttgcacccggcccacactcttaattagtgaaatgttctcaagctgaggtccacacacatattttcatgagtcctgtccaataattttttaaaattagtgtttcattgtgataatagagttttaaaaactatagtctggattatctacatatttaagccctctgaacccatgggcaagctaccttgcctctcagagtctgctgagagtttggagtacaggaaagatatgatctattttgatttttttacattaatatatgatttttaaacataaacttagtttttccttaatcttaattttaattaacaaatcttactgtctttataagtggcataaattttaacaatgccatttaaagggcctttgattaatatgcaaacttagttacaaattttgttaatattggcttttataaaataaaatgtaatttattttctttgtaagtactccaattatctagcaaataggcattcctgattacttaaagaactcttgaaaatccagtgagttaaatttataaatatggtgaatcataaatatatcttgaaagttccagcattatagaaaaccaaatacttaatgttctcacttataagtggaaactaaagattgagtacatgtggacacaaagatggcatcagcagatactgggacctgcttgagggtggagggtggaaggagagtgagggtcaaaaaactacctatcaggcctggtgcagtggctcacgcctataatcccagcactttgggaggccaaggcagcgaatcatctgaggtcaggagttcgagaccagcctgggcaacatggtgaaaccctatctctactaaaaatacaaaaattagccgggcatggtgttgcgtgcctatagtcccagctactcgggaggctgaggcatgagaatcacttgaacccaggaggtggaagttgcagtgagccaagatcgcaccactgcatgccagcctgggtgacagagtgagactctgtctcaaaaaaaaaaaaaataaataaaaacaaaacaagacaaaacaaaaaactacccatcaggtactgtgattattacctgggtgatgaaataatctgtacaccaaacccccatgacacacaatgtacctatataacaaacctaaatatgtacccctgaacctaaaataaaacttaaaagaaataaatgagatggtcaggtttggttcaattccagtgcctaagggcagaggagagggctgattactgttagtccctcaggcttaatgcagtgttgcttaacaatctctgaccctggccccacagcccttggacagacctgaggcctgagtgataggtggctgccactaggggttgtgaataaaatcccaaaaggagttttttttttttttttgagacagggtctcactctgtcgcccaggctggagtgcagtggtgcgatctcggctcactgcagcctctgcctcctgggttcaagtgattctcctgcgtcaacctcccaaatacctgggactacagcatgtgccaccacacccagctaatttttgtatttttagtagagacagggttttgccatgttggccaggctggttttgaactcctgacctcaagtgacctgcctgcctcggcctcccaaagtgctgggattacaggcgtgagccactgcacctggccctaaaggagttttattaaaatcatgttggacaatgaggatgcaaggtattaccattgatttcagcagtattgacagtatgaaggatggtgcctgtgactttaccgtaattcttcagtaatggtaaatagcactgttggtattagcagcaataggagatggcagtctcaatgcatcaacataaggcagtctgtgctttggaccaaatgatattgggcctctgcagcagtggtggcaccttttgtcagctttgatgatggtgcccttcatcactatggggatttaaagatggccacaattcttttctgccacccatcccaccaagaggtgaagtctatttgtttcctttgaatctgtattgttctatgacttactttaaccactggaatgtggcagaaatgttactgtgtaacttcaaaggctggacctcaggagatctgcaatgtctaagtttgctgcttggaatatgccatcttgggactgggcgcggtggctcatgcctgtaatcccagcactttgggaggccgaggtgggcggattacctgagctcaggagttcgagaccagcctgggcaacatggtgaaaccccgtctctactaaaatacaaaaagttggctgggcgtggcagcgtgcgcctgtaatcccagctactccggaggctgaggcaggacaatggtgtgaacccgggaggcggagattgcagtgagccgagatggcaccactgcactccagcctgggcgacagagcgagactccatctcaaaaaaaaaaaaataaataaaaataaaaggaatatgccatcttggaatccaatctccatgctatgagcaagcccaggcagtcacatggagagtagaactgaggtttctgcctgacaaccagtaccagttgccagccatgagtgaggctgttttggactgggccatctcagtatcccagatgacatcactgaagcagaagaactactcagtcaacccatggaatcattgaaagtaataaacttctgatgttttaagccatgaaaaaaaaagttccagcattgttgggttaatatctagaatatataaagaactcctacaactcaacaataaaaaaaaaaacctgattttaaaatgggcaaaagacttgaatatacatttctccaaagatgaagtacaaataaccaataagcccaagaaaaaatgctcaacatcactaatcactagggaaatgcaaatcaaaaccatgatgagaaaccacctcaagtacattaggatggctatcaaacaaaccaaaaaaatcccagaaaataataaatgttgacaagaatgtagagaaattggaatatttgtgcactgttggagggaatataatacagtgtggctgctgtggaaaatatggcagttcctcagaaaattgaaaatcaaattatcctatgatccagcaattccattctggatatatgcttaaaagaatttaaagtagggacttgaagagatatttgtacacccatgtttctagcagcattatttgcagtagccaaaaggtggaagtaacccaagtgttaatcaacagatgaatggataaacaaaatgtagtatatacatataatggaatattattcagccttaataaggaaggaagttctgacacatgctacaacatggatgaagctttaggacattatgctaaatgaggtaagcctgtcataacagggcaagtactgtatgattctggttacatgagatgttcagagtagtcagcttcgtagagatagaaactagaaaggtgatttctaggggctgggggaatggtgagttgttatttgatgggtacagagtttcagtttgcccattttttaatggggttgtcattgttagtgttgaactgtagaagttccttacacattctggataccaatctcttattagatatatgatttgcaaatattttctcccattctgtgagttgctttttcattctgttgatagtgtcctgggatgcacaaagttttaaattttcatgaagtccaacttatctatgttttttgttgttgttgtctgtgcttttggtgtcacattcaagaaatcattgccaaatccaatgtcataaatattttcccctctgttttcttctaggagttttatagttttagctcttaagttcaggtctttgatctcatttaaggtttttaatgtgaatgaattatgcatgtgtcaaggctgtgtttgactctaaaaggagaacattaaattcatattaatggtctgggtgctttggtggctcatgcctgtaatcccagcactttgagaggccaaggcaggtggatcacctgaggtcaggagaagaccagcctggttaacatggcgaaaccctgtctctactaaaaatacaaaaaaaaagttgccgggtgtgttggcaggtaccagtggtggcagacaccagctactcgggaggctcaggcaggagaaccacttgaacccaggaagtggaggttgcagtgagctgagatcgcgccactgcactccagcctgggcgacaaagtgagactccatctctgtctatatgtatgacaattacctgaatcatagtatttgttgccaagttattctaattgcaatgaagaataaaaacaaaagctttggtgtcagtatatttggccatctgagtgtcattcctgatctgcctgccattactagctgtgtaatttaggcaagttacttcatctctctgcccaagaggttttttttgcctgtaaaatggggttaatggtggtagttactaactcataggactgttgtgaagattaaatgaggacatatacataaagccttctgtactatgcctcgtttatagaaagaaggtaagaaaggtaaaaaaacaaaaagtgctgttatttagaacttgagaacatgtaaaataggggaaaaaagcctgttagatggaaacatgcttaatttggaaccagagagtcaatttctcatataatatgtataatatgtggcatcttatattcttttttttttttttttttttttttttttctgaggcggagttttgctcttgttgcccaggctggattgcaatggcgcgatcttggctcactggaacctctgcctcccgggttcaagcgattctcctctctcagcctcccgagtagctagaattacaggtgcccaccaccatgcccagctaatttttttgtatttttagtagagatggcgttttgccatattggccaggctggtctcaaactcctgacctctggtgatctgcccacctcggcctcccaaagtaccagaattacaggagtgagccactgcgcccagcttcttatattctttagtaggtcttacagtctggctgggtcatggttaccttccacatttacgtttatgggtaaaaagttgaataaacttcctctttttttattttttgagatggagtctcactctgtcacccaggctggagtgcagtggtgagatctcggctcactgcaaactccacctcccgggttcacaccattctcctgcctcagcctcctgagtagctgggactacaggcgcccaccaccacgcccggctaattttttgtatttttagtagagacaggatttcaccgtgttagccaggatggtctcgatctcctgatctgcccgcctcggcctcccaaagtgctgggattacaggcatgagccaccgtgcctggcttaacttcctctttattacttggaactattaggaccctatgtggtgtggtatttgttggtttgtgtgtctgtctctcccccatggatatttattgactactgtgtaccaggctgtatggcatttagggtacagagatgaaaagacagagcccttgacttcaaagagctcatagtctaatgaatgacagccaaataaacaggtgataataatacagtgaagagaagattgtttaaagttcaagcaaaggatcaataactcaggtaagttgtccacgtactaggactggcagatatcagttgcccactgaatattttctgaagggtcaaaagaatggctcccaaatcagctgtctgatgaaaggcagagctgtcacctgtctctggctagcctagtgaaatacctaatacctgaacttagatttctggtctgtagtttgagaagccatgtttggagagagtttttagtgcagtcagtttgtccagcagagtaggaacacaggctttctggaacgtttatcctctttctgtgaatctgggcagaaatctgtttttttttttttaaagtaaaatgtgggagccggtagagggatggcaggggaggcggatagaggctgaggaataaacaagttcctagcttcaatgcctccaaccagatggagccacgctacatggggctgagttcatttctataaacctgtttctcctacttgctgggcagagccgagcagttgctgtgttgaatggaagaggggctgtgcctgggctcagggtctgtccagcttgttttcaactctaattcttcaacagagcctccccagggctgtactcctgctctggggcttggaactgaggggatgtcatgaggtaggcatcttctcattcaaccagacggtgcctttcatgtttgtaaccccgcagcccaacacagaacatgatacaggagaggaggtcttaagtgaatatttatagaataaatgacttaatcaataaagcctgggtagaaggcttttttcacttgtgatctgtccctttttgttcttcaagtgggagttacaaaatgcatttatcaagcacttactggttggcagacactgtacaggcattatcttttgtaaacttcacagcagccttataaagtaggtattagtattcccactttatagatgaaaaatatgaggattgggatatttatagactaaggttaacaactactgcccggtaaggtcaaattcaggttcacctgtcttcaaagcttgcgatcgacattgtggcactttgctcacggggagagtccacgctcacttagaataccaaactgatgaggagagtccatggaaaatctttgaagaaagaacaaatcctgcagcctgagccagcaaatataaatattttttaattaaaaaaatttttaactgacatgtaaaactgtatgtatttacagtgtacaacatgatgttttgaagtatagatacgttgcagaatgactaaatctagccagttaacatatacaacacctcacatagttatcattttggtggggagaacactttacatctactctcttggcatctttcaagaatacaatatattattaaccatacttatcatgctgtacaatggatctcttgaactgactcctgctatctaacttggattttgtattctttcaccaacatctccctaactacccttgccccctgccaaccactctagcccctggtagctgctcttttactctccgcttttatgagatcagtttttttagattctacgtgagtgagcttatacagtatttgtctttccgtacctggcttatttcacttacaatgtactgtaagtacaaccatgttgtcacaaatgacaggttttccttttttttaatggttgaatagtattgtgtatatatatcacattttctttatccattcatcagtagacacttaggttgattccctgtcctggctattgtgaataatacagcaatgaacatgggagtgcaggtatgtctctgacatgctgatttcattttctttggaaatacagtagtcccctccccccgcatccaaggttttgcttttcaagtttttagttactcacagcctgaaaatattaagagattttgtgggggggcagggggaagagagagagagcgagacagtagaggctgcattcatgttgcttttattacagtatattcttatagttgttctattttattattagttattgttaatctcctactgtgcctaatttacaaattaaactttatcataggtatgtatgcataggaaaaatatagtatatatagggtttggtactatccactgtttcaggcatcttggaaagtagcccccatgaataagggggggactattgtatactcagtatttgaattgctggatcaagtgcaaatctttaattaatacagccacagcctagctgagattctccccagcaactaggaagatgggtctgcgtcacctctcaggtactgaggagaccagctgggcaagatcttcaaaagctaatgatggggaccagagcaaaggtaggagtgtggtgagaatacagtggcctagccatgcagtgggatggctgggtacacaaatgctagctattggaattggattttctcagccaatgagaatatctacttggggctatttgcttttttggctaattaagaatggtcccaggtcaaattctgtctggaaagttggccactgagtaccaaaattatactttaagtaaatgtagcaagctctgaagggagctaacatccctgaaactgactcttaccatatgctggctctgtcttcaaggttctcagagttgctgtggttttatttgtcattttaggaaagggaagagggaattgattggatatttccttccccatgtgaggaaaaggaacattacttattgtttctcttcaaatcaattaaaagacaaatcatggctggaagactttgatacttagatacagatttcagaatctacttgtttagtatcttatttttcccattttcaaagttgaggatgtagctggaagtcacagaccctagagctcacctggacactagcactaattgactgggcaattctaagccctttctggctttcagggctagacttaatgagatttaagaacaccaaataactaccatagcccgatgcttcttgaagctagtgaagagtgacagcatccccgaacactactaatgctgaaaggaggagcaatcacggtccctcggtgggcaggccttgggactttaggaatatccaaagagggggaactgatgcaagatgctacaaccttagaatcagagagggaaatgacacttatcttaatgagcagctcagctgcaggggttctaatggtcttgggtgggaatgggaggccagaggtgagatctcagctgtaggagcctgggaggtgggtgactactctttgctcattccaggtgctgcagtgtgtccagccttgtggggtctgttgtgggcagtaactcaagtctcccaggtgaagggcaggctggtgagctgggtgtgcagcaggtgcagaagctggagcctggagccctatcagtggagtggctttttagttcacgaacagtttcctcgccttaattggctctctagggccctgggaatagcactggcaccccagaacaggacccattactgggagagcaattcccccggtaatggaaaggaggcaggctgtgttttgggggaggtgcttgctgctgccagtgctgcttggaaggctatagctagaacagatttgctgagggagggagctcgagatggctgtgattgatggatgggatctttgaggggcctcttgtctgctggaactttctgatttaagggggagtggttagggttgagtgctgtggaggccaaaaggcagggaaggcccttaatctccaatccctcctgcatagatgaagcatcaggagtccaggaagggctaggatcctgctgaaaaccacataatcggtcacttgcagagccaggaaaaaaatccagctcctttgcctgacagtccagggctttcctgggcttgagggccagtagaaactacagacccagaataggatgctgcccttggttccccaaatgactctctgtctccaggcccagctggaaaagggatcagtggttttgcatggagtgtgtcagtgcatcagtttttggattgactttaagatttgggatgaaaagagacagaggtgctacctcggtcagtgagggtctgtcagatgaaatgagcccagactcatcctacctgtactttttgcattatactgtgggtactttcttggcacagaaagcctgtttcacagccaggtggttcctaggagcatgggctctgaaggctgtggatcgtgcatccatctccagccccagccagtcacctggctttcatagccagattctgactcttggctcaggccggctgtctggctcttcctcacaggccctggatatctgcctgacctcagtttattccctattctttcctacagtgatatttttcctgacgtcacttcacttattgctactgtgattatgcttccaaatcctctagctttgaccctgatcactccctctgactccgggactacacttctagctctctaaaggcttccaattgcttgcagtttagaacagacacttagcatggcctccaagtcttttcataatctggtcccaaactaatgctgtagcctcacctcctgtcatttctctatatgttgtagccttacaagactttccaaagagacctcacactttcatatctataattctccatttatgatgttctttcctcctgaaatgccttttcttgcttgaaacatcctacacaaacttgaaggtccagctcagatgtgacccagttatcagaattagagttcacaaagatggacgtgggcttggaacaagcaaaatccccgtaatcagaattaaactccaaagggtgaggctagcacaatttaaggagctgttgctttaggccagatgtcataaactttctgcacaaggctagatagtaaatattttaggctttgtgggtcatacagtctctgttacaactacttagctctaccattgtagcagaaaagcagaaggcagccatagacaatatggaaatgaatgggcattactgtattctttatttacaagaacaggcagtctatggttttctgacccctgttttaggttctgtctggggaaattgggtggtttgaatctgtaggtgacaccaagtaggaatagctgtagaggaaccaggcagagtcagaaaaatgtgcaagggactcccaggtagggaatagtgttaggatgaggcacacgcaggggaggggaaggcaaatattagaaacaggagggagttaattttggctggagtatgggatgcttgaaggagagaagtggggattctgttcagaaaggaaatttagggccaaattgtgaaggatcttgattaagctattctgtggacagtggggagccattgaaggtttttgatcagtggaatatggtcacatatcctgaggtcaggagttcaacaccagcctgggcaacatagtaaggccctgtctctacaaaaaatagaaaataaaaaataaattagctggttgcacgcctgtagtcccagctgcttgggaggccgaggcaggaggatcacttgagcccaggaggttgaggctgcagtgagccatgatcatgccaccacactccagcctgggtgacagaatgaaacactgtctcaaaacaaacaaagacaaacaaacaagaaaaaaacaaattcagttggcccagtgagaagaatgattggaggagacaggactggatacaggaagacctgctggacaaccgcagctgtccaggccattggttcctgattgctgggccttgaaccagtgctggtctgaatgcctaagaattgtttgtgatgcttgctaaaaatacagattcccagtcccacacccacacacaagagatttgggtttggtagattcaggatttctaacaagctctccagattggggcatcactggtccaggcaaggcagaatgaggcctgatattaagagggcaaggatgccagagaaaggaaggtatagataacatgagatttggccactgctctcttcctcctgttacctacctctgttcatgacagcccctccacttgattccttgttcttcacacaccaccactagccccaacatcctaatttgcttgtgtcctgtcagttctctttgaaatgagtcttcttttgcttttttccatttttacccttatttagggtcccattagtgctccactaccctgacctccctgtgttcagtccatcaagataatcataaagcccagctcagtcactctccagaaactttttgggctgccttttattttaggatgaaggtcaagctcctgagcttagcattcaggtcccttcaggagcttactctccttccggtctttccaagcacatccctgccactccccctcatctggttgctctgtgcttttgaaattatgctgtacttgtagtcttgccccatcctaatgtctcctccagtcaaccctgttcattcttccctttttccctccctgcttgtgtgtgactggatcttcctggtgggtagagttaactgccaagggagacctcccaggacctttgtgcatcgtaaatgtgtgtcttctccatccgaagtcctaatcctctgcttgtgacggacaattggtcactatggcaactgactgtgacgtcacaggataaggacttcaggtgaagtggcaggagcaggtgagtatgtaggagacagatttcaatgtctgttgaaggcccccccacaccctccttcagtgccgggggcatggagggatatcttgggctcctgctgttttttaaaatgatgcggtgagagtgtgtgcctggcatctgcgtgctgcagcagtgtggggctgacagagtgtgtcaacttgagctctggctgtgcaggcaccgctgctgcgtgagcctgttattccattctggattgctattttgatacccagattgcatcattcttcctacgtataaacagggggtccccagggtcctgcagctactcacttcaccaccaacactgttgttgtgatgagctctatttaaatgagctgccggatcggggcaggttccagccacacatgagcactgtcattttggggaacatggagggctgaaggatttttggatggagtcctaaaaggctgagagtgctgtctcccgagctgtgcagagggcgacagagctagttcctgaaagttgaaaatgtcgttttcttccttctgagcttctattccaaggcacccagaggattaggaaggagatgcagctaggaagagagtcgcctctttgaggtctccctcttgctgttcagtttgggaaaattgctgcagagccttcgagataaacagaaacaggaggagtcaaccaagctctttcttgcaggagtatctcaggtgagctagagaaatgcagccctggctgaggatgcatcagagaaaggaggagaggatccaggctgctccccttaccctatccagtatccattccccgaggcttaggccttgcagcccgcctggctgcagcatgcagggtgggtgttcctgggcgcttggtaagcgccatcctctgggacctgtggtggtctcacctgtcgcttctctgacttctctcccagtgttgccctaatcacggcagcagggccacagataagcctgctggcagctggggcagaagcagcagtcactttaggggtgacttggacaaaaatttgtctttctagcagggtctgggtatttggggattgggtgcaacatgtttcttgaaggtggtgctgctctgagtggtgggttggaggaagccttcaggggctgtgtggtgggggccttagctggtgctcctggtgctcagtagactggggctgcccgggggtgggagggcaggactgttggtgaggatgtccagcctgccagaggatacaactagagtgttttttctcgttgcttagtgtctgacagaggcatagggaggtagagcatcttacctgtggctacagaggtaatcagggactgcttagtagttcacggtatcacctatgttatacaagggccatgtgattttagctaagctcctccctgtctcagggcctccatgtcatcatctgtgtggtggggaattggctggatgaacagtgaagctctgtccagctttgggtctacgggttggaactagcggaggagcatcaggctcctccagtggatgctattgctctgttgggatcagagctcggaccccagcttcaagttgcctggagccctggacaagagctgtggaatgaagtcttcctaaccctcagaggattgcttagcattggcctcaggcttatgcaacgagtgtgtcttcacttggtggcctaagctgacccgataccagctttctgagacctctttgggatttctctcctcccctacctctctggtgtccgtgttgccttggccctgctgttcatgtctgaaacagacatgtgtgggccccacttccttgctgcctcactaagtcttaggctcagcacatgttctaggtcccagcagcggtcttggtagtgccaaacctcaggctgcactctaggcctgctcatgggtcctgcagttgagctgtgggagtctggctcccagctcagtgccaatccccgggtacagggatatcaggtcactacctgtctgttgggaatctgcccttttctctgccagaggggagctacatcacagctgaattcagagtctttcctaacttcttagagtctctttttaaagcggggtgagcctgcctttctcagctgcatgatacaggagacagctatcaggctcagccacaggggaaggggatgctctctctaaggtgctgggtctcaaacttggttgtacattgtattcgcctggggaattttttacacatgtaaagtgcctggttcagagagtggtggtgtacacatgaaaatttatcccacacctctcaaggaccagaagtgtttgcacttgtgacagatggactaaatgtcctccgttttcagagctgctctgctaggctcctaagttctcaggaacacctctggtgtctgtgacttcctcattctggaggcagaagccccacatctcctgaggataatcatgtggacttggggccctgtctctatatttctcagaatcagtgttcttatatgtgaaacacaagagtagggctgtcatttgaataataattaactgagtaaaatagaaaaaagcatgatatctaaataatattttatgtgcagtgtgatttaaatatgtatttataactaaactaatattaaatattgttaagtagatgtttgattatacatagctctaagagttgatatatgccttgtctaaagtaaaactttgttttgatatcctcattaaaagatggagaatctctttaaaaataataaaaagtcaaggttgacacagcttgatggggttagggactttgtgagggaagagaagaatttctggacaaaggtgttgtgacacaaagggagtgcatgtcctttggatccactctggggcccgcagcctccctgggacagtgcctgcaccactgtgatggttctccacctctgctctttgctgcacagcccctcttagagggctaatctcttaaatccaggattcctttcaactacgagcttgttccctgactttctgacaaggctgatagccagggtgccatttggctgtctgttccttcctatcttgcccaagagaatattttttttttaattttttatttttattttaattttttttggagacagagtctcactctgttggccaggctggagtgcagtggcataatctcagctcactgcaagttccgcctcctagcttcaagcaattctcctgccttggcctcccgaggctgggattacagggtgcccaccaccacgcctggctaatttttgtatttttagtagatactgggtttttctatgttgaccaagctggtctcgaactcctgacctcaggtgatcctcctgccttggcattccaaaatgttgggattacaggcatgatccaccgtgcctggcctccaggaaaaaaaaacgtctggctgctgtaggcagagtaaatgggttggataatttgtactcccctgcattcctattccctcattttaatggtgtagaaagtaaggttgagtgaaagggggtgacttacccaaggttacatagttagatactgccagccctgggcctagaactcatattttttaattaaaagcttttcccaagccccacacctctgctttccttataaacctgcactggctttttttccagaaaacttccaggtggcttcttactactttcagtgctgtgagtgcaaggagtacacatggaacacacaaactcccgaaaaatgcagtcctctgccaggcacagtggctcatgcctgtaatcccagcactttaggaggctgaggtgggtggatcacttgaggtcaggagttcgagatcagcctggccaacatggtgaaaccctgtctctactaaaaatacaaaaatagccaggcgtagtggcaggtgcctgtaatcccagctactcaggaggctgaggcgggataattgcttgaacccaggaggcggaggttgcagtgagccgagattgtgccgctgcagtccaccctgggtgacagagcaagactccacgtcaaaaaaaaacaaaaacaaacaaaaacaaaacagaaatgcagtcctcatttaccatcatcaactagattcttaaaaactgtgattttaagcaaaacaatgtacagcagttccttaagtaaacatccttttgttataacattgatgaagaaaactggtttcattatatgtcatcatacttaaagttgccatttccaagaacctaccactgatgttaagtgaggacttactctataattgttcaatctgctaaaaaccaggtaatatcctttaataccaactgtggtttatttttgtgtgcagacatatgaacaggtatttaaaatgcaatgtgatattcgttgtactggaaggatgttcagggtgctgcgggaacccagaagagggactaattaactcatcccgggggaaattgatcttgctgctcaaaggtggaacatttgaacaggtatgaaaggatgaataggagtttatctgaaaaggagaggggcaagaaagagtatttcaggaagaggaaacagcatttttcacagacacagagtcatgcaaaagtctggtgtattcaagagatagcagagatgttgggcatggcaaaaacacaggttgtatgttaggcaaagctaaagatgagattagagagagataaggtcaatttacaaggggcattgaatgccaagctgaggactttggctttaaggccaagggagcagaggatgtgtgatgaggccttgtttgacctattcagttctttctcttttttcattctgctcgtgaggccatgttacaatgactgatgtttgggcatctggtacccgggatgtcttgtggaagtcgttttcaacaattagagcagcatttctgtcctgctgtagatgaggaggtcacctcagggtgagccaagtggaagagagggacagtagccttattcccctggatgatgtcacctgtggagagcatccttctccacctctggccattgttcttgacaggcaggagaatatgcaggacattccagatacagtcctgtcattaacacccatggctctgcaaaaactcagaaagtttttcttttcttttcttttctttttttttttggtggggtgagggagtattaaactattatttttcatgattttgtggatttctattttcctgggatgtatcagttagcttttactgcataacaagccacctctaaactttgtgcttaaaacaactaaactttatttattttatgattctacagtttggctgtttgggctgggattctctgggtaattcttctggtttggcctgggcttagctaattataactgtgttcactcttgcactgtattcagctagtgggttagttggggctggctggtctatgatggcctcaggtgggatgcctgagacaactgagaactttctctgcatgatctctcatcttccagcagtctcaatgccaggttagatttttcacatggcactcttaaagttctaagaacaagagcagaattatataaggccactgaggtctaggcttggaaaacttgtcacttttgctgcattctgttggccaaagaaagtcacaaggtgagcttagattcaaagggcaaagggtcctacctcttttaaaaattaaaaactcatcactgacctgaagctcgtggagagtcttaccttttgatggtaggattgcaagggtatggatgcagggaggggaagaatttgtggccattttttgaatctaccactcaaactaactttcgtcaccagagagttggtaattgagtttattgcattactgtgaataggatatgaggaatcttttgaactccaaagttgacattcatggaggaccatgtgatttctgaagtcttatctaatttaatgtgcacagcaactcttattttccctattttacatatgaagaaactggggtacagggcaattaagtgagattaagtgttttgcccaaggtcattggctggtaagcctggtattttggacttacatttgtctgactataagtctggagcaactgccatcatatcattctttcgtattttgaagagatgagacagaggagattgtagcggtactgctgcattcactgccatagccaacccctttccagatcaccctcatccctggacacaggtaccttgccctactccagaggctcattttcttgttcctagtaggttgactgcccttgcggtgggccggcagaatcactgtggtctccagggtgggagtcttctgctgcttttatagtccagaagcccactatgctgaagaatatgttagagactgatgtatttctctggggagagattgtaggtcaagctgttcataggtaaaatatacatatatatgatgcatctaacttggactatggggagagagccctccaaaagacctctgagcctcagaggcagactgactggtatatgctgtactaagagaaaaatacctcctagatgagcgggcagggaggccttgcctttctctgactaaagccttctggaggctttagcttcgagatcttccaagtcatcctgctatgtggtaaccttaatgacctggaactgtgcccagactaaactgactctggatcttggctagtgatgggagctgtgctctcagggatgtggaatgaggaatgggagcagcaagaaggcacctgattgtcagaaccaaagcagcgttgggcctgtagtagcatggtttatggggcagggaggaaggtaggaccaggtaaagacaagaatgtgaggagaccagatggtctgtagggaaggccccaatgggatggtcatgttcagggtacccacatactaaatgcaggctatggcatcaagtgtagttcattttggcacacatgggtattgccatgtatcttggtgttgtgtattagaaagccttatgtccaggccttagttataatcagccatgttgccctgactctgctatctttctttcttgcacagagctcatctcctgtcctgggtgtgaacgagtatatcttaccagggatgtaactgaacatttttttctgcattgtgttcctactgagcaacccaagatggccagggtaagtcaggacaaggaaagaagcagctgatctttttcagaaatctgtgaggcccctgtccataagtcttctatccatccatcactctatcatctgatttgttacttctccatcagttttcctaatcatccatccatccatctagaagaaaataaaaatgcatgagttgggggaaacaatgagggggttttctattaagtgaaaattattgacttttttttgtgtcaatccctttagcagaaggtgaatgtaagttaagatatattaagagttgcttactgtctatataattatttttctctctcttacagctcttgctgaaaaataccagtactgggcttttgttttatttttttaatcatcctgagttgaaattcatgtaccagcctggattaaatgggtttattaaccttgcctgtatttaacaactatcacctttttcctgagtttcttaaggaaatttttatcacttattggccggcagcccttctgttcctctttccactagggtaaattagtaaattagtaatttactaatttacttacttgttcctgtatctgatttgtgttgaatgtctcacatgtgccagaccctgtgctggatattagggagatcgacccatatactctacattcaaggaattcatagtttaattagtagaactttcagaattcacatcagtttggtggcctctgtgattcagacacagataggccaacttttccaaatctccccttctcttgatgttttataatagcccgggcaagatatttgcttacgaaatgaatgaacatttggactaggagaggcctaggtaccctcagatcaggcagagcccaggtgtgggagcacaactctgaacgctggtctatacttgcccttccttggttgcatttgaccatcttgctgtgtactcccatatgtgggctttctcctctctgaagcacattgaatttcctgcttttgccagtgctttccctctgttacaacattttcctcccttatctgcctggtgaacctacttgtcattcagtatccagctcaagtgtttcctttttgtaaaacctttcctagccactcctagactgagttccaggaaggcttcctttgcttccttagcatgtgttgcatccttttaattacagcattactcagttaatgtgtaccatcctgtgtgctgtggatagcatgagatcagatccttggcttacgcatctgggtgtccttagcttcagcacaggacttgtgtgaacagcccctgagacagctgctgctgctgctcctcctcctcctccctccctccctccctccttcccttcctccttcccttcctccttttccttctgctccttcccctcctcctctcctcctcttcctcctcctccttcttcttccttctcctttgccttcttcctcatccttttttgagacagggtcttcctctgttgcccaggctggagtgtagtggtacgatcttggctcactgcagccttgacctcctgagctcaagcgatcttcccacctcagtctccctagtagctgggactacaggcatgtgccaccactcccggctaatttttgtattttttgtagagatggggtctcactatgttgcccaggctagtctgaaactcctgggctcaagcactcctcctgccttggcctcccaaagtactggggttacaggtgtgagccaccatacctgaagtagccactgtcttttggttacaaaggatgcttccttccacaagccccggcatgttactcccagacagctctgcagaataggttacactctaaactggtggaggaataggcctgcaggacccctgtctttagagcatttaccacttgtggaggcagacacaaatgaggataacatcagtaactccagaactctctgcttccagaactgctctgagtgcaaggagaagagggcagcacatatcctctgcacctactgcaatcgctggctgtgcagctcttgcacagaggaacaccgacacagccctgtccccgggggcccattctttcctcgggcccagaagggatctccaggtaccaatcccacctctccctgcccactcccatgccctaaagcagggctgaaccctaagatccctggagaatagctctccgatcttgttttcttgctgggggagaaggtagggacagtctcagagcctttcccaaaggaagtctccttcagagtcaaaggggtgactcactctcgtccctccctgttgatggtgggggtggatgagtgtggatgaaatggtatagagaggaaagtgttgaattattgtggaagctggctgagctccctgcctttcccctctagagtaatcatgttacccttctaatttatttacttgattaacttagtctggattagggcttgtttgtttgtctacccagcaccatctgttttatttttatttttatttttatttttttttgagatggagtctcactctgtcacccaggctggggtgcggtggcatgatctcggctcactacaacctccacctcctgggttcaagcgattctcctgcttcagcctcccaagtagctgggattacaggcatgcgccaccgcgcccagctaatgtttgtagttttagtagagatggggtttcgccatgttggccaggctggtcttgaacccctgacctcaggtgatccgcccaccttggcctcccaaagtgctgcgattacaggcgtgagccactgcgcccagccaccatctgttttaaatgacaatcttcttgaaagtcttttctcaaggcccttgaattgtgggaggggttctacaactgtcaaatccacaggaaccagagttcatgatccacgtgatctagcctggagcctggcaaggctggatagctggtttcagctccattaaaaacagaatcctgattaatgaacaggttaaggttaattgtgaaggattcattattttgcaggagatctatgtggagtagtagcaagcgccttcctcagcctctggcaggtagtgggatgcttgggcttgatggtgtgctatttctggacaactgggcaaatccagccaagctcagcccaaaatcctccttgtgcccctggagagtcatctcctgtttataacacttcccccgagctctgtatttctgcagtgtcctctgaaggctgagggctgtgcagcaaagcttaactgagaggtttgtctacctgagcaagagaagctcactttctctgtcttctctggcaggagtgaatggtggtcccggagacttcaccttgtattgtcctctacacacacaggaagtactcaagctattctgtgagacatgtgatatgctcacttgccatagctgcctagtggtggaacacaaagaacacaggtggggctgacagactgcctgaaatgggctggggagggctctggatttcttacttgtgagagctctgggaatccccgtgcatcagaatcttctccctgcccaagccaacctgcagcccctgggctgaagtttttctctgctcctgttgtaggacttccctggaaaaggcctaatgggccaagagcctgtggtgccttagactttccctagaagtcatcacagcttccatgggtctggctgagacagttccctgtggagattcccgcttagttggcatgctcaaagtaggactcagcccttctcagctttttctctgcctcatcccctaggtgcagacatgttgaagaagttttgcaaaaccagaggatgcttctggaaggtgtgactacacaggtggcacataagaaatccagtctacagacatctgcaaagcaaattgaggacaggtagcacaggctagtgccttgccagtgctggaaatgctctgttcccgcacacccagggttccaacaccaggccgtcagatgtagtgcctgtgaagaggaactgtggttaagcagatgtgggcatatgtcctagaaggcatatgtcttggcctttgaggtctcagggccagggaggggtcattaagtcatcccttggtggctgagaccaagctaggtcaggatgatcagagtgagtctgggtcaaagaatatgccttatgaactagccagaagtcggtgcttgagaacaagggtaccaagcagacactagggaagagagtgctgcttattatgagggtggaacaaaccaggggcaatctgtgctttatcacccctttccctgtgtgttctctgtaaatctacaagtcacatgaaatcattggtattttacataggaagaggaagtggtaggtgctgagagcacctcatgtgtcaggcactgggttgggtatcatatatgcattattttgttcagttcttgccattctttcagttagcgattttctccattttactgatgaggagactgaggttcatagaggtttggtaactcatctgagatcacacaactagccagtgactgtgctgggtttagatggtaggtctgtggtgacttcaatgcccatgctttttaaatttttaaaaatagctttactgagatataatctacgtatcataaaattattctttttaaatgtataattcagtggcctttagtatattcacagaattgtgcaactgtacataattactgtctacgtttaaaacattttcatccccccaaaaagaagccacattaatataaacattattatatgtttataataaacattatattatatgtttattgtttattatataattatatgtttattattgtttattatataatatgtttattatataatatgttattatgccaataatataaacattattagtcactctccattcccccaacaccccccggccctcagaaactactgaggcagtatgcattctgcctctttttacctcatggcgacatttattggagcatcctccttttaaacacaacaaattacagtaaattattcccatactttctcttttggtcctacctctagtgctgtgtcaactggtgggctactgggttgaccttggtgtagacttgaggtttacctagagaaaaccaagctgaactttgatcaagtggggctttgtacaaaaggtgggatggtggaggaaggctctcttttttttgtatttggtgtctgctaggccctgatctcagtaggcagcctccaagttggttcttatgtttgctgtctcttcgtcttcatatagtccatgaggaaagcttaccatggtttgtcccattgtgtttacaggatttttgaagtgaagcatcagcataggaaggtggaaaaccagatcaaaatggccaagatggttctgatgaatgagctgaacaaacaggccaatgggctaatagaggaattagaggtatgtatagacagatggatcagatggttgggttcagaaaccatccatatatcaagctagtcccaggacctagggaagcctaggctgtaattcagatatgcagcttccatagctctgtgctgctccctgtattttaaaatgtcagcctaattttgggagggtggctcattaagggctagaaaatcagttcaaactgatttttgatgctatgtctcttaggcagcttccatccttaactgctcagggttatagtcttggaagagaaagtcatgaaacaaaccaccttcttcaccaatttatgcccaagagatgtagacatttattcatttcctctttcatttattacccattccatatttgcactataaaatctcccaccatctccccctccccttttccatcagccagcatcccatggcaacactctgccctgctgtcctctcaggggtgtagtctcatctgattccatcagtgacacacacaagccaccagacttcccaagcaggtggattacagtccagtaacaggatcaaggactctgtcttctctctgtacccaggggattactaatgagagaaagcggaagctggaacagcagttacagagcatcatggttctcaaccgtcagtttgagcatgtgcagaatttcatcaactgggctgtctgcagcaaaaccagtgtcccttttcttttcagcaaagagctggtaagaggaatctcccaactcctcagcctgtccttgaagcttatcagagcatcccctttgtcagaggggcaatgaggcagtccttggaagtgccttttctttttaggatggaaggaggaataacatagcagctccatccatccttcaaattcaatcactgcttttgggttagtaagtaaacaccatcttttaccaaatcccatagtgcaaagaggacacaggtgctgaaatggtcctgccctcccaaaggtagctcagttgggaaagtctgtagttctttgtcataggtaattgattcagacattaccctggacatgagcagtgtgctgggcatctcatagaaagttactggggtttacacgggggtctgagagaaaaggagttggagataaggttgaagtattaggcttgagaggacggcagcacccaggagagggagcaagaattttgagagaagtcgatggagtttatatttgaatactttgaatctaaggtgcctgtagtgcatccaaaaccaactccaagctacctaccattaaaaagccgttttaatatatgggtgtggaagtcagaagaaaagttggttttggagaaggagatgtaggagtcaccaggaaatcagtggtatcaccttggaagagtgtgtggagcaagaagagagaaagtcaggaacccaaggaataccgtcattttcagcatagacagaggaagatgatgactggaggagagtgagaagcagtggtcagaggtgagaagcaatggtcagaggttagaagcaaaacagagtgtggtacacagaaatgaacagtttccaattttaagtggtccatttgacaatgctgcatgggtgaaagaagatgaatagtgacgagcagcctctggatctgggaatcaggctatcttctgaaagaagctccagtgaagtagaagggtcaaaagctagaatgaggagactgaggatgggtggtgacgaagtagagacagaagtgaaaagaagaaaaataaaaacatagcctgagaagatggcagagttgggggaaacttttttttaagcttggaaaacatttgcacacatgtatatgggagaagaggttgaagatagagaggaggggtgtgtggtggggtaagtacactgagaaagcaggaggaaggatatagagtgaactggttgaccttaaacacaaggacagtcccttcgtctgagatgggaggacaggaaggggacaatgctgtagttaagtttgagggtagaagggatacaagttggggtaatttatcctttatggtgtcttttttttctctgtgaaataggaggtgataataagagggttaaaacattggtaagtagcaccaaagtaaagattttaaatggtcattgagtgcagtggaagagaaagatgacaagaaaagaagtgacaagagaaagggctgaggggtgctgctgaaattcataatcactgaagtggccccagataacatggctttggtatggctggattacctaagagtaggagttggcgatggggagggaattaggacactagtgatatcatgactgtaaatgaaaggaagctgggaagtcctgtggactgaaggagcagggcttggagaggttgaacaacatactctgaaagagcatgaacttgttatgaccagggtgggttgttggagtttaaaggtctcataggtagaatggttgtaaatgatgaatagggtctaggtatggtgactaaactgaaaacaaggtggttgccatgcaagagatcaatgaaatgagaggctaagatgttcgttgggacattagttaactagaggatagcagggtaagttggacacttgccaaagccctggataaataggagagttagtgatgagaaatagatgaaagtgttgggagaggaagagggctattgagtaggacagaagggtgttttacctgcaagtggaagtacagcaatggggagctcagacaatgcctgcccccactaggcttttaaattgaggtgatggtagaatgaatggagctgccagtcaacgatgtagtgagggagaatgacaaatcacttaaggcctgaaaagataagaatgtaggggttccaggccaggtgcggtggctcacgcctgtaattccagcactttgggaggccgaggtgggcagatcacgaggtcaggagatcgagaccatcctggctaacacagtgaaaccccgtctctactaaacaaaatacaaaaaattagctgggcgtggtggcgggcacctgtagtcctagctactcaggaggctgaggcaggagaatggcgtgaacctgggaggcaaagcttgcagtgagctaagatcgcgccactgcactccagcctgggcaacagagtgagaccccgtctcaattaaaaaaaaaaaaaaagaatgtaggttccaggagccttgataagaggaaagggatcagctgggaggatggacaggtgctaaggtgcaagagaatgagaatatggaggatgaccagaggttaaagggccatgactttgagcctttcagcttgtccaaagagtaagggaaggggagttgtcatttaggtgcaagatgcccaaataaatgacctttggtgctgttgtcagattgtgtttcagatgcagcgattgctggagacaagttgtaacacagatcctggctccccttggagtatcagattcacctgggagcctaacttctggaccaagcagctagcttctcttggtgagcttggacccacccacccaggcctacccaccctgtgggctttgacttaattgcttaccttactgggtaggtcagcatatgcccaagagaaagcactctctgggactgccagtggtcatggaatcattcagcaaaccttttttttttttttttttttttttttgagggggaagaggagaggatgaggaattaaataacagtggcaatataggactttgtatcaggatgagttgaaatctgagtttaccattctgtgtaaatgtcctgttacattggttttattgctgaggaggagacaagacagtcaccctgctctccggaatgctgtatggcagtacagatgaatgtgtgtctctgtggtcacacaaaggtatacacgtgtgggcacaagcaggggtatctcagcaacagtgagactgcgtgtgcatgtttgtgtcacacagacatatcctttcgagttgagatgtaagcagataattcatggccttgtgcatttttcttccctgctgcaatcatttgctggcattcagtctttaggcagaatgtagacagcttgaagttgtgcctgtgttgacagcctaacgagtgttaaactgatggccagctgctgccttcatttgaggctgttaatcttattgaaaatttgttgaacttggcaaagtgacaaatgatatgtaggtttatttcttttcttccctctttcctttgatttaactcagcagacctttgatggccacctactcttgtttaggccccatgctgagcaccaaagaaccaatggtgaataaaacacattttccttaaggagctcagacttcttctaagtaagtctcaccaaaataatgagaggaaggagtcattagactgagttagccatagatctacttgtgcacaagggacctagaggcctcagggggcagtgccggtgcctggcactgacctggtgtattagtccattctcgcattattgtgaagaaatacctgagactgggtaatttataaagaaaagaggtttaattggctcatgattctgcaggatgtacaggaagcatgatcctggaacctgctcggcttctggggaggcctcaggaaacttacaatcatgacagaaggtgaagacgcacatcacatggacagagcagcaagaaacagagcaagggggaggtgttacacactttaaagaaatcaggtctcacgagacctctatcacaagaacagcaccaaagggacggtgctaaaccactcatgagggatccgcccccacgatccagtcacctcccaccaggccccacctccaacactggggattacaattcaacatgagatttgggcggggacacagctccaaactgtatcacctggtattagagcttccccactctcttccgtcctacttgctcaacacacagttccccacacctgtatctgggaacttgttcattggtcccaggcatggctctctaccctttgctactttctagcatactccctcccaaccccaaagttgattctttttgtgagagtctgattgggctgttctgttggaaaaaaatgagtgggtgctatttgagagagcttgtggtttccctagtgggacagaaacagagtcagggctgagcatctggtaaaagctgaactaatttctcaaatatcctaggcccccaaagcaggtgcatacaggtgctattactggcagcattctagaccgagtctaggagatcaagggttgagtttcttaatctctgttcctggtacaggattgttgaatgaggttcttttgtcccaggagcaggaagtagcaaggtgggagcaacttgaaaaacttttgaaaaactctctattctgcattttcaggctgcataactactgaaggtggacaaatgtccagggcagatgctcctgcttatggaggcttacaggggtcatcacccttttatcaaagccaccagtctccagtggctcagcaagaggctcttagccacccctcacacaagttccagtctccagcagtgtgctcctcatctgtgtgctgctcccactgctccccagtctcgccttccctcaaaggccaggtccccccacccagcatacacccagcccacagcttcaggcagccccctgagatggtgccccagcagctggggtctctgcagtgctctgccctgctgcccagggagaaagagctggcctgcagccctcatccaccaaagctgctgcagccctggctggaaacccagccccccgtggagcaggagagcacatcccagcggctggggcagcagctgacttcccagcccgtgtgcattgtccccccacaggatgttcagcaaggagcccatgcccagcccaccttacagacaccctctatccaagtccagtttggccaccaccagaagctgaagctcagtcactttcagcagcagccacagcagcagctaccacctccaccaccacccctcccccatcccccacctccccttccccctcccccacagcagccacacccacctcttcctccatcccagcatctggcttctagtcagcacgagagccctcctggccctgcctgttctcagaacatggacataatgcatcacaagtttgagctggaggaaatgcagaaggacttggagcttcttctccaggctcaacagcccagcctgcaactgagtcagaccaaatctcctcagcatcttcagcaaaccattgtggggcagatcaactacatcgtgaggcagccagcacctgtccagtcccagagccaggaggagaccctgcaggtaagcgtcagggtggcttggcgtgcatattctgcccatcgtaggatcactcagggaacacagcctccccaaaaacaaggcagcacaggaatacagtttctgcaccttagggctgccttgagctcagccctcacatttcaaaactatgctgggctcaacctcccacctcagaaaagctccagagagcatagtacccagtcccaaattagatttaggctcagtatactccggagtagcttggcttagccctgtcttcctggatgacagtagggaccctgcccaccgatggtaccttctgagctgtgctgaactcctgccagtgccagagcagaagagaggctgtctcttatcttgtcatctccctagctcccttgccggaccttatgaatcccagacagggggagggcagagcttaaggagcagagtgagggtccatgttagatgctggcaggcagcacttttataatactgcacagatatagacttaaacttttttacttctactaagctgggtatgttttatatgcaccatatcatttatcctaccaacaatgttgtttggtaggcattaccatctctgctttataggtatataagtgggagctagagaaggctagcagtttgtctccatatcatacaacattgagagatagagctaagacttggattcaggtctgctgacatttctgtaatgccacagaagtcttctttccacaggaggatattggatggtgcacctcttttttctcagctaaaagacagttgaaacagttgaagaggtgcagtttgtacccctgggatctttgctacatttcacatcttcattcttagctcttgattttctttttcttccccccagaacctcctgttctatcctcttttctctacccttctctcactttttctatagtggtatcccctttaaatctgtaatcacagttatatcttcaaagcagctttacagatttttactttattatagaatataaggcctcacatttacgcttcagtactgacaacttcagatcatgcttcaatgtcttcccctgaggcccagttcttttgaggagatatagaataatccatgtgatggcagagaagggtctagggttcatagagggccacaagctaaaatgtaagtcaaaactaggttatgattgctaaagtgaatatcacaaaattagctcagaattcttggtttgggtttcatcctaagacattcccattagcgtgtagtctttggaagagttgggataagagtatttttctttttggaaaacgtttaagcagtccacaatgtgcaagtggtgatgatgcacatggcagggtgagcactagcctttgctgccactgctgctgctgctacgctgtctgcagtaaaacccacccaagttcttattttcttctccaggctacagatgagcccccagcatctcagggctcaaagccggctctccctcttgacaagaatactgctgctgccttgccccaggcgtctggggaagaaacccctctcagtgtccccccagtggacagcaccatccagcactcctctccaaatgtggtgagaaaggtactgaaggagcctgttttccctaactacatgggacccactgccagccaagaccccaggcacttggaggaggaggatagggtggggggaggagcgtccctgttccatccctggacgctacacagccctgattcatgccttctgccgtagtgagtcagcaacctagatcttcctcctccccatttccactcccccacgcacacttaaaatgggacctcctgggcttcatgcagagtggaaggaggaagggaaagagagccaatttattgaacatgtactctgtgcttggaaccgtgtgtgctgcttcaccagcattatctcacctcacctccaacatttgtggaagtgagcatccccattgtacagctaaggaaactgaagtccagggccttacagctagtagacgagagagctgaggtttatttaaaatgagatcagttagaatccaaagcttgaacttttctgtccacagtgaagatggggaaaatattttttgtggcctccacaacccagagttggataccttaggatttgaatcaatggaatttgttgggtgagtgatctgcagggatgttctacagaggtagatgagcagctgagacacagagatctcttgaagatgagctcttggaggcctttctgtccacccacctactagcttactgaaagtgttcgcttaccctggacataacccagaaccccacaaatcctcaactatctattctcacctctgccccttcacccccaacccctgtcatacatctagctggagcctcagtgctgtgcctgtcctccacccattcctcctagtgtcccttggccctgtttcacttacgctattgtcttctctggcctggtgccctcagctctccagtgcctccacccagccctggacttgaagctctgtcaggtgttctgaactctcccagcctgtacccttggccctgtagcatccctctggccctgcagcccagctatgctggttgctcagtgtacctgcccctcaccaagtttccctagctctgtaccattgcaatgcatgtcttagaacagtcagtctccgtgacacttgaggagagtttagaaaaaagaagggatggcaaaaatgaaatgtcagcttggaaattgctggtgacttttgaggctttttgtctgtgcctgtcctaccctgttgaaaatgacttggcatagaggcccttgaggtactgtatattggccctttgtggctcttagatgtttaacttcttgtatttgggccagccacctaaccattcatccatttatttaatcatttaatgcatatatataatgcatatatatatatatatatgcattaaatgattatatctatatctatatctgagtatgtgccccatattctactaggtgccaggcatacattggtgaataagatagtcggtcccatgctggagagtacagtctggtggaagagacagttaatcaacaataataaattgtggtaaagtgctataatagtcattggggtacaccccattggagcacctagctctgggagagggggctgttgacagaagacttcttaggggacattattttaagctgaaattttgaaaaggagaagttgggctagtgaagggtagaggggtagaacaaatagtcaaaaggaatggcaactagggagcttcagaagtgagagaaagcctggggcagttaggggggcttcagataatttgtaatttggcttgataggatcacgagatgcactggggaatgggatggattgaaaccagaggggctgtaaggccttctaaattatgctttggaactgggattcagtcttgggggatgtgaggagtaagtgaaggacttccagaaaggagggatatggtttgaattaagtttgaaagaccactttagctgtggtaagggagaccagaatagtacagaggagaaacaggaggatgaatgaaatcaatagcaataggaatggagaggaagcaaagatttcaagagatatcagatcacaggagttttggcctcagtgtctaattgatgataggtaaggcagagaaagccctttggcttaacacccaggtgttttcccatgctcccatcccagtggatctgtcttgacccactggaatgggagcatgggaaaaagagcatatttaggggaagaagttaagttttgaattattgctattcttttgtggaatacacattagaagatgacctgaaggcagctagctctagatgtcagtagttcagaagcaagcatgagagttgctgtaaccgcctgatgggttcttcttgcctgctgcacaagtgaagaccatggcattgcagtagagaaagagtttagttgatgagaggctgggatttttcaaaggcagtttggggaaggggtgggggtggctagaaataggtgcttgctgctgattggttgggatggagatgaaatcatgcgttaaagctgtccatttgagctgagttgcttctgggtggggccacaggagtgggattgatggatctgggtgaagccatggatgtcagacatgcagaaaagttgagaagatatctcaaaaggccagtctacaataggcccaggaatgattaagggaaaggcaaggggtgggagtgggtaagttagatcagatctttttcactgtcataatttgctcattgatataatttttgcaaaggtggtttcattgccagtgctcagttgtagtggaagccatgcagaaaatgctgcttctcatttgatgaggttcagttctgttcctatacacagagcagaggaaaggagctgagcgacatacatgcatggagtcagtgctgcttgtgtgaatggccaacagggttccctgagcagcaaggggtgctgcccttttgtgtggctgcaagttggcaatggggttagcaaaggtcctaggaattctatcttctcattttgagctgcttctgccccttattaaaagggactcctgtagaggtttggaggggcagatggcctggcattcttcatgtgtttcataggcttttgatggcttgaactcccagaaaaaggaccctcaagtttgtcatcctggcttagaggaagctttggattggcagagagagatcaaccctgacagtgagagccactggttgtccacaaaactactgcaatgaggaaaagggctttctttttgaggaaatttgttgccttggagctggggttgggcagggtggagggtgtgaagctcaaggatagcaaacaacattctgagccttttaccattgagtgataatactttgtatagtatcgttctaattttttcataggtttttacatggattatttcattttatctctttatcctagcaatactatgaggaagccactttcttattcccctttgaaagatgtggaaactgagacacagagaggttaagtgacccacctaagagttatgcagccaacccattgggcaatgttaggaccagaccacgggtccttgacagctctgtgttcaatgactaggttaaattgcttctctttctgcactgcaatgggagaaataggactccatttggcctcttacctgctggattttcctgtctttacaatccttgaagtagcccgaggctttgctggggagaggtcttaggacccagcctagtttggtattggttgttttatctggtaaaggtgttttgtcctccatcccactcccagcctgtgctggcctgtgagtgccaggaaagtcaaaagaatctatctgaaggtcatggaccagaagaacctgtggcaccacgcacctttctgcgagttccacactgactgtatttcaccaaaagaggacttttggtgaagcagaacatctgcgtacaagtaccttggagttggtgctatgtgagccgatggtggaaacaggttgcggctgaaaatgagatgtgaaagttctagaatggattttctagtggcttgagctctgcaaccccttttgaatgaattttggtatttgcctggcaccagctgttgcctaagcttcctaatcttgattcagccactctgaaagaaagaccatggctacaaccctaccacagcaacccttacatctcaagtgaaactgggagacattttgatgcattcatttcatgcttctgaaccagtcaactgccgaaaaatacacacaatcctttcctcaaaggagttggccgggtgtggtggctcacgcctataatcccagcactttgggaggctaagacaggcagattgtttgagctcaacagctcgagaccagcctgggcaacatggtgaaacccagtctctacaaaaaaacacaagaaaattagccaggcgtggtggtgcatgcctgtggtcccagctactcaggaggttaaggcatgagaattgcttgagcctgggaggcggaagttgtagtgagccgagattgcgccactgcactccaacttgggcaacagagcgagattgtcttaagaaaatgaaaagctctcatggagtcaaagctgtaggcatcacagaaagccctatccgggtcccagttcacctgcaagagggacctttcttctgctgctcataacatagccccagatcttcaagagaggacttcgaggccaccagcatgcggctcatggcttaggagcctgagatgtatttccagtaaatgatacagaagcggtaggcattcctgtgatgcagattattaagagtgatacagaggagtaaaggataatgacccaggcagatagtatttataccattatcaaagcattttgatgcccgatctcttaatttgagtcttataaaaactcagtgagatttacattaagctgtgtaggaggaaattaaaacccaaagctggacaatgacttgcttaaactcattaaaccctggtaactgtgagtaaatactaggcatcctgcttccatagtctccaaagctactgctatggatcagattgtgggtcctcaacctcagggacaatcttttcctcatagcctagccctgacagcagcatttgctcagaatgttcccggggcctgctgaagctttcttaaggcacagcctgcgtcctggtcagcatctgcagaattatacactctttctactcaagagtcaggccaaacactccccaagtctggctcctgaacttagcacactctaagaagcctgtctccttagttctatcctgatttcattcaccatccaaacctaagatttttgtctaggtctcctggcccatgagaaaacaggtccttgctcctatctgtttaataagacagaatagtgtgtaaagtgttttagaagtactcctattcaaaataattttttttttttgagatggagtttcactcttgttgcccaggctggagtgcaatggcacgatctcggctcaccgcaacctctgcctcccagattcaagcgattctcctgtctcagcctcctgagtagctgggattacaggcatgttccaccatgcctggctaattttgtattcaaaataacgtttttaagtcagtttcctacactggcctgggcaaaatacctttgaccaaattctcctgagtctccaagccttggggtttgagggttccactcatcaggctttcacttcagacttactagaatccacttactcctttcctctttcttctacctcagattctgagatcctctttactttttctgtcctccctggattatcagggcactgggcacttttcacttctcccttcaccacccatgaaccttttctcatttggctttactaagttatcatatatctgcatagttacatccatagtgacagccttaataagtacaagagctttctcttgagatggaggaacactcattgtcaataagagcaacaactttgccattaaaaatcaacatgtgagggccaggcacagtggcttacacctgtaatcccacactttggaaggccgaggcaagtgggtcactggaggtcaggatttcaagaccagcagcctggccaacatggtgaaaccccatctctagtaaaaatacaaaaattagctgggcatggtggtggacacctataatcccagctacttgggaggctgaggcaggagaatcacttgaacttaggaggtggagaggttacagtgagctgagatcgtctgactgcaccccagcctggcccacagagtaagaatccatctcaaaaaaaaaaaaaaaaaaaaatcaacatgtgaaactgcttactagaaaagttagtcccttcctcagccatctgattctgtttcaagatctgctactgttaaaccagtctacttaatcttgaagctgttgaagcattcactttatttatttatttatttattttttgagatgaaatctcactctgccacccaggttggagtgcagtggcatgatctcagctcactgcaacctctgcctcctgggttcaagcaattctcctgcctcagcctcctgagtagctgagactgcaggcgcatgccaccacacccagctaatttttgtatttttagtagagacagggttttgccatgttggtcaggctggtctcgaactcctgacctcaggtgatatgcccggcgcattcacatattttgaggatttaattcaccaatctgttttcctctctcttgtttccttagctagactgaaggccttcagtgtgtttcctagacacaactcccaaatctgtggtccctttttctattgcatatttacacagtggtcagtttctgattactttaaccactagaacagaaatctgaaactagaagtgatgaggcaaagctttggaacagcagcaaaaacagccatcacaaaactcatgcattatattctgtaggaaatcataaactcatatgtgggtatctagccggtgttcttgatctagcaagcttaaatatatggttttcttgggaaagttttagtttagctacattatagtagtaagcagagtagaggcagggagtcaagatttctataagggcagctaacaagggagaagacaagaaacatcacttggaaaagtgccacggtatgaggtcattcactgaaagaacaagctaagccctgcattcttagaagttcccgaaagcatcactgaattacttattggttcatccaaattccttgatatcactaagaaatggtctccttagcctccttatgctctgcttaataagacagaagagtgtgtaaagtgttttagaagtactcccatttgaaataatgtttttaagccaattgcattttgttattgaaagaggtatgtttcagataactggaaagttaatttatgtggaacaccaccctatctgcattactttatccccagcaatattatcttgctgtaagaacctgaaatttatattaaactcagggcatgtgcactaagtgtctgtttattgatttctcaatcatttcttactagggcactagctttctagcttctggcacagaatcaagactagccagcctgttttcaaggctggtcccagattcctagtcttggacctgtatgagcttgggaaatctaggtaatcactctgtgtctcaatttcccttcctgttaaaatgaaagagcaatgttttatctgaattttgacaataccatgtggcaatcattagaataataatgtcaacacactgaactctagaaacacatctgggtggtaagagtgaggagagagagagggcagcaggtgacagagcacaggtcaagcagaattcaggttagatgggtgcagggtcacataggtgactagtagcagaggttgaaagtcagacaattcagggaagtcgtaggtcaggcaagttgtcaagttagatggtaaagacaggtaggttaaataggttaactgaatccattaaattaataggtgaggtaatttcagataagtcagacaggtggcagacaaagataaggagacaaaaaagaggcaagaggaaagggacagggacggggacacacagtttgggggaagggaaacgaggatcgagaggagatgctagttaagggaggtaagagggggctctgtaggctcagggttgtctctctccatctcccaaagatgacctgagctgattatcagagtgaatgtgttttggcattttgactcttcctctctgaactagaaaatagtttattttcagtagtgaatctcaaaatataccttttccttcatgaaatctagaggttttgtatgtaaagatgaagtcaaggtgtcagttacacagttgacagcctagaaacctcagtgataaccctctacgtactttatagctagaaatacacattcacctcctgtcatttgacctctgaacaatcctggggtctagagggtgggtggtatcatctccattgacaagtgagctcccttctgcatgggtggcaccaagtgtcagacaacctggccacgctctcaagcccttttccaatcccatcatgctcttgagaagtgcttcctctcctcccaggccctggagactcagcctgctttccttgctctgaaggttggccctacccttgcccccacccatcttgtagcactagcaacagactaggatgaaggttctcaaatcttctttttctttttgtacatgaaataagtaccttttgttttaatattttacaacccttcactctagagagccgatatagtataaaaataactaacacatagcatatataggtttcagaaatgccattgtgtctgcatagcctgtaaaaatggggttgggctggctttctcacagcactttctctgagtcccttcctccgtggaaattttccacattcttgttaatactaccagagcttcaccccctctcctgatagcattggcctccttgagattggctgtggctgtgaaaaggaaataaatcagtcaagtatgcaatatcttgggatgtattgctgacctcgtattgtcttctgggcattacgggaccaggttcatcaggttcacctcaaaataaactgccatggagtttccgcaatttttccacagctcagtctgcatgtcttcctctcccctatcattatgttaactcacatgtgcaataggtaattaggacaggagagccaatttcccacgaatatgatctctacccctaatctgggaagttttgtccttggggattttatcttgtgcatatcttgtgacgtatggcacctgaccattattatttgggtggtctcacgtggattttagtgctcttaatgcttggcaacaaggatctcactaagaagagacatctatataattctcaatgtccagcatgggtagattaaatgagcgccaaaaccgcactaaacatacatgtcaaataggggaaaggagaaagaatccagtgcaaaggattagactgtcatatattgcaaaacggaatgaaatagtcactgggtgttcttgttcatagataaggaaatatagaatattagaaagctatggtagtgcataaccaggacaacaaggagacattaaggaatgcaggcctgggcatgtttgagatagccattgatttttggccttggtcccttaagctgggcttcattcctagcttacccaatttggtttaaatattctttccaccttgcttctcttcaacccttcttgtcttggcactcagactgtggaggaaatggaagctttttaaaaaactgaacactattaaactactaaggaaaatataaaaagcatacttttctttggagagataaaagatatttaactcatctgtgtttaaaattaagaatagaaaatataagccttactaaagcagttaaattataagggaaagaggtagggaaagaagagaaagagatgataaaagaaagcaggacaggaagagagagaaggagctcatgagagaggagggagagaggagaagagggggaaggaaaagaaatagaacagaatatgagagatagtgaaggggagtaagcccagagaggtatggagggagacaagtcaaaattaagttgtagctttggtaccaaagatctggattctctctctttttttttttttttttttttttttgagacagggtcttcctctgttgcctaggctggagtgtagtggcacgatcttggctcactgcagtctcaaccttccgggctcaagcaatcctcccaccttagcctccagagaatctgggaccacaggcccatgccaccatgcctggctaatttttctatcatttgtggagacggggtttcaccatattgcctagggtggtcttgaactcttgggctcaagcgatcttcccgcctcggtctcccaaagtgctgggattacaggtgtgagccaccatgcccaaccaagatctggatctaaatctataaaaaaatctacatcaaatctacttagtgatgaaatattgaaaggatcctctgagttcagaaatgagactaggatggctactatcactacttctattcaatattgtactggaggtcttagctagtggagtgaggcaagaaaaacaaatgtaaagaaaaaaaaatagatttaccattcaggatgggcgtggtggttcatgcctgtaatcccagcactttgggaatctaaggtggaaagatggcttgagcctaggagttcaagaccagcctgggcaacatagcaagaccttgtctctacaaaaataaaaaataaaagttagccaatgtgatgttatgcgcctgtagtcccagctactctggcggctgaggtgggaggattgcttgcttgagcctgggaggtcaaggctgcagtgagctgtggttgtgccactgcattccagccagggtgacagagcaagaccctgttcagaaaaacaaaacaaaaacttactattcatggatgcacatgatttgtgtgcacagaaaatccaaaggaaaatcccagagtgactttagcaaggtctatacaaagtcagtattcaaaaatcaattgtatttctatatacagtacacaaacaataaagagaaatggaaatctacaaaattatgttttataataacatgaaaaaacttaagatgcccttctgagcctcatctttgtcaagtgtaaaactaggtctgcagcaacaataataacaataaaaataatagaagcagcagtagaaacaactggggtttactgagcatctacagtatgccagatattgttctaaatgttcacatggattgtttcttttaacctttaatggttattgtgaggattaaataaagtaatatatgtaaaacatttagcaaattgccttgcatataataaattctcaataaactttagctgtataaaaataatcattattttagagagactcatagactaagttgtcagtagacctaagctgctgttcatttggctaaagatttgtagaataaacagtcctgtattagtgttgttttgaatttttaaacagctcattaattcatttattcatccagacactgctcttgggtctaggaatatggtgggtaagcaaaatagataaaaatccgtaccctaatggagtttacactttagtaggggaaacagacattaatcaaatgatatcacggattgtggtatgaagctgaaagtacaagtacaaggcatatgagagcataaaagcaggaacctagtctggactagagaatgaaagaaggctttctggcaaaaaatgtcagttgagctgagttctgaaggataagtggaacagggcaggggtaggagaattctctgtgcagagaaagcagtccatctgaagggggtgaggatagtgggtggagggagagcttggtatgtttcaggaactggaaaaaatgagtgactagagttcagtgaatgaggagagggttattgaatgagctatggctacaaaggaggacagaggacaggtcatcagggcctcgggagtcttgttaaggatttttgcagttattctaagaagaatgtagcgcactgcggggttttatgaaaagaaatgatgtgatcggatccgtgttttgaaaatacttctccattgaagaggctactactgttgtctagggagatgtgaaagtaggttaggctagggcaccattagcagagggaagaattagtgggtatatttgagagatgtttaaggggtagaattgatggggcttggtattagcttgggtgtggcaggagggatgcttcactgatgcctccttcataggatctgacttgcagaactgaatgactaggagtgactttcactgagatgaggacagtgttcatggcaaaatagctttagtaactttatattgaaacttgagaatgtatttgaagtatttattttcctgtgaaaatgtgaatggggaagaaatgacaggttcaagacactgattttggaaacttagatagatatgcctaattcccattttctctttgtttttcaaaagatgtgaaattgttatatatttagtcttttttttaaagggcagggatatgaaacttacacattcctgaagattatatttagagccagtctccctccttttccctaaatctgtctcttcaatctgaaaaatggaatggattcagtacagaaatctgtatcttcaacttctttttataaaccttttacatctcttctcctcagatgtaagaaaataattttggagtcagaacattactgccttatccaatgattgtacggattgggtgatattaagatttagctgctttgatgttctctgcctctggtttggaatatctttggcaggtatactagggccagaaaagaccttcaaatatcttggttaaagcctacatcaaatgctagtagtgcttggagttgatctgaacaaccccataagaaggccctgcagttgacccaggttccccaggactgattggaactttctgagccttggcattctctcaaagaaggtctgaggcagataagagtttgagccttctcaaccccctgctacttttgtatagcagaaactattctatagcaccccttgacgggaagagaagccactggtggtatagtcagaggggaatttgaagttagagggcagtcccacagccggaccctttgcttaggtacaagactggggtgagggatatggctgtgtgtgtgtgtgtctgtgtgtgtgtctgtgtgtgtgtgtacatgcctcaggtcaggcaataagttctccttctcactcttgctgtgacacacacacacacacacacacacacacaatagttctccgcttgtgcctctctctctatgtcatagcctagcagcctccttggtttcaggaagaggaacagggcttcatgcattgcctgagttcctggcagctaccagcagctaccagactctgaagccagagtggaattggagcatgggagttcctgtgggttgggtccctcctctccctccctccattcccagctagcagcctgactctaccccttgtctctgttcctgcagcactccacctcgctgagcatcatgggcttttccaacactctggagatggagttgtcatctaccaggttggagaggcccctagagccacagatccagagtgtgagcaacctgacagctggtgccccccaggcagtaccaagcctgctgagtgctccccccaaaatggtgtccagcctgacaagtgttcaaaaccaggccatgcccagcctgacaaccagtcacctacagactgtgcccagccttgtgcatagcacattccagtccatgcccaacctgataagtgactcccctcaggctatggcaagcctggcaagtgatcaccctcaggctgggcccagcctaatgtctggtcacacccaggctgtgccgagtctggcaacttgtcctctgcagagcatccctccagtttctgacatgcagccagaaactgggtccagctccagttctggccgaacttcagggagcctgtgtcccagagatggggctgatccctccctggagaatgctctgtgtaaggtaagtcctggggaaatgctatccaaacttcctttgttcatcattgggcaaaagattggccactgggacccttattctgaccttagcttaacagttctgagaccactaatgacaaccatgtctgagttctttgattcttgtcgacatttcacttttgaaagatggaaagtgaggattccactcgcttcactgacttactgggacaaggtcccatagtccccggtctggatgctcccaaggacttggccatcccctcagaactggaggagccaattaacctctctgtgaagaaacctccactggcgccagtggtcagcacgtctacagctctgcagcagtaccagaacccaaaaggtgagactcaagcagcctgcccttcatgttggccacagacttgagcagatggactcagcacttctaggtaagagaggccagcagacaagctctaagctggggaagcagtgcatctctctgaggctgaatttacttctctcctccggaactgtcttagtgacacctgttctgcttccctcactgtggccatggctgatctaggcatggccaggacttactctttttgtaacactccccatgcaaagagtcctgggggtctgcattatacctagggggaaacagaactcagcccaggagggctagccttgacaaaatgttatagggaaaagagcatgtctgactttggagtccgatagatggaatttggtaaaccagttctctctccctgtgatcccgggtaagatacctaacctccctcaactgatttctttctctctaaatggggccaatcgcacctacttcttaggctactgggaccagtaactatagtgaaatcatttgataacttcctctgagtagtaaggattttcctggtacctgacactaatgtggatttgtgttgtgcctcatagtgaaggcaatttggaccattggagattggttctgattcgcttctcagcttcccatgccccttctccaaccaggctaggctaagtttgttcttctgtggaaggtgagggctagttgggaagtcaggaagcgacttcctgatgatcatttgggacttttttcgttcaatgtatgatgcgtgtttaatttgtaatgattagtctgtttcctatatgtgtaataaatgaaaacgaaagaaataatttttctccttttttttcacactgactgaaaggccaactgaaaaatcgttggttcttattacacacaataatgtaactctgcattttatgcagttaaactttttagaccctgcttgcgcatgtacagtgcctaggaccttgcctggtgctgaatggatgctagtttcatccttttgccccatcactgcctcctgcccatctccatagactgcatactcaggggagaactccctgggagcctcttttccatggagtgtgagctggattctcaagcactgctggaatcccagcacttggctgacatggcagaggctggacaaaaagactcctcagaggaggcaacactggtgtactgagaacaagtgatttctgagctcatcttgaaggtgagaaactggcccatcagtgcctgacccaacacttacccataggcagcctcttgagtgttacttgtgttcatctttttaaaagaaggtgggcttcctcctctcaagaaggagatccacggcagacttgtcaccactatgtatgaatgactatagtgtaggtaactactgtatgacagatgtgtggccaaaggtatgaatagcagatataagtagaagatatgcatgacggggtttgttgccacaaatgtgtgtcacaggtatttgtttgtcttttgccttagagtgtgagaattttgaacaaggagccctagagctggatgcaaaagagaaccagagcatcaggtaacagccttctggctaatctccctcccacccatgacttcacgtcctgagatgctggcacagggatgaagcatccttgatgaattaactacaagtggaagaaatttgcctgcaactgccttcctcaacccctcaaccttcaagtggatgtctgggatggttgtgggaggatgtcctggctcctgcaccacgaggcatgcgctctgggtgccgcccttgcacttcagggagctcctgtctttgaccaggactacaccatagggcttcccagtggctgacagggcctggccatgcagaggtgggccaggaggacagaatgtggtggacctgtagagtccacattcagagtccaaatccaagaggatctggagtaacaattcagctggggattgtattagtcagggttctctagaggcacagaacaagtaggagatatatatatatatatatgtgtgtgtgtgtgtgtgttgtgtgtgtgtgtacttccatatatatacacacacacatatatatatacatatatatatggaagtttattaagtattaatttacgtgatcacagggtcccacaataggttgtctgcaagcttgaggagcaaggagacccagtctgagtctcaaaactgaagaacttggagtccgatgttcaagggtaggacgcgtctagcacaggagaaagatatagccaggaggctaggccagtctctccttttcatgttttcctgcctgctttatatttgctggcagctgattagatggtgcccacccaattaagggtgggcctgcctttcgcagcccactgactcaaatgttaatctcctttggcagtgccatcacagacacacccaggataaatactttgtatccttcaatccaatcaagttgacactcaatattaatcatcacagggatcatggatgtttctgacttagaggttgggaccagaggaggatcccaccaagaccccggggtgtctgtcttgctgcagagccttcaatagtgagcataagattccctatgtgcgactggagcgactcaagatctgtgctgcctcctcaggagagatgcctgtgttcaaactgaagccacagaagaatgatcaggatgggagcttcctgctgatcatcgagtgtggcactgagtcctccagcatgtccattaaggtaccactttgctttgccttggccttaaaccctggcccagcttaagagcttattctttctgctactgcccgaattctgactctgggacctttcctgagtctctgatggggctgcagcttggccagacgttgtcccctgctgcaaggtcctgtgagatgcatattaggagtgaggtgtcccagcattcatggggcttgctggcttggggtcctggaataagtggctctcatgtaggcatgcagggcctgccagtctctccctcccctccctcgagagcttgttggttctgtgctctggctgcccagacttacttcttccccaaggtcagccaggacagactgtctgaggccacccaggccccaggtctggagggaagaaaggtcactgtcacttctttggctgggcagcggccaccagaagtggagggcacatctcctgaagaacacagactcattcctcgaaccccaggagccaagaagggccccccagccccaatagagaatgaggacttctgtgctgtttgcctcaatggcggagagttactgtgctgtgaccgctgccccaaagtgttccacctctcctgccatgtgccagccttgctcagcttcccagggtgagtcatgccagtccaggaccatcacctggctagtagggttaccttccagggatgattattccaggccaggcccacagagctcccaggatgggcttactcccctcttctggacctgcttgaattgcaggtctgtgagttaatgggcctgggtatcttctgcacacagacaggtggatgcttgacatttggttgacttcatttctacctcttttctcaccttcttcttgcatgtggatttgtgcctatactactaccccagcctcccctaacccctgtttttctagattcacaaaattctgagttattgaatttcttccaagcctgtggctagaaagccatttcttacacggcaaagccggagactcagtttctcacgcctgccatagggcagagggagagggaagggtgctctgggcaatgtgctgaggcctaacatggcctcacctgcccctgcaggggagagtgggtgtgtaccttgtgccgcagcctgacccagcccgagatggagtacgactgtgagaatgcctgctataaccagcctggaatgcgggcatctcctggcctaagcatgtatgaccagaaggtagggaggagtctttggaaacaaggttccctgcctttggcagcccccttctgcctacagggtctgaggcctttgagaggggatgaggggcttttctggatacatttctttgtcctatgcctgacaacttggcccaggggtgtttggataattttccttctcctagcagttttcctctggcttgggaacctgaattgtgccttagtatggcagctggcatcctgtgggacagagccagggagttatcagggtcaacatctttagttcatactgaggtgagaccagaacaaagtgactctgttgccaattctgattttgcagaagtgtgagaagctggtattgtccttgtgctgcaataacctcagcctgcccttccatgaacctgtcagccccctggtaaggaaggccacgctgttctctcaccttctccttgcatgtggatttgtgcctatactgctaccccagcctcccctaacccctgtttttctagattcacaaaattctgagttattgaattttgtgcctgctactgtcttttctgctcagagggcccaggccatggggcaggagcgtggtggttcccaggttgggctcagagcatggccactgggagtagtgacaatattaacttatggatagtccaggggaccgtagggccatggccattccagcctcccccaccacaactgctactgtatcagatcctacttgacaggtgacacattcctccttttcccttgctctttgtcttctttctccatccttttcttcctgctgctcctcatcattcctcttcctattctttcacttatatttcacctcattttccatttcttcttccttcttatccacacctccatttcttctctcactccctttgcctccttctcctcatgtctcctcccccaaggcccggcattattaccagattatcaagaggcccatggacctgtcaatcatccggaggaagctgcaaaagaaggacccagctcactataccaccccagaggaggtggtatcagatgtgcgcctcatgttctggaactgtgctaagttcaattatgtatgtcttgcctgttttccctctctcctatttccctgcatccccaggactgtcatgggtgggtagggttgggaggttaggtttggtctgggctgccatgaggactggggagcagattctgggggcctgctgtggtgagtgtttaaaagctctctcccacactcaggccttagcatggactcaggaaaaaggggaggtactagtgagtggccatctgtggatacctgttggggtcacttctgctataagagctgctaccaaactagttttcctgagtcctaggagaaaaatgtcaagttccagacacctcaggacaccccgctaggctttgtgctctgtgtagctcttgagggacccgaaagagatggactggtagaaacaggctagaccatcactgctctcctcccccatcagcctgactccgaggttgcagaggctggccgctgcctggaagtgttctttgagggctggttgaaggagatctacccggagaaacggtttgcccagccaaggcaggaggactcagactccgaggaggtgtctagtgagagtggatgttccactccccagggcttcccgtggcctccctacatgcaggagggcatccaacccaagaggcggcgacgacatatggtaaagagttactgccagccagcagcaggtgggcggtgatcaggcaagcagaggggcacccaagcagaacctaaggtgaagctgttcgggtggtgcaaaaagatggtggtgacaacgaaccctcacttccagccccttagcccccagggaaggcagggcagtacagggcccatcaatgccagttactcacgagacttgaaactcagaaaggtgcctgtccctgcccagggtaacccagcatttagcagcagacctgggctgagaaaccagttgtcctgattcccagtttggtgctggttactccacactgtgattgtgatgcccctaagaagggaattacctggtcttagtgcctggtttctatttgggtttgagagagaaaggaagggatctttcttagccccttggtgtaggtaaggaaggagaggtattgcttgcagcagagagagctcctctgatctttgggctggtcccacctgtgtagaccagaaatgtccattcagggctgtttaattccactgaaatattttgcctgcctactgtgtgccagggtctggccagccatccccagttgtttaccatacttagcatacaatgtttagtggcttcagtaagttttactgctgcattcctagggtagaataaaatacgttgacttggcagaactgcaatcttgacatagccttttcatgttaataaatcctacatttggctattttaattccaaatatatatttttctttcaggagaatgaaagagcaaaaagaatgtcatttcgcctggccaacagcatctctcaggtgtgagagccaaaaggagactgggcactctggcagctgttgtcccatactgtcgaccattcctccccatcttgcagcttatcctcttcagagtgtggatggtagatgagtcttgttgaactgtgtagtgctcttctttgccatttgcatctacagcatttatttaggagccgtagtacatccactacagagaagatttcagtaataaacaggaaagaggaaggtatttattattaccagagtaatcagatgtataggctccacttgacaagaccacacctggttaggctcgggaaaacctactttccttggtgaatttttttctgcctgggaaagcagacccgtctaaccttttagtgtccagggctcaggagccatgtatacatctgaactcctcctgggctcagaagtgggtaaaagaagggagagaggtttagacatatggcaggactgtgatccctggcccagcacagccaaagactgtcactgtttgcctttgcttgtcctgtctggatagaggcacctgccatgtgcagactagtggaggcttctagaggccataggtctcaatttgtgcctatttgggttctaacggttttcagggtatttgttttgcatagtcactttcctgatgttgacataggtggctgctgtgaaaatgctgtggatggtgtgacattcttgactgagctgggtggctgtggagagaccacttaaatcttctggttcagatttcacttacagacttagtaagatgtccacttcagagcccgccctctgtgctacttactctgggctaatcacacttctttagggtgagaacctgccttcctagaagtgactgttggtgcttgtcagtggccatacccttcatcatcctcattcagaggtatggatcgtgagttctgcttgtgaatactgtgagacagctgctgtctgcttcaggtccagagttccatgggtggagagagtaacccacaaccagctcactcctctgggcctctcctcctgcttaaagattctagttctcaacctctccaagttcatgagccaaagatcagaagtgagtcttctgaccagcccgcctccaggctgtctacagccccaaaaaagccaacacttttctggcagccctttttgttggaggttagagaaggcctcagggaccaacaggggccagatctagacattcctgggggaagtttgtctaaggtggacagggggaaaaatcaagaggcaaaaagccagtgtcctttggtgaccatgaagcaacctcagagccttagttctcctagaatgcagagagaagcattctggaagccatgggaacaggagctcgaggctgcatcctgaatgcatctgcatggccctcgcagggtgtttgtgaggatactggaggtcaggctacctcccaagcaagggcttggttgagaaggaacccattgctcatattgttgggggagctatgaacctgacatgtcagtggccaggactgagacagctctccctggtcctgtcattgcatggctaatttcaggggagtctgaggtcatggctttatttttgctaacagatgaagttcaaggatgttcttgtttgtagggcctttgctaatgagcagttttttaattagaaaacatttcttctctctttgtgagttgatggtattgctcatttccttctctacccaacctgagagatcatcttcactttaaagcaaaccatgccccttggcttgccattctttcagcagcacatgccacgttctaagcagatgggcttccgtgatcccgttttctagtttggggtaactgagtcttgaatgctttactagtccggcaatctttggacttaggcttctgccctttgagactcacatgactttctggtttggggtctggtcatttccctttcaatttttgaatctccttctctgttcagttggcttggcaaagtaccctctgttctcatgtcactaattcctgctctaggtcatctttcctttgtgcagcccacattcccaccatcctgtgaactttgttgtacttggtgttgggcaactggtgagtgttgtgacaggctcagacctgatccttcctcaggagcaattggagaccacaaatttaaagcagaaatacctgttaaaagcttggctttccttatatgagtgaggctcccagcttgggtgtggcctcctgggctcacggatcagcttgctgggccagagggggtcttagtaatgtgctagagagacacatgctcccttctcatcgtagagagcctgcatgctgagaggctccctttacacacctgcctctcgctggcttttcctttagacctagccaccagtgttttgaatcatggttttgttttgtttttgcatgcaaaaaccagaacatgacttagaaattaaaaaaaaaaaaatcctactagccaagtgactgcctgcagaggctcttcattaacatttgggctgatcctgcttttgacttattcccataatggcccagttttgaagtcagccaagtccttttgtccttgacaacatcatgcagtggaaatacggtgagttctagattcttatgggacagcatgcagccctagaggaaaaattgacttcttgggtatgctgagaaataagacagtaaaatggcttcagttgatgcaaggggattttagttaaaaattggttcaggatttttaaattttattttattttttggctgggcgcggtggctcacgcctgtaatcccagcactttgggaggctgaggtgggtggatcacctaaggacagcagttcgagaccagcctggccaacatagtgaaaccctgtctctactaaaaatacaaatatcagccaggtgtgatggcacatgcctgtaatcccagctacttgggaggctgaggcaggagaattgcttgaatccgggaggtggaggttgcagtgagctgagatcatgccattgcattccagcctgggcaacagaacgagactccgtctcaaaaaaaaaaaaattggttcaggatgaacttgcagagcactcttccacagaacatggttaggttagccctgcctgacttctagcaattgctaactatacaccttgcctgcctctaggacccctacctgagtggcaaccataccttccataggctctgttccatggcagtccctgccatcccccaccagcggactctggctccctccctgtacccatttctagcaacagctccttgcctggctgctaagacggaggcgcctccttgtttgttcctgggctctgttctgctccctctctcactccatggagtcacttatagtcttcctttctgaacgccagaattgagcctttgctccttctggatcaccccttcctgggcttcttctccatccctcagtactgctaaaattgccctgctcctttagtccatttccatgacctcagccctctctctcctctccttgtcttttaactttctcctggacttcttcctctccccagcatgaacccagagcctatcacacactgatgtttttgtcagcatcctgaactttctcatgcccttcaactttatttatttatttatttatttattttttattttttgagagagagagtctcactctgtcatgcaggctggagtgcagtggtatgatgtcggctcattgcaacctctgccttctgggctcaggtgatcctcccatctcagcctcctgagtagctgggactacaggtgcatgccaccatgcctggctaatttttctactttaggtagagatggagtttcgccatgttgctcaagctggtatcaacactcctgggctcaagcagtctgcttcccttggcctcccaaagtgctgggattacaggcgtgagccactgcgccaggcgtatccccttcaattttgctgaaactatcagccattctccattttcggcatcatcatatttgctgcttccacctcctgggctgctatgcatgacagattcacagttggcagcctcagttgagctctcagtgttgactggaaattctttaacttgttgtgatccctttttttttccccacccatgcctccatctttgtcctccacaaatgactgagctcactgtctacttcacagaagacagcccctaaagcaagagcttccttgcctgctgttcctctctcccctctcattcatctgtgtctgtaactctccccaacccctccattcttgctcctatttaattctctatatcttgaatcctgttgtatgtcctccaagactgctccctcgcttactccactgctcccactccctggagtctccagcctctgtctccactggttacctccacacagcctgcaaacaagttctccacaagattaaaacagcatttctcagagtctgttaccccttacacattttccttgttaaccaagttacttttaaaaagatcctttttaaactgattcttcctcagctgttcttcagccctctatactttttcataaaagtcaccagtgactgcccagttgccaaatagaatgaatacctttcagtgctcagctgtcttgacctctccgcagcatttcacaccacccaccaaccctcagtgaaacaacctcctcccttagcttttatgacaccacaagtctctggattctcagagaatccagaaaaacaagtctctggattctctcctcttacctctcagcccacacaggctgagctgtccttgaaacctagatgggggaaatgtctgtggctgtctgtggtctcttcttttcaggagttgggtagggaggaagaatcacagctgctcctgcttcctctgtctgtctctctatttcctgagtcccttccttttcctgaactcagttctcctcatgccaaccatgtttatgagctcctgctgggaggacagcatctgtgagtccttccctctgtctctcccagacaacacagaggttttagcctgtttgctaagagaccccatctaagtcagcccaagggtgtggattaggttttacagcatccaggccgcagtctggctaaactggattaccaggctggtgggcagctcctcaccatgatcctgcaccagttagagcctgctgtagttgggaaggagcctgggattgtggtaagatgtgtttccgtgcatgtcagtgctgctaaccaggaggagaacctggcagggtgggtgcctgctgctgataacattcggatggagggagactagggagcgcggtggctgctcccttgctggggctcagctggagtcagcatgactccttatatcagggcctttcccacctgtgctgatcaccaccacctgcttgctccagttgtttctggagttggaggcagctattggttgctttcttggaggtaaggaggtatatactagaaagatatctgatttgagagtctgaacaccaaaatttttggctctttccattatgagctgtgtaaccttggatacagtttcctcatctataaagttgtggtgggagaatggctgagaacagtgatctctcagctctccagctgtaaagatgttaattatgattttaactctcaagatcaggccacataaggaacaggggaattccaggggtgggacacagctgggggagtccagaccagggcagggaaaggagactcacaagccaaacagagctgctttggggaaagttcttatcagctggtgctgcttcctgagccatatgcccattcctcaagctgtacccctttcttggctatgtaggatgagttcctcctaggcccttgttaggagtggctattggattctaagcggttggggcatgagggaggatattttaaagggaagtatagctgattttaaaagaacctatacattcaagaacaaataaaaaacagcacttttctttaccaagaattgcgtcctggagtgtttttcagcgaagatagttgaacctatcacatggtcttcttgcccctagatctctacatcataagaactcaaggtggggaagaatagcctgggaagcctttctctctagggaagaactcacctctctgctttttcttcttcttattattttttgttttgttttttgagacgggagtctcaccctgtcgccaggctggagtgcagtggcgcgatctcggctcactgcaacctccgccttccaggttcaagcgatcctcctgcctcaggctcccaagtagctgggactacaggtgcgcaccaccacgcccagctaattttttgtatttttagtagaggtggagtttcaccatgttggccaggatggtctcaatctcttgaccttgtgatctgcccgcctcagcctcccaaagtgctggaattacaggcgtgagccaccacgcccagcctgcttcttatttttattatttttagttttcttcagagacaaggtcttgctgcgttgcccaggctggtgtcaaactcctgggctccagtgctactcccacctcagcctcctgagtagctgagactacggggacatgccagcatgtctcggcttcttactgtgttaacacagcctgtttctcaaaacacaggcaacaagtctgtggtggagttagggaaaaggcatcatatgaatgcctaacacttccaagtgctaaacacttcaagaatgttctttatatagttctttataaggatggttacctatccctcgctgtcctctctgcttcctccatgctagtggtttctagccattttttttttttttgggggggtcaaggacattgttacgaatatttgtcgttcaattaggctgcataaagtctgaacccctttcctatttttggtgaatttcccacctcaggagtcttgggagacacagctcattcctccctacagaagctaaatatactagaatcttgatttcctggcatccgttgaagtcaggttacaggcctagtggtagtgatttatggaaaaaaaaaaaaaaaaagcccagagcctcctttccggtgacagtgttggttgcaggcaggtggggtttccatggcagcagtagcagcagcagcggtacaaggtgaagcacgtggggctcgatgtcattgccagtttcttcagcagaccagttttgcacatgatttcaggaattgttcctggctgcacagctctgagtataattctctagccttcctgacaattctgtgaaccacgtaaaaaaccttataataaattcattttttttgcttacatcagccagaaatggtttctggtacttgcaactcaacactctaactgatgtttggtgataaaagtcatggacccactcttctgagctccagactcaccgatcctgtggtctattggacacctccccttggaagtctcagtgttacctgacacactagccacccccttaacagattcttcctctcatattctccatctcagcagccaggacgtgggaagaaaactagagggatgtggtatcagagaagccaagggagtttgtgtttcaaggaaggataatcatcagttttaatgcttaagatgagacctgaaaaattttctctgacctctcacccctctccagactggcccaagtacgtgaaccgtttccctgcttactctgtgatcttcctgcctcagcctcctgggtagctgagatacaggcatgtaccaccacactgacttgccttactaattttattagtactagtccttctctaggttctagggacacagcccttctactccccccactccttgggttccatggcaagctgctagtcaggccagctccctggagcaagtcttgctctcataggtagggcagtatttgacctcctcttcctccccacctggcctatggattattttatccactagagagtagaggcatagtatccagggtctaggatctttcaaaggcctataaaaataagtcctggccaggcactgtggctcacacctataaccctggcactttgggaggccaaggtgggaagattgtttgagcctaggagttcaagaccagcctgggcaacatagcaagaccctgtctcttaaaaaaaaaattagccaggtgtggtagcacacacctgtagacccagctattcaggaggctgaagtgggaggatcactttgagcctgggggttgaggctgaagtgagccatgatcgtgccactgtactccagcctgggtaacagagtgagaccctgtctcaaaaaaaaaaaaaaaaaaaaaaaaaaaaaagtcctggccatgtgcagtggctaacgcctgtaatcccagcactttgaggggctgaggcgggcggaacacctgaggtcgggagttcaagaccagcctggccaacatggagaaaccccgtctctactaaaaatacaaaattagccgcacctggtggtgcatgcctgtaatcccagctactcggaaggctgaggcaggagaatcgcttgaacccgggaggtggaggttgcatgagctgagattgcgccattgcactccagcctggggaacatgagcaaaactccatctcaagaagaaaaaaaaagtcctgaaacaatataaaatgaaaaatggcaaattatacataaatgtctaattaaacgtctatatatcatgttaaacctataattgttaattttataacaatttcataaagtttcataaaaattctgttatacctgaaaacaatttgtaagttagagtttcacgcttcataagaaattctatatacacaagataattgccaagaaacctgagcccaatgtaaattaaatgaattactcctagccaaataatttaaaaagcaaaattataaaaaacaatttcaaaaatttgcaataaaagctatatttaccacagactgtaggtgcagcttcatgttttatgtagggcttcctagaataagaatgcctgttctctgggaagcactcttatccatgggccctggagttatgcccaggttggagagggggaccccttgtcctatagacatcactcctgaaggccttgcacagaatatgctttgagaaatgagagggtgtaaccaatccttagagacagctctgcagttgtagccagtatctgttttccctttttttttttgacaagctcttgctctgtcacccaggctggagtgcagtggcatgatcatgactcactgcagccatgaactcctgggcttaagcgatcctcctgccttggcttcccaaagtgctgtgattataggtgtgggcacccagtctggggtgtttttgttctttagtttgtttttacagcaactaactatattataaccagtattccaaaaacagtgctttatttgctcactgggctgggacgatattcctaagcttttttggaaattgatgtacccttgatttccagctatgtcagagatgtaagacctgcggaggccaagctccacattcgtggagaaaataagtatctccttcatgcttgtaaacaggaacaccacagcctcggtcttgccccagcctaagggctaaggcctgatgctggaggaagcagttgtttgtatctaggactcctcatttgttccagtggttcccatttgtggtgtggcccactgacaatgttgctttatggtaaagattctgccaaggcagtgcctctgtgacttttgaaatttattaattagggctaggcatggtggctcacacctgtaatcttagcactttgggagtctgaggtgggaggatcgtttgagcctaagaggttgaggctgcagggagccatgattgtgccactgtactatacatcctgggtgacagagagagaccctgtctcaatgaaaacataaaaagtaaattttattaattagcttaataaaggattcgtcctctttctcctacataaactgaatctctggtaaccaaataattgatgagggaagtttctttttaaaaagttttccacagtaattgaagaaggactgatagatttagaatatcattttttagccctcaatgaatgaatctaggcaatgaccatctgtggctgctcacatcaccaaaaaagagacgatcagacattgtgtgcatttgtttgtaaacaaatagaatctgaacctaaacaagtctctacatctaccaatttaaagattaattcccaattgacaggaaatgcagagaatagaggaacaccttaaatgacttcacaaggatccagtcagcaaaatccagtctccaaggaccgatggaacaaacaacttggtttacattacaaagggaaaaaagggagatggaggggaaaccttaaagagtcttaaaaagcatataaaccaattgcactatatagaacttacttgcgtcttggtttaaacacactaaaaacatcatgagacattgagaacatttgaagagataatggctgagaactgtccagaagtgatgaatgacatgaattcatagctataagatgttgaacaaaatacacttgaaaaataaaaagaaacttgaaacgtattgcagtgaaacttcagaacacccaagacagagaagatcctaccaacagcagaagggaagacgtaaatgttaccttccaatgattctagtgctcctctcctgagtgcatgggaagattgcactactgcacgccacttacttatttcaggtgtgtttatgagacttgaattggccaatgagagtggcagtgatgtaggtcattgctaggttgaataagagccagtgcttgattctctgtttattttctctcttcccttactgaggtgattctgagagcatgcactgatatgaagatgcttaagtctgaaccagtctggtgtgctgtgctaatacatggataatataagctttgcaatattttccatatctgcagcaaattttgcatgaatgaggacttttgttgtaagtcagtgagaattgtgtgttatttattactgcagcataggctggcctatagtacaaagaagcttgggtttctctggagaaaaaaaaatcaataacaaaacactaagatccaaggcactggcctagcaagcaggtagcaaggaaaccgacattggtgactagaaggatagtgattcaggttatgcagtggaaaaacatttggtaaaactatagtctgagataactttggagtcacatcatgtacttaatgaatttcaatagaggggaagatattggaaaacaacattggtagcctacattggttgatattctgtttatcaagctatttcaagaaagacatgagttcagaaaagaattgccctgtttttaaggagtgaaagaaaatacatagtatacaaaaatccaaggacttagggttttgaagaggtaattgcttcttgacgctgaagactaagataaaatttagaattgaaggcccattaaaattcagccttgaggtaaggatcatattaaaaatatgggcataatattcattgttaaaacctttgaatggattaaggtacttcagggaaaatatcaaattaagaatatagtgcccagtaaaatcttttagctggataagattcagtgaaaaaattctaaggatgtggcttttccaccaaagcctgtgcggagggaggaggaggagagggatggagagagacagagagagagagagagagagagagagagccaggcatgggcatgtgaactccccttatccttggcttttgctttctgtgatttcagttgcctctggtcaatggcaatctgaaaatattaaatagaaaattccagaaataattcatgaggtttaaattgcacactattctgagtagtgtgatgagatctcttaccaccccactctatcccaccctgtcctgccagggacatgaatcatcacttttgtctggtgtatccactatatatactacccacccttagtccctagtagccttcttggttattaggtcaacagatcataagaagaagggtgagcacagtacagtaagatttttgagagagagatcacattcacataacttgtgttacagtatacaagttatgtttttttctattttattattagttactgttaatttctggctgtgcctaatttgtgtattaaacttcatcataggtatgtttgtatgggaaacaacagtatacagtatgttgggttcagaaccatccatgatttcaggcatccactgaagatcttggcacatatcccccgtggataaggtggaactactgtagttctcaaaaataattgcaggtatagctttcagccagtgatgctgcctgcattccaatagatagacacataatgaggtgtgtttgtttgttttgagacggagtcttgctctgtcgcccaggctggagtgcagtggcaagctgtcagttcactgcagcctctgcctcctgggcgcaagcgattctcctgcctcatcctcctgagtagctgggattacaggcgcctgccaccatgcccggctaatttttctatttttagtagagatgggttttcaccatgttggccaggctggtctcgaactcctgacctcaggtgatccgcctgccttggcctcccaaagtgctgggattacaggtgtgagccactgtgcccggcccataatgaggtttttagagtgttttattgccaggggaatgatgagcctagactaacagaaaacaataactgttgaagacattaaatggctcttgggctttcaataatctatggtagagaatgctcaggctcttaacacacctaagagttgagaaggctgctcagcccccaaagaggtttatgcctcaagccccacatcagcagggacactaaaatgtgaagaacctctttgagggcagaagcaagggataaggagaacaacaggcaagggagctacttccagggacctgaatcagaaaataatgaataattcccgaccagactaggaggccctcaaaatatttgcccacttggatttcagaattgccatagccaatgactcctgtgtgcctcccattcttcccctttcctacgtggaatgtctttctctgttctataatctacctttcaaaatctttactcatcttttaaaagccacttcatttgtcaacacctctagaatttctccctgttattctggagaacacacctctctcttatccgtctcttgctctgcttcagggacacctgggagtctcctgaccctgcccccacacccccaaagagccatagatatggaagaagtaccaaacccctagtcatccttgactcttccctctgcttggaaggctctacctccaaaacttctcaaggtcagggttggctccaatcaccctttagatcttagctcgcacccctcctcagagagcttttcctaaccacacaatctgaagtggacccaggcactctctcacagccctgtttcatcgtcatcatagcacttactatgaggtatgtttatctttttcttcgtcttgtgttcttgctcactgtctgagtcacagagggtgtaagcttccctgagagcagaagtcttgcttggatcctggaacagtgcctgtagttgctcaataagtattacttgaatgtataactcagatc

SEQ ID NO: 23987 - DNA, 2454 bp, Homo Sapiens
atgatgaagacggagccacgggggcccgggggtcccctccggagcgcctccccgcaccgcagcgcctacgaggcgggcatccaggcgctgaagccgcccgacgcgcccgggcccgacgaggcacccaagggggcccaccacaagaaatatggctccaacgtccaccgcatcaaaagtatgttcctgcagatgggcacgacggcggggccctcgggcgaggcgggcggcggcgcgggcctggccgaggccccacgggcgtccgagcgcggcgtgcgcctgtcgctgccgcgggccagcagcctgaacgagaacgtggaccacagcgccctgctgaagctgggcaccagcgtgtcggagcgcgtgagccgcttcgactccaagcccgcgccctccgcgcagcctgcgccgccgccgcacccgccgtcccggctgcaggagacgcggaagctgttcgaacggagcgccccagcggcaggcggcgacaaggaggcggcgcggcggctgctgaggcaggagcgcgccggcctgcaggaccggaagctggacgtcgtggtgcgcttcaacggcagcaccgaggcgctggacaagctggacgctgacgccgtgtcccccacggtcagccagctcagcgccgtcttcgagaaggccgactcgaggaccggcctccaccgcgggcccgggctccccagggccgcaggggttccccaggtcaactcgaagctggtcagcaagcggtcccgggtgttccagcccccgccgccgccgccgcccgccccgtcgggggatgccccggccgagaaagagcgatgccccgcagggcagcagcccccgcagcaccgagtggcccctgcccggccgccccccaagccccgggaggtgcgcaagattaagccggtggaggtggaggagagcggggagtcggaggccgagtcggcgcccggggaggtgatccaggccgaggttacggtccacgcggccctggagaatggcagcaccgtggcaactgcagccagccccgcgcccgaggagccaaaggcccaagcggccccggagaaggaggcggcggcggtagcgccgccagagaggggggtgggcaatggccgggccccggacgtggcccctgaggaggtagatgaatccaagaaggaggacttctcggaggcggacttggtggacgtgagcgcctacagtgggctcggggaggactctgcgggcagtgccctggaggaggacgacgaagacgacgaggaggatggggagcccccctacgagcccgagtcggggtgcgtggagatcccggggctgtcggaggaggaggacccagccccgagccggaagatccatttcagcacggcgcccatccaagtattcagcacttactccaacgaggattacgatcgtcgcaacgaggatgtggatcccatggcagcctctgctgagtacgagctggagaagcgtgtggagaggttggagctgttccctgtggagctggagaaggactccgagggcctgggcatcagcatcatcggcatgggcgccggggcagacatgggcctggagaagctgggtatcttcgtcaagaccgtgacggagggtggtgcggcccatcgggatggcaggatccaggtgaatgatctcctggtggaggtggatggaacaagtctggtgggagtgacccagagcttcgcggcgtctgtgctccggaacaccaagggccgagtgcggtgcaggtttatgattggccgggagcggccgggagagcagagcgaagtggcccagctaattcagcagactttggaacaggagcgatggcagcgggagatgatggagcagagatacgcccagtatggggaggatgacgaggagacgggagagtatgccactgacgaggatgaggagctgagccccacgttcccgggtggtgagatggccatcgaggtgtttgagctagcggagaacgaggatgcactgtcccctgtggacatggagcccgagaagctggtgcacaagttcaaggagctccagatcaagcatgcggtcactgaggcagagatccagcagctgaaaagaaagctgcagagcctggagcaggagaaggggcgctggcgggtggagaaggcgcagttggagcagagtgtggaggagaacaaggagcgcatggagaaactggaaggctactggggtgaggcccagagcctgtgccaggctgtggacgagcacctgcgggagactcaggcgcagtaccaggccctggagcgcaagtacagcaaggccaagcgcctcatcaaggactaccagcagaaggagatcgagttcctgaaaaaggagactgcacagcgtcgggttctggaggagtcggagctggccagaaaggaggagatggacaagctcctggacaagatctcagaactggaaggaaacttgcaaacactgaggaattccaattctacttaa

SEQ ID NO: 23988 - DNA, 794 bp, Homo Sapiens
gggccgccccgcccgtgggtcggggatccgccctgccctatacggggaagggcgccggcggccctgagcggacacgacgcggcctccgggacgccggggtcgtccgcagcgcaggcccggggcggcggcggaccggtgatcgcgagaagttatgggccaccgggcggcggctcagctcagcacgcagcgctcccgccggctcaactgccgctcagcttgcggcgccgctgttccaggccgcgctccaggccgtcgtcctcctccagggcgatccgctccttgtggtccaggtcccggactagctcatcgcgctggttcaccagcgacaccagctcctccagtaggagctgctctcggtgcttttcttctgttttctccaattgctgggtgtttgtgttgctcctcccacacaccccccagaaggacccccgaaggattatttggatgaacagtactcataaacaggaagcactggctacagttattctgaaaaatcccaaacgcaaaagggaggcaaagctgtctccaccctgcaggatgacaaaggcaatggccgcagagtggcttcggaccccacatgggaaccagatcagatctctctgggcttctgttttccttactgtaaaggctggagtgcagtggcacgatctcggctcactgcaatctctcaaccccaggagggttcaagcgattctcctgcctcagccttcccagaagctggaactaccaggcgcccgccaccaggcctggctaatgttttgtatttttagtagagacggggtttcactgtgtta

SEQ ID NO: 23989 - DNA, 5941 bp, Homo Sapiens
ttttttttttttttttgcttaaaaaaaagccatgacggctctcccacaattcatcttccctgcgccatctttgtattatttctaatttattttggatgtcaaaaggcactgatgaagatattttctctggagtctccttctttctaacccggctctcccgatgtgaaccgagccgtcgtccgcccgccgccgccgccgccgccgccgccgcccgccccgcagcccaccatgtctcgccgcaagcaaggcaaaccccagcacttaagcaaacgggaattctcgcccgagcctcttgaagccattcttacagatgatgaaccagaccacggcccgttgggagctccagaaggggatcatgacctcctcacctgtgggcagtgccagatgaacttcccattgggggacattcttatttttatcgagcacaaacggaaacaatgcaatggcagcctctgcttagaaaaagctgtggataagccaccttccccttcaccaatcgagatgaaaaaagcatccaatcccgtggaggttggcatccaggtcacgccagaagatgacgattgtttatcaacgtcatctagaagaatttgccccaaacaggaacacatagcagataaacttctgcactggaggggcctctcctcccctcgttctgcacatggagctctaatccccacgcctgggatgagtgcagaatatgccccgcagggtatttgtaaagatgagcccagcagctacacatgtacaacttgcaaacagccattcaccagtgcatggtttctcttgcaacacgcacagaacactcatggattaagaatctacttagaaagcgaacacggaagtcccctgaccccgcgggttggtatcccttcaggactaggtgcagaatgtccttcccagccacctctccatgggattcatattgcagacaataacccctttaacctgctaagaataccaggatcagtatcgagagaggcttccggcctggcagaagggcgctttccacccactccccccctgtttagtccaccaccgagacatcacttggacccccaccgcatagagcgcctgggggcggaagaaatggccctggccacccatcacccgagtgcctttgacagggtgctgcggttgaatccaatggctatggagcctcccgccatggatttctctaggagacttagagagctggcagggaacacgtctagcccaccgctgtccccaggccggcccagccctatgcaaaggttactgcaaccattccagccaggtagcaagccgcccttcctggcgacgccccccctccctcctctgcaatccgcccctcctccctcccagcccccggtcaagtccaagtcatgcgagttctgcggcaagacgttcaaatttcagagcaacctggtggtgcaccggcgcagccacacgggcgagaagccctacaagtgcaacctgtgcgaccacgcgtgcacccaggccagcaagctgaagcgccacatgaagacgcacatgcacaaatcgtcccccatgacggtcaagtccgacgacggtctctccaccgccagctccccggaacccggcaccagcgacttggtgggcagcgccagcagcgcgctcaagtccgtggtggccaagttcaagagcgagaacgaccccaacctgatcccggagaacggggacgaggaggaagaggaggacgacgaggaagaggaagaagaggaggaagaggaggaggaggagctgacggagagcgagagggtggactacggcttcgggctgagcctggaggcggcgcgccaccacgagaacagctcgcggggcgcggtcgtgggcgtgggcgacgagagccgcgccctgcccgacgtcatgcagggcatggtgctcagctccatgcagcacttcagcgaggccttccaccaggtcctgggcgagaagcataagcgcggccacctggccgaggccgagggccacagggacacttgcgacgaagactcggtggccggcgagtcggaccgcatagacgatggcactgttaatggccgcggctgctccccgggcgagtcggcctcggggggcctgtccaaaaagctgctgctgggcagccccagctcgctgagccccttctctaagcgcatcaagctcgagaaggagttcgacctgcccccggccacgatgcccaacacggagaacgtgtactcgcagtggctcgccggctacgcggcctccaggcagctcaaagatcccttccttagcttcggagactccagacaatcgccttttgcctcctcgtcggagcactcctcggagaacgggagcttgcgcttctccacaccgcccggggagctggacggagggatctcggggcgcagcggcacgggaagtggagggagcacgccccatattagtggtccgggcacgggcaggcccagctcaaaagagggcagacgcagcgacacttgtgagtactgtgggaaagtcttcaagaactgtagcaatctcactgtccacaggagaagccacacgggcgaaaggccttataaatgcgagctgtgcaactatgcctgtgcccagagtagcaagctcaccaggcacatgaaaacgcatggccaggtggggaaggacgtttacaaatgtgaaatttgtaagatgccttttagcgtgtacagtaccctggagaaacacatgaaaaaatggcacagtgatcgagtgttgaataatgatataaaaactgaatagaggtatattaatacccctccctcactcccacctgacaccccctttttcaccactccctttccccatcgccctccagccccactccctgtaggatttttttctagtcccatgtgatttaaacaaacaaacaaacaaacagaagtaacgaagctaagaatatgagagtgcttgtcaccagcacacctgttttttttctttttctttttcttttttctttttccttttttttttttttcctttatgttctcaccgtttgaatgcatgatctgtatggggcaatactattgcattttacgcaaactttgagcctttctcttgtgcaataatttacatgttgtgtatgtttttttttaaacttagacagcatgtatggtatgttatggctattttaaattgtccctaattcgttgctgagcaaacatgttgctgtttccagttccgttctgagagaaaaagagagagagagagaaaaagaccatgctgcatacattctgtaatacatatcatgtacagttttattttataacgtgaggaggaaaaacagtctttggattaaccctctatagacagaatagatagcactgaaaaaaaatctctatgagctaaatgtctgtctctaaagggttaaatgtatcaattggaaaggaagaaaaaaggccttgaattgacaaattaacagaaaaacagaacaagtttattctatcatttggttttaaaatatgagtgccttggatctattaaaaccacatcgatggttctttctacttgttataaacttgtagcttaattcagcattgggtgaggtaataaaccttaggaactagcatataattctatattgtatttctcacaacaatggctacctaaaaagatgacccattatgtcctagttaatcatcatttttcctttagtttaattttataaacaaaactgattataccagtataaaagctactttgctcctggtgagagcttaaaagaaatgggctgttttgcccaaagttttattttttttaaacaatgattaaattgaatgtgtaatgtgcaaaagccctggaacgcaattaaatacactagtaaggagttcattttatgaagatatttgctttaataatgtctttttaaaaatactggcaccaaaagaaatagatccagatctacttggttgtcaagtggacaatcaaatgataaactttaagaccttgtataccatattgaaaggaagaggctgacaataaggtttgacagaggggaacagaagaaaataatatgatttattagcacaacgtggtactatttgccatttaaaactagaacaggtatataagctaatattgatacaatgatgattaactatgaattcttaagacttgcatttaaatgtgacattcttaaaaaaagaagagaaagaattttaagagtagcagtatatatgtctgtgctccctaaaagttgtacttcatttcttttccatacactgtgtgctatttgtgttaacatggaagaggattcattgtttttatttttatttttttaattttttcttttttattaagctagcatctgccccagttggtgttcaaatagcacttgactctgcctgtgatatctgtatcttttctctaatcagagatacagaggttgagtataaaataaacctgctcagataggacaattaagtgcactgtacaattttcccagtttacaggtctatacttaagggaaaagttgcaagaatgctgaaaaaaaattgaacacaatctcattgaggagcattttttaaaaactaaaaaaaaaaaaactttgccagccatttacttgactattgagcttacttacttggacgcaacattgcaagcgctgtgaatggaaacagaatacacttaacatagaaatgaatgattgctttcgcttctacagtgcaaggatttttttgtacaaaacttttttaaatataaatgttaagaaaaattttttttaaaaaacacttcattatgtttaggggggaactgcattttagggttccattgtcttggtggtgttacaagacttgttatccatttaaaaatggtagtggaaattctatgccttggatacacaccgctcttcaggttgtaaaaaaaaaaaacatacattggggaaaggtttaagattatatagtacttaaatataggaaaatgcacactcatgttgattcctatgctaaaatacatttatggtcttttttctgtatttctagaatggtatttgaattaaatgttcatctagtgttaggcactatagtatttatattgaagcttgtatttttaactgttgcttgttctcttaaaaggtatcaatgtaccttttttggtagtggaaaaaaaaaagacaggctgccacagtatatttttttaatttggcaggataatatagtgcaaattatttgtatgcttcaaaaaaaaaaaaaagagagaaacaaaaaagtgtgacattacagatgagaagccatataatggcggtttgggggagcctgctagaatgtcacatggatggctgtcataggggttgtacatatccttttttgttcctttttcctgctgccatactgtatgcagtactgcaagctaataacgttggtttgttatgtagtgtgctttttgtccctttccttctatcaccctacattccagcatcttaccttcatatgcagtaaaagaaagaaagaaaaaaaaaggaaaaaaaaaaaaaaaccaatgttttgcagtttttttcattgccaaaaactaaatggtgctttatatttagattggaaagaatttcatatgcaaagcatattaaagagaaagcccgctttagtcaatacttttttgtaaatggcaatgcagaatattttgttattggccttttctattcctgtaatgaaagctgtttgtcgtaacttgaaattttatcttttactatgggagtcactatttattattgcttatgtgccctgttcaaaacagaggcacttaatttgatcttttatttttctttgtttttatttttttttttatttagatgaccaaaggtcattacaacctggctttttattgtatttgtttctggtctttgttaagttctattggaaaaaccactgtctgtgtttttttggcagttgtctgcattaacctgttcatacacccattttgtccctttattgaaaaaataaaaaaaattaaa

SEQ ID NO: 23990 - DNA, 2358 bp, Homo Sapiens
ttttttttttttttttgcttaaaaaaaagccatgacggctctcccacaattcatcttccctgcgccatctttgtattatttctaatttattttggatgtcaaaaggcactgatgaagatattttctctggagtctccttctttctaacccggctctcccgatgtgaaccgagccgtcgtccgcccgccgccgccgccgccgccgccgccgcccgccccgcagcccaccatgtctcgccgcaagcaaggcaaaccccagcacttaagcaaacgggaattctcgcccgagcctcttgaagccattcttacagatgatgaaccagaccacggcccgttgggagctccagaaggggatcatgacctcctcacctgtgggcagtgccagatgaacttcccattgggggacattcttatttttatcgagcacaaacggaaacaatgcaatggcagcctctgcttagaaaaagctgtggataagccaccttccccttcaccaatcgagatgaaaaaagcatccaatcccgtggaggttggcatccaggtcacgccagaagatgacgattgtttatcaacgtcatctagaagaatttgccccaaacaggaacacatagcagataaacttctgcactggaggggcctctcctcccctcgttctgcacatggagctctaatccccacgcctgggatgagtgcagaatatgccccgcagggtatttgtaaagatgagcccagcagctacacatgtacaacttgcaaacagccattcaccagtgcatggtttctcttgcaacacgcacagaacactcatggattaagaatctacttagaaagcgaacacggaagtcccctgaccccgcgggttcttcacacacccccattcggcgtagtacccagagagctcaagatgtgtggcagttttcggatggaagctcgagagcccttaagttctgagaaaatttgaagcccccaggggtggggtggacgcgtgccgcccagtcgacgtcagcgtggtctgtcatcctgctagtttgtgatgttttctgacagtagcctccaagaagccgttgtgcgaagacagagtcctgcagagtccttccagcctaggcctgcagcgccattttatttatattttttaataaaaagtaaaaacaaaaaaacagacccacattggaacagtgaatcagtcccatagagagggcccgtggaccatcgctgtcatgagtgatgccctggcccttctgaaaccagccaacctaattacctgtattgtggaaatgcgcatgagtccccaaccccttgtttctatacattctatgttgtcttttaaaaagtgtgcttaacattgacacaataaatgttggagctttaggtggtgtttgcttgttctttaatttttaatgcttataagacaatgaggctgcttatgattttgtacttctgtacctgtttcctacagacacccatcgggtgggtaggaggaacagatttgagaaatgggcaggagatgtaggaggggaactaggttaccgcttatcagatggcataaattttcaaggagaatcaaaatgcaaaacttgggaataaatcatagcaatatcataattaatgtagtagtaatattgctgtttattaatgctgaagtgtggttttcctaactgtctgacttataatttgcataccattaaataatgcataatatggcacgccgaatcctgtttttcaaatatatgcttttggtggctaccatgcaggatttgaatttgtcttttaatttagcttaggaaagaacatcactgggcgagcggtaaatcctaaagaaggtgataaatgtcagtagtttcttattaaatattctaattttaggttcccaaaccttcaggaaatatatcttaatgcagacaaacaaacataaaacttctttagtacttacatcaggaaatttggggcagattttagaggggggaaattataggaggaaagaagttcacatcagaacagacaatcacagcaatgctctattccttagaaattagtgccacaaataagttacatctacaaacaggtggtaaaaattctttctggcccagttaatttgcacagaacttttctcagtttggtattttttactgcttggagatccagaagagaattagaaacaacatagcaaattaaaataggtttgtcaataatagagctcagacacctgtgtgctgtagattcacatacaggccgtgaacctaagtggggaaaatcctacctatccaccttctggctagattacctagcttagtgaaaagatagccaaataattggcatgtgaattatttcctgcttattcataataaataatgactgtcta

SEQ ID NO: 23991 - DNA, 7603 bp, Homo Sapiens
ttttcttgcttttcttcccttttttttctttttgcaaacaaaacaaaaaacagcatagaagaaagagcaaaataaagaagaagaagaggaggaagagagggaaagagaggaagggaaaaaaaacaccaacccgggcagaggaggaggtgcggcggcggcggcggcggcggcagcggcggcagcggcgcggcggcggctcggaccccctcccccggctccccccatcagtgcagctctccgggcgatgccagaatagatgccggggcaatgtcccgccgcaaacagggcaacccgcagcacttgtcccagagggagctcatcaccccagaggctgaccatgtggaggccgccatcctcgaagaagacgagggtctggagatagaggagccaagtggcctggggctgatggtgggtggccccgaccctgacctgctcacctgtggccagtgtcaaatgaacttccccttgggggacatcctggtttttatagagcacaaaaggaagcagtgtggcggcagcttgggtgcctgctatgacaaggccctggacaaggacagcccgccaccctcctcacgctccgagctcaggaaagtgtccgagccggtggagatcgggatccaagtcacccccgacgaagatgaccacctgctctcacccacgaaaggcatctgtcccaagcaggagaacattgcaggtaaagatgagccttccagctacatttgcacaacatgcaagcagcccttcaacagcgcgtggttcctgctgcagcacgcgcagaacacgcacggcttccgcatctacctggagcccgggccggccagcagctcgctcacgccgcggctcaccatcccgccgccgctcgggccggaggccgtggcgcagtccccgctcatgaatttcctgggcgacagcaaccccttcaacctgctgcgcatgacgggccccatcctgcgggaccacccgggcttcggcgagggccgcctgccgggcacgccgcctctcttcagtcccccgccgcgccaccacctggacccgcaccgcctcagtgccgaggagatggggctcgtcgcccagcaccccagtgccttcgaccgagtcatgcgcctgaaccccatggccatcgactcgcccgccatggacttctcgcggcggctccgcgagctggcgggcaacagctccacgccgccgcccgtgtccccgggccgcggcaaccctatgcaccggctcctgaaccccttccagcccagccccaagtccccgttcctgagcacgccgccgctgccgcccatgccccctggcggcacgccgcccccgcagccgccagccaagagcaagtcgtgcgagttctgcggcaagaccttcaagttccagagcaatctcatcgtgcaccggcgcagtcacacgggcgagaagccctacaagtgccagctgtgcgaccacgcgtgctcgcaggccagcaagctcaagcgccacatgaagacgcacatgcacaaggccggctcgctggccggccgctccgacgacgggctctcggccgccagctcccccgagcccggcaccagcgagctggcgggcgagggcctcaaggcggccgacggtgacttccgccaccacgagagcgacccgtcgctgggccacgagccggaggaggaggacgaggaggaggaggaggaggaggaggagctgctactggagaacgagagccggcccgagtcgagcttcagcatggactcggagctgagccgcaaccgcgagaacggcggtggtggggtgcccggggtcccgggcgcggggggcggcgcggccaaggcgctggctgacgagaaggcgctggtgctgggcaaggtcatggagaacgtgggcctaggcgcactgccgcagtacggcgagctcctggccgacaagcagaagcgcggcgccttcctgaagcgtgcggcgggcggcggggacgcgggcgacgacgacgacgcgggcggctgcggggacgcgggcgcgggcggcgcggtcaacgggcgcgggggcggcttcgcgccaggcaccgagcccttccccgggctcttcccgcgcaagcccgcgccgctgcccagccccgggctcaacagcgccgccaagcgcatcaaggtggagaaggacctggagctgccgcccgccgcgctcatcccgtccgagaacgtgtactcgcagtggctggtgggctacgcggcgtcgcggcacttcatgaaggaccccttcctgggcttcacggacgcacgacagtcgcccttcgccacgtcgtccgagcactcgtccgagaacggcagcctgcgcttctccacgccgcccggggacctgctggacggcggcctctcgggccgcagcggcacggccagcggaggcagcaccccgcacctgggcggcccgggccccgggcggcccagctccaaggagggccgccgcagcgacacgtgcgagtactgcggcaaggtgttcaagaactgcagcaacttgacggtgcaccggcggagccacaccggcgagcggccttacaagtgcgagctgtgcaactacgcgtgcgcgcagagcagcaagctcacgcgccacatgaagacgcacgggcagatcggcaaggaggtgtaccgctgcgacatctgccagatgcccttcagcgtctacagcaccctggagaaacacatgaaaaagtggcacggcgagcacttgctgactaacgacgtcaaaatcgagcaggccgagaggagctaagcgcgcgggccccggcgccccgcacctgtacagtggaaccgttgccaaccgagagaatgctgacctgacttgcctccgtgtcaccgccaccccgcaccccgcgtgtccccggggcccaggggaggcggcactccaacctaacctgtgtctgcgaagtcctatggaaacccgagggttgattaaggcagtacaaattgtggagccttttaactgtgcaataatttctgtatttattgggttttgtaatttttttggcatgtgcaggtactttttattattattttttctgtttgaattcctttaagagattttgttgggtatccatcccttctttgttttttttttaacccggtagtagcctgagcaatgactcgcaagcaatgttagaggggaagcatatcttttaaattataatttggggggaggggtggtgctgcttttttgaaatttaagctaagcatgtgtaatttcttgtgaagaagccaacactcaaatgacttttaaagttgtttactttttcattccttccttttttttgtcctgaaataaaaagtggcatgcagttttttttttaattattttttaattttttttttggtttttgtttttggggtggggggtgtggatgtacagcggataacaatctttcaagtcgtagcactttgtttcagaactggaatggagatgtagcactcatgtcgtcccgagtcaagcggccttttctgtgttgatttcggctttcatattacataagggaaaccttgagtggtggtgctgggggaggcaccccacagactcagcgccgccagagatagggtttttggagggctcctctgggaaatggcccgacagcattctgaggttgtgcatgaccagcagatactatcctgttggtgtgccctggggtgccatggctgctattcgctgtagattaggctacataaaatgggctgagggtacctttttggggagatggggtggcctgcagtgacacagaaaggaagaaactagcggtgttcttttaggcgttttctggcttgacggcttctctctttttttaaatcacccccaccacataaatctcaaatcctatgttgctacaaggggtcatccatcatttcccaagcagacgaatgccctaattaattgaagttagtgttctctcatttaatgcacactgatgatattgtagggatgggtggggtggggatcttgcaaatttctattctcttttactgaaaaagcaggggatgagttccatcagaaggtgcccagcgctacttcccaggtttttattttttttttcctatctcattaggttggaaggtactaaatattgaactgttaagattagacatttgaattctgttgacccgcactttaaagcttttgtttgcatttaaattaaatggcttctaaacaagaaattgcagcatattcttctctttggcccagaggtgggttaaactgtaagggacagctgagattgagtgtcagtattgctaagcgtggcattcacaatactggcactataaagaacaaaataaaataataatttataggacagtttttctactgccattcaatttgatgtgagtgccttgaaaactgatcttcctatttgagtctcttgagacaaatgcaaaactttttttttgaaatgaaaagactttttaaaaaagtaaaacaagaaaagtacattctttagaaactaacaaagccacatttactttaagtaaaaaaaaaaaaaattctggttgaagatagaggatatgaaatgccataagacccaatcaaatgaagaaataaacccagcacaaccttggacatccattagctgaattatcctcagccccttttgtttttgggacaacgctgcttagatatggagtggaggtgatttactgctgaattaaaactcaagtgacacaagttacaagttgatatcgttgaatgaaaagcaaaacaaaaacaattcaggaacaacggctaattttttctaaagttaaatttagtgcactctgtcttaaaaatacgtttacagtattgggtacatacaagggtaaaaaaaaaattgtgtgtatgtgtgttggagcgatctttttttttcaaagtttgcttaataggttatacaaaaatgccacagtggccgcgtgtatattgttttcttttggtgacggggttttagtatatattatatatattaaaatttcttgattactgtaaaagtggaccagtatttgtaataatcgagaatgcctgggcattttacaaaacaagaaaaaaaatacccttttcttttccttgaaaatgttgcagtaaaatttaaatggtgggtctataaatttgttcttgttacagtaactgtaaagtcggagttttagtaaatttttttctgccttgggtgttgaatttttatttcaaaaaaaatgtatagaaacttgtatttggggattcaaaggggattgctacaccatgtagaaaaagtatgtagaaaaaaagtgcttaatattgttattgctttgcagaaaaaaaaaaaatcacatttctgacctgtacttatttttctcttcccgcctccctctggaatggatatattggttggttcatatgatgtaggcacttgctgtatttttactggagctcgtaattttttaactgtaagcttgtccttttaaagggatttaatgtacctttttgttagtgaatttggaaataaaaagaaaaaaaaaacaaaaacaaacaggctgccataatatatttttttaatttggcaggataaaatattgcaaaaaaaacacatttgtatgttaagtcctattgtacaggagaaaaagggttgtttgacaacctttgagaaaaagaaacaaaaggaagtagttaaatgctttggttcacaaatcatttagttgtatatattttttgtcggaattggcctacacagagaaccgttcgtgttgggcttctctctgaacgccccgaaccttgcatcaaggctccttggtgtggccacagcagaccagatgggaaattatttgtgttgagtggaaaaaaatcagtttttgtaaagatgtcagtaacattccacatcgtcctccctttctctaagaggccatctctaagatgtcagatgtagaggagagagagcgagagaacatcttccttctctaccatcactcctgtggcggtcaccaccaccacctctcccgcccttaccagcagaaagcaatgcaaactgagctgctttagtccttgagaaattgtgaaacaaacacaaatatcataaaaggagctggtgattcagctgggtccaggtgaagtgacctgctgttgagaccggtacaaattggatttcaggaaggagactccatcacagccaggacctttcgtgccatggagagtgttggcctcttgtctttcttccctgctttgctgctttgctctctgaaacctacattccgtcagtttccgaatgcgagggcctgggatgaatttggtgcctttccatatctcgttctctctccttcccctgcgtttcctctccatccttcatcctccattggtcctttttttttctttcattttttatttaatttcttttcttcctgtctgttcctcccctaatcctctattttatttttattttttgtaaagccaagtagctttaagataaagtggtggtcttttggatgagggaataatgcatttttaaataaaataccaatatcaggaagccattttttatttcaggaaatgtaagaaaccattatttcaggttatgaaagtataaccaagcatccttttgggcaattccttaccaaatgcagaagcttttctgttcgatgcactctttcctccttgccacttacctttgcaaagttaaaaaaaaggggggagggaatgggagagaaagctgagatttcagtttcctactgcagtttcctacctgcagatccaggggctgctgttgcctttggatgccccactgaggtcctagagtgcctccagggtggtcttcctgtagtcataacagctagccagtgctcaccagcttaccagattgccaggactaagccatcccaaagcacaagcattgtgtgtctctgtgactgcagagaagagagaattttgcttctgttttgtgtttaaaaaaccaacacggaagcagatgatcccgagagagaggcctctagcatgggtgacccagccgacctcaggccggtttccgcactgccacaactttgttcaaagttgcccccaattggaacctgccacttggcattagagggtctttcatggggagagaaggagactgaattactctaagcaaaatgtgaaaagtaaggaaatcagcctttcatcccggtcctaagtaaccgtcagccgaaggtctcgtggaacacaggcaaacccgtgattttggtgctccttgtaactcagccctgcaaagcaaagtcccattgatttaagttgtttgcatttgtactggcaaggcaaaatatttttattaccttttctattacttattgtatgagcttttgttgtttacttggaggttttgtcttttactacaagtttggaactatttattattgcttggtatttgtgctctgtttaagaaacaggcacttttttttattatggataaaatgttgagatgacaggaggtcatttcaatatggcttagtaaaatatttattgttcctttattctctgtacaagattttgggcctctttttttccttaatgtcacaatgttgagttcagcatgtgtctgccatttcatttgtacgcttgttcaaaaccaagtttgttctggtttcaagttataaaaataaattggacatttaacttgatctccaaa

SEQ ID NO: 23992 - DNA, 1196 bp, Homo Sapiens
acctttgagcgatggcggcgtctggggaaccccagaggcagtggcaagaggaggtggcggcggtggtagtggtgggctcctgcatgaccgacctggtcagtcttacttctcgtttgccaaaaactggagaaaccatccatggacataagttttttattggctttggagggaaaggtgccaaccagtgtgtccaagctgctcggcttggagcaatgacgtccatggtgtgtaaggttggcaaagattcttttggcaatgattatatagaaaacttaaaacagaatgatatttctacagaatttacatatcagactaaagatgctgctacaggaactgcttctataattgtcaataatgaaggccagaatatcattgtcatagtggctggagcaaatttacttttgaatacggaggatctgagggcagcagccaatgtcattagcagagccaaagtcatggtctgccagctcgaaataactccagcaacttctttggaagccctaacaatggcccgcaggagtggagtgaaaaccttgttcaatccagcccctgccattgctgacctggatccccagttctacaccctctcagatgtgttctgctgcaatgaaagtgaggctgagattttaactggcctcacggtgggcagcgctgcagatgctggggaggctgcattagtgctcttgaaaaggggctgccaggtggtaatcattaccttaggggctgaaggatgtgtggtgctgtcacagacagaacctgagccaaagcacattcccacagagaaagtcaaggctgtggataccacgggtgctggtgacagctttgtgggagctctggccttctacctggcttactatccaaatctgtccttggaagacatgctcaacagatccaatttcattgcagcagtcagtgtccaggctgcaggaacacagtcatcttacccttacaaaaaagaccttccgcttactctgttttgattgctattagtcccaaaataaatatacctgggaataaaatgtacttgggggtggctgctcctggctaatgcttattagaaaatgtcctcgtcccctttctttgcaaatattagttcttttacgaagtcatcctcaagcttcaatttatttataacgatgattcttttgctttccatgcatttgcacaaaacaaccagaattaaagattccacaacc

SEQ ID NO: 23993 - DNA, 248 bp, Homo Sapiens
gtaataaaatgcaaccaactgactcattttctaagtgaatgacatatttactctactctttaagtttaaactctaagcaattccccaatccttagttcccatgaaatgtaatgttctcttcctaaaatgtttggccaagttggggaaggtgggcatggcagtgtgagcctgtagccaggttccaaggttcgcttgaggttaggaggttgagactagcctgggcaatatggcaagactctgtatccacg

SEQ ID NO: 23994 - DNA, 1450 bp, Homo Sapiens
gcacatgcgcagaatcatcgtggtgcagggctctccctttgcttcttcggttgcagtcctcttgcttcttgcgcgtgcgtgtagcgcttttgcaaagccgcggaggtgaagtgaacttagaggttgtggggccgaggggtcgtcttatagctaccagcccacaggcatttagtctacgttggaggtaaacaaatacgggtcctgcttaggagaaaagaaaaacgtcttacagccagtgtctaaactccaaacaacggaatgtatcaatgagaccttgtatatggatacacgtgcatttaaaaccgccctgccggcttgtagagcttttgccgttctccagcgctttacaggggttatcgcacttaagcctcggaacaactttaccagatgaggacacctgaggttcagattaagaaatctgccccaaagtcttagaactggtattctccactggttgaatgcaaatggaagccagaggaaaagggaacccttgacacagttttcatatagattggcctccagggcagacagcagagtggggtttaatctggactgaattggaggaaaggaactggcaccagagtggaggctggaaggatggtggaactgacactgggacagaacacagaaaacagaatctaatgctattgctctggctatatcaaataaaagtgtcaagagtgagcatccttgccttgtgctgaatcacaaaggaatacctttcagtttttctccattgattatgatagcagtgggcttttcacagtgggctttactgtgttgaggtaccctaatgacaagttcaccccagtgttttctgaggagtctacctggaaatgagaaccatctgtccttcctatagtagttcttctcagaatgccgactctatgctaatggaggaggtctgatggccgggaggacaggaagaaggaacccacaatgaagcaaaagttgcgtttaactctgtcctcaccattcctctcctggacctgtcctaaactggaagctgggggaggatggagtgctggaatgctgcagaagtctcatgggagggcgcctggtgttcaccacatgtgtacactgttgcacgaccagatggaaatttgaatgctggggctcagtggaacacctgaaggaagctggtgaggcagatgtcccgctatgccttccaagtgtcatgcaaccagttcatgcctgtcagcatctctgccggtggactctgtgagtcagcaaatctacagagcagagagccacaagtggggacagatgtggtcaaatgccatttaaatcagtgattctcaacccaggagttgtcatggcactggccttgagtgagctggaccaagggaagtggtagaattccccatgaaggaccaagtgagcagatagaagtttctccattttaactttttctgagtcaatttaaaaaacacctagtgcctttttctgt

SEQ ID NO: 23995 - DNA, 12928 bp, Homo Sapiens
aggcgggcggcactgcgcctaagctgggccacaaccgccagtcagggctctccccttcccctccctccccccctcctcctcctcctctgccgcccagagcgagacaccaacatggagcccgaggatctgccatggccgggcgagctggaggaggaggaggaggaggaggaggaggaggaggaggaggaagaggaggaggctgcagcggcggcggcggcgaacgtggacgacgtagtggtcgtggaggaggtggaggaagaggcggggcgggagttggactccgactctcactacgggccccagcatctggaaagtatagacgacgaggaggacgaggaggccaaggcctggctgcaggcgcaccccggcaggattttgcctccgctgtcgcccccgcagcaccgctactcggagggcgagcggacctccctggagaagattgttccattgacctgtcatgtatggcaacagatagtatatcaaggcaatagtagaacacaaatttctgatactaatgtggtctgtttggaaacaacagctcagcggggttctggggatgatcagaaaacagaatcttggcattgtcttcctcaagaaatggactcttcccaaaccttggatacatcccagactaggtttaatgtgagaacggaagatactgaagtgacagacttcccctctctggaggagggcatattgacgcaatcagaaaatcaagtaaaggaacccaacagagatctcttctgttctccactgctagtcatacaagatagctttgcttctcctgatttgcctttgctgacctgtttgacacaagaccaagaatttgcgcctgattctttatttcatcaaagtgaactaagttttgcacctctgaggggaattcctgataagtctgaagatactgaatggtcttctcgaccatcggaagttagtgaagctttattccaggctactgcagaagtagcttcagacttagcaagcagtcgctttagtgtatctcagcacccgcttataggcagcacagctgttgggtctcagtgcccttttttaccttctgaacaagggaataatgaagagactatttcgtctgttgatgaactgaaaattcccaaagactgtgatcgttatgatgatctttgttcatatatgtcatggaagacacgaaaagatacacagtggcctgaaaacaatttagctgataaagatcaagtttcagttgcaacttcatttgacataactgatgaaaacatagctactaaaagaagtgaccattttgatgctgctcgttcatatgggcagtattggacacaggaagattcatctaagcaggcagaaacatatttaaccaagggcctgcaggggaaggttgagtctgacgtcattactctggatggcctaaatgaaaatgctgttgtatgcagtgaaagagttgctgaactacaaagaaagccaacaagagagtcggaatatcactcttcagatctcagaatgttgaggatgtctcctgacactgtgccaaaggctcctaaacatttaaaagcaggagacacttctaaaggaggcatagctaaagttactcaatccaacttgaagtcaggcatcactaccactcctgttgattcagacattggatctcatttatccttgtcccttgaggacctgtctcagttggctgtaagttctcctctagaaactactactggtcaacacactgatactctcaaccaaaagacattagcagatactcatctaactgaagagactctgaaagtcacagctattcctgaaccagctgaccagaagactgcaacaccaacagtactctctagttcccactcacatagggggaagcccagcattttctaccagcagggcttgccagacagtcatctaactgaagaggctttgaaagtttcagctgctcctggactagctgaccagacaactggcatgtcaactctaacctctacttcctactcacatagagagaagcctggtactttttaccaacaagagttaccagagagtaacttaaccgaagagcctttggaagtttcagctgctcctggcccagtggagcagaagacgggaatacctacagtatcctctacatcccactcacatggagaggacctcctctttttctatcgacagaccttgccagatggtcatctaactgatcaggctctgaaagtctcagctgtgtctggaccagctgaccagaagactgggacagcaacagtactctctactccccactcacatagagagaagcctggtattttttaccaacaagagtttgcagacagtcatcaaactgaagagactcttactaaagtttcagccactcctggaccagctgaccagaagactgagataccagcagtacagtctagttcttactcacaaagagaaaagcctagtattttgtacccacaggacttagcagacagtcatctacctgaagagggtctgaaagtttcagctgttgctggaccagctgaccagaagactggcctaccaacagtaccctctagtgcatactcacacagagagaagctccttgttttctaccaacaggccttgctggacagccatctacccgaagaggctctgaaagtttcagctgtttctggaccagctgacggaaagactgggacaccagctgtaacctctacttcctctgcgtcctcttcacttggagaaaagcccagtgctttctatcagcagaccttacccaatagtcatctaactgaagaggctctgaaagtatcaattgttcctggaccaggtgatcagaagactgggataccctcagcaccatctagtttctactcacacagagagaagcccattattttttcccagcagaccctgccagactttcttttccctgaagaagctctgaaggtttcagctgtttctgtattggctgcccagaagactgggacaccaacagtgtcctctaattctcactcacatagcgagaaatctagtgttttctaccagcaagagttgccagacagtgatctacctagagaatctctgaaaatgtctgctattcctggactgactgaccagaagactgtcccaacaccaacagtaccttcaggttccttctcacatagagagaagcccagtattttctatcaacaggagtggccagatagttatgcaactgaaaaggctctgaaagtttcaactggccctggaccagctgaccagaagactgagataccagcagtacagtctagttcttacccacagagggagaagcctagtgttttgtacccacaggtgttatcagacagtcatctacctgaagagagtctgaaagtttcagccttccctggaccagctgaccagatgactgacacaccagcagtaccgtctactttctactcacaaagagagaagcctggtattttctaccaacagaccttgccagagagtcatctgcctaaagaggctctgaaaatttcagtagctcctggactagcagaccagaagactggcacaccaactgtaacctcaacttcctactcacaacatagagaaaagcccagcattttccaccagcaggccttgccaggtactcatatacctgaagaggctcagaaagtttcagctgttactggaccaggtaaccagaagacttggataccaagagtactttctaccttctactcacaaagagagaaacctggtattttctatcaacagaccttgccaggtagtcacatacctgaagaggcacagaaagtttcacctgttcttggaccagctgaccagaagactgggacaccaactccaacctctgcttcttactcacacacagagaagcctggtattttctaccaacaggtcttgccagataatcatccaactgaagaggctctgaaaatttcagttgcctctgaaccagttgaccagacaactggcacaccagctgtaacctctacttcctactcacaatatagagagaagcccagcattttctaccaacagtcgttgccaagtagtcatctaactgaagaggctaagaatgtttcagcggttcctggaccagctgaccagaagactgtgataccaattttaccctctactttctactcacacacagagaagcctggtgttttctaccaacaggtcttgccacatagtcatccaactgaagaggctctgaaaatttcagttgcctctgaaccagttgaccagacaactggcacaccaactgtaacctctacttcttactcacaacatacagagaagccgagtattttctaccaacagtcgttgccaggtagtcatctaactgaagaggctaagaacgtttcagcggttcctggaccaggtgaccggaagactgggataccaactttaccctctactttctactcacacacagagaagcctggtagtttctaccaacaggtcttgccacatagtcatctacctgaagaggctttggaagtttcagttgctcctggaccagttgaccagacgattggcacaccaactgtaacctccccttccagctcatttggagagaagcccattgttatctacaaacaggcctttccagagggtcatctacctgaagagtctctgaaagtttcagttgctcctggaccagttggccagacaactggcgcaccaactataacctctccttcctactcacaacatagagcaaagtctggcagtttctaccaactggcattgctaggtagtcaaatacctgaagaggctctcagagtttcttctgctcctggaccagctgaccagacaactggcataccaaccataacctctacttcctactcatttggagagaagccgattgttaactacaaacaggcctttccagatggtcatctacctgaagaggctctgaaagtttccattgtttctggacctactgaaaaaaagactgacataccagcaggacctttaggttccagtgcacttggagagaagcccattactttctaccggcaggctctgctagacagtcctctaaataaagaggttgtgaaagtttcagctgctcctggaccagctgaccagaagactgagacattaccagtacattctactagctactcaaatagggggaagcctgtcattttctaccagcagaccctatcagacagtcatttacctgaagaagctctgaaagttccacctgttcctggaccagatgcccagaagactgagacaccatcagtatcctctagtttatactcatatagagagaagcccattgtcttctaccaacaggccctgccagacagtgagctaactcaagaagctctgaaagtttcagctgttcctcaaccagctgaccagaagactgggttatctactgtaacttcctctttctattcacatacagagaagcctaatatttcttaccagcaagagttgccagatagtcatctaactgaagaggctctgaaagtttcaaatgttcctggaccagctgaccagaagactggggtatcaacagtaacctctacttcctactcacacagagagaagcccattgtttcctaccagcgagagttgccgcattttactgaagcaggtttgaaaattttaagagttcctggaccagctgaccagaagactggaataaacatcctgccctctaattcctacccacagagagagcactctgtcatttcttatgagcaggagttgccagatcttactgaagtaactttgaaagcaataggggttcctgggcctgctgaccagaagactgggatacaaatagcatcctctagttcctactcaaatagagagaaggccagtatttttcatcagcaggagttgccagatgttactgaagaagctttaaatgtttttgttgttcctggacaaggtgaccggaagactgagataccaacagtacctttaagttactactcacgtagagagaagcccagtgttatctctcaacaggagttgccagacagtcatctcacagaagaggctctgaaagtttcacctgtttctataccagcagagcagaagactgggataccaataggactgtctagttcctactcacattcacataaagagaaactcaagatttcaactgtgcatataccagatgaccagaaaactgagtttccagcagctacccttagttcctactcacaaatagagaagcccaagatttcaactgtgattggaccaaatgaccagaagactccatcccagacagcttttcatagttcctattctcaaacagtaaagcccaatattttatttcaacagcagttgccagatagagatcaaagtaaaggtattctaaagatttcagctgtccctgaactaactgatgtgaatactggaaaaccagtatctctctctagttcttattttcacagagagaaatcgaatattttcagtccacaggaattgccaggtagacatgtaactgaagatgtgctgaaggtttcaacaattcctggaccagctggccagaaaacagtattaccaacagctcttcctagttccttttcacatcgagagaaaccagatattttctatcaaaaggatttgccagatagacatctaactgaagatgctctaaagatctcaagtgctcttgggcaagctgatcaaattaccggattacaaacagttccctctggtacttactcacatggtgagaatcacaagcttgtttcagaacatgtccaaaggctaatagataatttgaattcttctgactccagtgttagctcaaataatgtgcttttaaattctcaggctgatgacagagttgtaataaataaaccagaatctgcaggttttagagatgttggctctgaagaaatccaggatgcagaaaatagtgctaaaactcttaaggaaattcggacacttttgatggaggcagaaaatatggcactgaaacgatgcaattttcctgctccccttgcccgtttcagagatattagtgatatttcatttatacaatctaagaaggtggtttgcttcaaagaaccctcttccacgggtgtatctaatggtgatttgcttcacagacagccattcacagaggaaagcccaagcagcaggtgcatacagaaggatattggcacacagacgaatttgaaatgccggagaggcattgaaaattgggagtttattagttcaactacagttagaagtcctctacaggaagcagagagcaaagtcagtatggcattagaagaaactcttaggcaatatcaagcagccaaatctgtaatgaggtctgaacctgaagggtgtagtggaaccattgggaataaaattattatccctatgatgactgtcataaaaagtgattcaagtagtgatgccagtgatggaaatggttcctgctcgtgggacagtaatttaccagagtctttggaatcagtttctgatgttcttctaaacttctttccatatgtttcacccaagacaagtataacagatagcagggaggaagagggtgtgtcagagagtgaggatggtggtggtagcagtgtagattcactggctgcacatgtgaaaaaccttctgcaatgtgaatcctcactgaatcatgctaaagaaatactcagaaatgcagaggaagaggaaagccgggtacgagcacatgcctggaatatgaagttcaatttagcacatgattgtggatactccatttcagaattaaatgaagatgacaggaggaaagtagaagagatcaaggcagagttatttggtcatggaagaacaactgacttgtccaagggtttacagagtccacggggaatgggatgcaagccagaagctgtatgtagtcacattattattgagagccatgaaaagggatgtttccggactctaacttctgaacatccacaactagatagacacccttgtgctttcagatctgctggaccctcagaaatgaccagaggacggcagaacccatcatcatgcagagccaagcatgtcaacctttctgcatccttagaccagaacaactcccatttcaaagtttggaattccttgcagttaaaaagtcattccccatttcagaactttatacctgatgaattcaaaatcagcaaaggtcttcgaatgccattcgatgaaaagatggacccttggctgtcagaattagtagaacctgcttttgtgccacctaaagaagtggattttcattcttcatcacaaatgccgtccccagaacccatgaaaaagtttactacctccatcactttttcatctcaccgacattctaaatgcatttccaattcctctgttgttaaggttggtgttactgaaggtagccagtgtactggagcatctgtgggggtatttaattctcatttcactgaagaacaaaatcctcccagagatcttaaacagaaaacctcttccccttcatcatttaaaatgcatagtaattcacaagataaagaagtgactattttagcagaaggtagaaggcaaagccaaaaattacctgttgattttgagcgttcttttcaagaagaaaaacccttagaaagatcagattttacaggcagtcattctgagcccagtaccagggcaaattgtagcaatttcaaggaaattcagatttctgataaccatacccttattagcatgggcagaccaagttccaccctaggagtaaacagatcgagttccagactaggagtaaaagagaagaatgtaactataactccagatcttccttcttgcatttttcttgaacaacgagagctctttgaacaaagcaaagccccacgtgcagatgaccatgtgaggaaacaccattctccctctcctcaacatcaggattatgtagctccagaccttccttcttgcatttttcttgaacaacgagaactctttgaacagtgcaaagccccatatgtagatcatcaaatgagagaaaaccattctccccttcctcaaggtcaggattctatagcttcagaccttccgtctcccatttctcttgaacaatgccaaagcaaagcgccaggtgtagatgaccaaatgaataaacaccattttccccttcctcaaggtcaggattgtgtagtggaaaagaataatcaacataagcctaaatcacacatttctaatataaatgttgaagccaagttcaatactgtggtctcccagtcagccccaaatcactgtacattagcagcatctgcatctactcctccttcaaatagaaaagcactttcttgtgttcatataactctttgtcccaagacttcttccaagttggatagtggaactttagatgaaagattccattcattggatgctgcttctaaagcgaggatgaatagtgagtttaactttgacttacatactgtatcttcgagatcactggaaccaacctccaaattattgaccagtaaacctgtagcacaggatcaagaatctttaggttttctaggacctaaatcttcactggatttccaagtcgtacagccttctcttccagacagtaacactattactcaggacttgaaaaccataccttctcagaatagccagatagtaacctccaggcaaatacaagtgaacatttcagatttcgaaggacattccaatccagaggggaccccagtatttgcagatcgattaccagagaagatgaagaccccactttctgctttctctgaaaaattgtcatctgatgcagtcactcagataacaacagaaagtccagaaaagaccctattttcatctgagatttttattaatgctgaagatcgtggacatgaaattatagagcctggtaaccagaagctacgcaaagctcctgtcaagtttgcctcatcatcttcagtccaacaggttactttttctcgcggcacagatggccagcctttattattgccatataagccttctggtagtaccaagatgtattatgttccacaattaagacaaattcctccatctccggattccaaatcagataccaccgttgaaagctcccattcaggatccaatgatgccattgctccagacttcccagctcaggtgctaggcacaagagatgatgacctctcagccactgttaacattaaacataaagaaggaatctacagtaagagggtagtgactaaggcatccttgccagtgggagaaaaacccttgcagaatgaaaatgcagatgcctcagttcaagtgctaatcactggggatgagaacctctcagacaaaaaacagcaagagattcacagtacaagggcagtgactgaggctgcccaggctaaagaaaaagaatctttgcagaaagatactgcagattccagtgctgctgctgctgcagagcactcagctcaagtaggagacccagaaatgaagaacttgccagacactaaagccattacacagaaagaggagatccataggaagaagacagttcccgaggaagcctggccaaacaataaagaatccctacagatcaatattgaagagtccgaatgtcattcagaatttgaaaatactacccgttctgtcttcaggtcagcaaagttttacattcatcatcccgtacacctaccaagtgatcaagatatttgccatgaatctttgggaaagagtgttttcatgagacattcttggaaagatttctttcagcatcatccagacaaacatagagaacacatgtgtcttcctcttccttatcaaaacatggacaagactaagacagattataccagaataaagagcctcagcatcaatgtgaatttgggaaacaaagaagtgatggatactactaaaagtcaagttagagattatccaaaacataatggacaaattagtgatccacaaagggatcagaaggtcaccccagagcaaacaactcagcacactgtgagtttgaatgaactgtggaacaagtatcgggagcgacagaggcaacagagacagcctgagttgggtgacaggaaagaactgtccttggtggaccgacttgatcggttggctaaaattcttcagaatccaatcacacattctctccaggtctcagaaagtacacatgatgatagcagaggggaacgaagtgtgaaggaatggagtggtagacaacagcagagaaataagcttcagaaaaagaagcggtttaaaagcctagagaaaagccataaaaatacaggcgagcttaaaaaaagcaaggtgctttctcatcatcgagctgggaggtctaatcaaattaaaattgaacagattaaatttgataaatatattctgagtaaacagccaggttttaattatataagcaacacttcttcggattgtcggccctcagaggagagtgagctgctcacagatactaccaccaacatcctttccggcaccacttctactgtcgaatcagatatattgacccaaacagatagagaggtggctctgcacgaaaggagtagctctgtttccactattgacactgcccggctgattcaagcttttggccatgaaagagtatgcttgtcacccagacgaattaaattatatagcagcatcaccaaccaacagaggagataccttgagaagcggagcaaacacagcaagaaagtgctgaatacaggtcatcccctagtgacttctgagcacaccagaaggagacacatccaggtagcaaaccatgtgatttcttctgactctatttcctcttctgccagtagtttcctgagctcaaactctactttttgcaacaagcagaatgtacacatgttaaacaagggcatacaagcaggtaacttggagattgtgaacggtgccaaaaaacacactcgagatgttgggataactttcccaactccaagttccagcgaggctaaattggaagagaacagtgatgtgacttcttggtcagaagaaaaacgtgaagagaaaatgctctttaccggttatcctgaggacagaaagttaaaaaagaacaagaagaattcccatgaaggagtttcctggtttgttcctgtggaaaatgtggagtctagatcaaagaaggaaaacgtgcctaacacttgtggccctggcatctcctggtttgaaccaataaccaagaccagaccctggagggagccactgcgggagcagaactgtcaggggcagcacctggacggtcggggctacctggcaggcccaggcagagaggctggcagagacctactgaagccatttgtgagagcaacccttcaggaatcgcttcagtttcacagacctgacttcatctcccgctctggggagcggataaagcgcctgaagttaatagtccaggagaggaagctgcagagcatgttacagaccgagcgggatgcactattcaacattgacagggaacggcagggccaccagaatcgcatgtgcccgctgcccaagagagtcttcctggctatccagaagaacaagcctatcagcaagaaggaaatgattcagaggtccaaacggatttatgagcagcttccagaagtacagaaaaagagagaagaagagaagagaaaatcagaatataagtcataccggctgcgagcccagctatataaaaagagagtgaccaatcaacttctggggagaaaagttccctgggactgacacaagtttattttcctcagagccttggaattctattttatgaacctagagaagcagaatccttacttttgtgagtctggttgaataaagcttattctttgtccatgtgtattttagaaatagtaacttctaaagagtctggaacaaagtggtgattaaaattcctaatggtttgggagcaatactttctgcatagtggccttgtccaatggcctgtgtgttacaatgatatgatcatttctcaagaataagtccctttttgtatgtgtttttatacttttagaaaataaaaactttagattaactc

SEQ ID NO: 23996 - DNA, 1416 bp, Homo Sapiens
ggcacgagggcagcagcaacaccacatccttcggcacgctcgcgagtcagaatgcccccactttcggatcactgtcccaacagacttctggttttgggacccagagtagcggattctctggttttggatcaggcacaggagggttcagctttgggtcaaataactcgtctgtccagggttttggtggctggcgaagctgagggcgtgtcagcaggcctttcgatccctgggaccaaccgcatcctcagcttcttccccgagaaatgctggagcaggctgttcagaccgacgttgccatcaaaacacatacacccagaaagaaacaacagaaaccaaaactcacaaggcgcatgattacttgttttatatttcatgttgggttttccctcccactattaaacagtctgtttccgtacagaacgtatgtgggttttttcagatcacagccaagaagattgccccgtttctgtggctctgagaagccagcagagcctccatcagccagaacactgtgtcttcaaggatggcatcagaagtcaccagcgtcgggtgttgataaacagcatcgaatgtgccgtggtctcacttggacctagcgccctccacatagggaagaggttgaatgctggtgggtcatctttttgaggctgaaacttggttatctcctctccttgttcttttagccattgtgtatcaggaccatccaaggacgcactctgcgattgagtggaggcagaggaagccactcatgccagcagcagttgagtttcagaagcagccatagcgcttttcagtacagtacaatagtagccagcgtgaggcaggacagtgctgcgccttagccggccttggctctcatctccatgtggctcttgggtgccatgtgtcctactccagagaggagggggccggtcacttgagaagacagcctttatattctgtatgtggcagtgacattggtagccacacctacccagtgtctactaaccacagtgcagatagcccttgggtagacccaggaagtgtgaagacagacactgctgttgccagacaacactagcagaacgatgctggatttgacaacagtgtttgctaggacggcccagagctcatcactgcagttttattagagtgcttctttatctttaatgcagtatctttgaggcctgtaacatcctagatagttgccatcaaacaaggaccgtctcgcattgaaaacagatgtaagaatttctctttcaggcccagaatctgacagtgctttggcttgggtcatgagcagcggggagttgggaagagatttttttttttagagttttacatattggcaggttgtatttttttaatgttttaataaaagtttgacatgacattaattcatcaaaaaaaaaaaaaaaaaaaaaaaaaaaaacgaag

SEQ ID NO: 23997 - DNA, 1988 bp, Homo Sapiens
ggcacgacgggccaaaagtctctaccacacctactcaactctgtcacgctagcacaaaacagccacacacaaatacattaaaaaatgggtataactgtgttccaataaaactctattagcaacaggcagtgggccagatctggcccactgactgcagtttactaactatcccctgatcaagaatgtccaacaatagctgaaagttacttgagaaagtcagcactgtaggaggaagaaactaacaccaaaacacaagccggtagttctggggaaatgctggcagaccaagggcgggacctcttgcccagaataatctctctctcctactaaggaacctataggttcactgaagtaatccattactttgaatcactctctcctttgccccacctttaaacacaaatccccatccctaatagttactggtgaacagatggactcatccctttcttatccgagaagccccatcacatgctatgtcctatcacatgctataccagaagctagggctgcagaggtggatgacgcccccagatccctgccccctaggggcttaagagtctagcaggggcacctgacccaagtaagtacaatgcagggtaaggctggctaaagagcacgtgaaaaggagctgggaacacagctggtcagcagagcttcagggagggctgaaggacaggctgcacacgaggcactcagaaaacagcagtgaaacagaaggcaggcagcaacggcagtggtactggacctggggaacaccaagttcaagctctatatacaacgaggacaaaaatgaaccaggctccctgaaagcagggaatctaacctgtgctacggcgccttcccagtccacgagggcgtgagagtacatacacatgcaagtgcactccagcgctcacccaagcaacacccttggagaaacacggactccaggcccaaatccagcctgagaccctcaaagggcagatccgctcacctcaagttttcagaagatctgaacccactgggggctcctgctcctctgcctgccccatgccagactaggattccagtgacataagcgccctctacagactcagaaggacagagaaggttctgctggaagtgggctcctcagcaaaccagcagataggggttcctttgatatttataccccaggttttttcactctcacgtgacatctatgtggggccaatgaagccaattcttcttttgtacatatgcagtcctgtaagaatgcattcaaacgggatccgctaattaggaattttctcctggaattctcaacagtctatggggccagaagctttccacaaaccagtgaaggtggcagcaaagaaagcctcttagacgaggagctggcagcagctgctatctagatagacagcaaaaaccaaccactaattcagcaaacacaacctcatacctaaccgcttccctttaaatggccttcggtgtgtgcgcacatgggcacgtgcggggagaaccatacttattcccctgttcccggcctaccacctctgctcccccttctcttctctaccatttaactgtctcctctgctttgtttcttatcactgctgctggtgtctagagccagccagcagtacctggcagacatcgcgaccctgcgggcagcgcttaggactgcacatttacatttcccaaatgatctgggtagatggggacaggtgaagacttggggaaacggaaatatacgaatgacatgagacatgcatatctagtgtcaatccattcgactgggcacaggacagcagactgctgacagtgctatgtaagattatgagtgatcctccctctattttgcaaacagtctgtaagtaactgataaaactttaaaatatgcaaattttaaaattatatagtttgatttactcatcaaattatcatgtatgctgttatttaagtatgaataaaggcttttttaaattggaaaaaaaaaaaaaaaaaaaaaaaaaaaaaaatga

SEQ ID NO: 23998 - DNA, 1178 bp, Homo Sapiens
ggcacgagggcaaaatgaaagctggtccatgtgggaactacctactgttgtcctttccttgggcagacaccatatactttttagctcctagcagtgtttatcccgttttccccaaagcatccttggactcaggcctttcatcctggacccatctgtctggcctgttgtgctgagcctttggtctaagtggttggttggtcccagccacttcttcaaaagaaggtttcctgaggtaaccataaattagggcaatcgtacttccaggaacagtgaggctgatgggcctgttcccaagggtactttggcagggggtgctggggaaggggctggcctagggccaggttcatcataccgttagccctgcagccccatgcctgtgtgtcctggtttacccgccgtgtagtggtcctgcaggagtggagcctgtaggacttgcttctcagcggctccaagcagaactctgtctgggaaggtgggaggtgcagccagtctagacctgaagccctcacactaaggactaaggtaggcctgctcagccttagcccttcgtcaggcccaagggtgggggaggcaggaggaggctgagcgtagtcgtggatagaaacctttccctaccgcacggttacacacatggcatgggactcctggctgtagctcactcgggtctactgaagaccaagttggtttttagaaatctatttaaaatatctatcatgtatctatttactgtgtttttctgaatacgcaagtgtaaatagtataatttgcagtgcaaaatccttggcaataactttgtgtattatgtttaaaaacactggaaaccgtgaccaccatggactgcccttcccctctgaggcaattattacatgtaggactctgaactttaaaccttcagcgtgactgaagcagcagcctgcacatgtggatggtcatcagtgcctcgcccagagatacctggccttcatccaaagggaccctgctgccacaagtcctccaggcagcacccgcactgtggctccttcgcactgagtatgttggactctgccatagactgaccctcttgtctggctgctgcagtttgtctgtaatgccctgacatgttgcattctccccatttggataaataaaaacaaacaaatgcttctgtcacacacaaaaaaaaaaaaaaaaaaagatct

SEQ ID NO: 23999 - DNA, 1560 bp, Homo Sapiens
ggcacgaggtagaaatgataaggaaatttgtaacagagacccttgaagatggctctaggctaaatagtaagcaactgaacagattgctgggagtatcctggaggttaatgcaaatacagccaaacagagaggacacagagactcttattaaggcagtttatacattatatcagcagaggggccttatccttccagttcggactttgttattgaagtttttcagtaaaatctatcagacagaagaactgagatcttgtagattcagatatcgtagtaaagtgttatcccgttggctggctggcttaccattgcaacttgctcatcttggctcccgaaatcctgagctctctacacagcttatcgatatcattcataccgctgcagcacgagcaaataaagaattactaaaaagtttacaagctactgccctccgaatttatgatccacaagaaggtgctgtggtggttctccctgcagactctcagcagcgtttggttcagcttgtatatttcctacccagtctgccggctgatttgctttctcggttaagtcgttgctgtattatgggaagactcagttcaagtttggctgccatgcttatcgggatactgcacatgagatcatcattttctgggtggaagtattcagctaaagactggttgatgagtgatgtagactatttcagcttcttattttccacacttacagggttttcgaaagaggagttgacttggcttcagagccttcgaggagttcctcatgtcatccagacacagctttcccctgtgcttctctaccttacagatttggatcaatttttacaccactgggatgtaacagaggcagtttttcacagtttattggttattcctgcccgaagtcagaactttgacatcttgcaaagtgccatcagtaagcatttggttgggttgactgtaattcctgacagcacggctggctgtgtttttggtgttatctgtaagctcctggatcatacttgtgtagttagtgagactctactgccatttctggcttcttgttgctacagtcttctttattttctgctcactatagagaaaggggaagcagaacatctaagaaagagggacaagctgtggggggtctgtgtctccatcctggctctcttgcctcgagtcctcaggttgatgctgcagagcctgcgggtgaacagagttgggcctgaggagctgcctgttgtgggccagctgcttcgactgctgcttcagcatgcacccctcaggactcatatgttgaccaatgcgatcttggtgcagcagatcatcaagaatatcacgacattgaagagtggaagtgttcaggaacagtggctcacagacttacattactgctttaacgtgtatatcactgggcatccccaagggcccagtgcactggctacagtgtattgaagaggccatagtacctcctgtttgaagttgtttattcacatctatcttatttgaagaaaaagactgatgtaatagatctttgtcattaaagctgaacttttaaagaaaaaaaaaaaaaaaaaaaaaattg

SEQ ID NO: 24000 - DNA, 1476 bp, Homo Sapiens
ggcacgaggcaagaacacgcgaaaatgacaaaataccaaataaaaatccaaaatagaaacaaatccaaaagaaaacaaaagttgatgaaataaaatctcagtaggaggattaagtaaaagaattagcaaattgaaagaattttaagagacgaagacagaataaaaagctccctatgtttaaaaggagtttttagaagaaaatagaaacaatgggggaagatggttaaaaattaataataactttccagacttgaagaaaaaaaactgaatcttcacattacagaagcacactatgtctagggcaggataaataacaaatctacactaggacacatcctgatctgcaacacattgaagataaagagagaacagtaaaaatatagattactacctgtaagattactacctacaaactaagagggctcagactaacagcagattttttcattagttaacactgaggcaaggagacaatagaacagtatcttcaaggcacagcagacagtactaaacaactcaactcggtcaaacctaactttctggccagcacttgtgaaatcaaaggctccccagtaatttgattagcactttcatcattttgtaatcttataaacacgttctccagtggggaagaaatagcccaaatgggaattttaggtacctaagacttcggctgccaactgtgcctaatatcctagtaatgttaacctttccagtacccagtatagaatacccctacaactgggcattttaaacaggcaaacaagtattacacacacttaattttgttcattccagccacatgaagtcaaaggatgtttctctataagaaactacaatagatctttgaaactttgcatgaagttgttttaggggccatacttcaagtgacaggaaataacaaatagcaatacacacacatttcattaagtggggatcttataaaatctctagaaccctgagaagttccttgctacttataaagccttttcttgacctgtcagacctaatgtttgatgatgtataagaaaactatcgtcgaatttatgttatgcataaattttatagtatatttaaagtgaaatacacaatttttttctatgcacatactcttactggaaaaaatttgaatgctgacaataaaatggctaagttatggtacatgcatgtaacagaatactatagagcagactgagcaaactatggccacaggccaaatccagcccatggtaagtatttgtaaatagttttactggaacacaattatactcatttatttacatattatctattgatgctttcacactaccgtggtagtgctgagtagccatgacagagacctaatggtctgcaaaacctaaaatatttactaactaaccctttatagaaagaactttgctgaaccctggtatggagaaataaaaacgaatgaaatacaaaaaaaaaaaaaaaaaaaaaaaaaaaaaaaaaaaatga

SEQ ID NO: 24001 - DNA, 2487 bp, Homo Sapiens
ccacgcgtccgccctgacaatttttaaaagtagtaagccacattacatttatctttgtaaaaagatttatggtaactggtttcttacttgacttttataaatagtattttacatcttatttttgcctttatttcataagtaatttaaaaatcactggattgctttattatattcagggcaatatggattatttttataccaaggatttgcatcgtgaattacattaagttatttggcaatttataatttattactactttaaatcaaatgtagcattatcacactgtatttaaattgtcattttttaaaggaatattttcttcttaagatatatagaggattttggagaagagagacaggaggggtaaaaccagcttaaggttcagcgagcagaaagggacctgagaggatgctcactgtaagactgttggacagtggtgtgtattgaggggatgaatcggaacgatagtctcatgcagaaaatagtgagattaagatcatccttattgtttctaaattatttcaatcagatgaaagtgatacgattgaaatgaaatcacatagttcgtgctcagaaattctattttggtatgtttgtattagcctttagaaaaaacactccgtttcagaattgttcacagttttatttcttaggtttttagagttcaggatttcatttattaatttcttcttgcttttttggtggaaataggctttgttgtaaacattaagaatataaaatctcctctatatagaaacaagaattttgttaaaaagagaatttgaatcccttcccatactataaaatgctctgtagggagacaaagtgtttcttttttcttttatgtttactgtttatgtggagtgaaatataaggctcttggatgtataacatactcaaagctgttacactttctctgatctgctgtgatccactgaaaatgtgctggggtttgttctgctgtcactgtttatgctgctggaacttagcactgtcttgatttgaagcatatgattgagagccatttgaagcaatcttcattaatgcagataaaacaagtttacatgtgcagagttagaaaatgacatgttcaattctgtaagtggtgactttttgagcacctttcagtattatgtatttgtaaaaaccattgtttttggatataaagctaataagcactttaaaaaggaaaaggcagcctttactattttttctggttgagtcattgctctttagacctagcatcagcaatagatttcaaagataagtattaagcgctaccctaaagtgtgtaagtttttcattttgtcatattgaaaaatgatttgcatagtactgaatgctgacacacagcttatatgtatttacaagaatatctttaagtgtttttttgacacattaaaataaaggaaataaggaaattgtaagctttatttggatttttaaatacatttttaaaatttcagatgtaatttaacatcacatttgtttttcaggtattgagtttagatgtctacttttatgagtaccatcagctggacacagtgtctcatgcctgtgtttgcagcactttgggaggctgaagcagatcgctggagcttatgagttcgagaccagcctggacaacatagtgaaacactgtctctgcaaaaaatacaaaaattagctgggtatggtgagacagtgtctcactgtgttgcccaagctggtcttgaactcctgagttcaagagatcctcctgccttagcctcccaaagtgctgggattacaagcataagcaccacacctggctgaacatcagatattttaaagtgtagcccagagtctagttggtaaatgttacttatattgggactagtattttctaatgtttctgggatatgctccctataaaatgaaatgttttcctggaacaatgctaattaggattgcattcctggccaaagacatgacatcaaataagtaatagacatcaccagcaatgaattttgaaaagcaaaaaatactattaacctatataaccatttaaaatttaaaaaattatgttccaagtacctctattttctgagctagaagaaaccttagaggccatctgatgatagattcccagagctggatggatccctagggactacctaatctgactttctgtccactgcatggattcttctaaaaagtatgtcacttatttccctaccttattaagactaaataagtggaacatcatagagctctttatttataacagtcattctttgatagtcaactcttaaatggagacttgagatgcttaaatattgtactactgtgcttatcttgtaaagatttcataaaatgatagtattggttattttaaaaaggctttggcttatgctgaattatacatgtagcaccaaaatgttacaactctactaaatttccttgttctaaactattatattagctataataaatattagtcatacatgtaaaaaaaaaaaaaaagg

SEQ ID NO: 24002 - DNA, 800 bp, Homo Sapiens
ggcacgaggaattttttttttcttttttttttttttaggatggggtgtgagtgaagtaacttccacactgtcaagagttgacagcatattaattgtgtggcattataattgtgagaaacaaatgagagcaaaatgttaggtcctttgacaagcattttcctcctgtttttaaaaagggctttaagttgtttcctatgtaaggtaatctttcttttttagtattatctaagaaggatggtagattatgtcattttggaaactattgtgtcccttgtattttaaatatttcaggaaaatgcctacgattgttacaaagatgtgtgttttacttataacataagctctgattctccagtggccactgggccttctctgtgctctgtattcaactgcagtatgaattacagaatgctgtgcatgttcgttagtaccaataccatgtgtatgtggtagaagttgtaaccagtttctggatctgtatggtactataaaatacttattttataattctgtaaccgtatggcagtgttatgccaaaaatgtataaagagcaatagtttttgttgcttactgctgtattttaaaatattgtttctaaaataatagagttagagttccttttgagtaattatttttaagaactattgccaaatatacatcctgtaaaactaataaaagccactccatcttagataacattttagcattgtgctagagtacattatggtgattttgcacgattaaaatatttttaaagaactagaaaaaaaaaaaaaaaaaaaaaaaaaaaaaaaattggt

SEQ ID NO: 24003 - DNA, 1622 bp, Homo Sapiens
ccacgcgtccgccagaaagtactcaagacattcacggtgccccggtcagcactcgccatgacgaagacttctacatgcatataccacttccttgttctgagctggtatactttcctcaattattacatctcacaggaaggaaaagacgaggtgaaacccaaaatcttggcaaatggtgcaaggtggaaatatatgacgctgcttaatctgctcttgcagaccattttctacggggtcacctgcctggatgatgtgctgaaaagaaccaaagggggaaaagacattaagttcctaactgccttcagagacctgcttttcaccactctggcttttcctgtatccacgtttgtatttttggcattctggatcctctttctctacaatcgagatctcatttaccccaaggtcctagatactgtcatccccgtgtggctgaatcatgcaatgcacactttcatattccccatcacattggctgaagtcgtcctcaggcctcactcctatccatcaaagaagacaggactcaccttgctggctgctgccagcattgcttacatcagccgcatcctatggctctactttgagacgggtacctgggtgtatcctgtgtttgccaaactcagcctcttgggtctagcagctttcttctctctcagctacgtcttcatcgccagcatctacctacttggagagaagctcaaccactggaaatggggtgacatgaggcagccacggaagaagaggaagtaattgcacaccattttccaagaaccaagaaagaagaaaacacaagagatttttctcatcttttttttttttttctggtggagggaggtggtggaggaacatagcaaagtaggagggacagagagtgatacttaaatttaataagaggttcgtgaaggtagcttaacttgagaactcttggttttttgaaaggttgactgcacatgccaaaaacaactcctgctatctcagaattaattatctttgaccttcgtggaggatggtctctggttaaaatctggccaaagaaactcacataaacttggtgttagagaacatctagagagagagagaggaacttagagtcatttaaactcttcagtttacagagaaggatgctgaggacctagatgagaagttacctgcaaaaggcaaaagggttacttagtgtcagaaccaaggcaatgacttctctctcccagatctcctagctactggtcctgggccatttttttttttaaataatcccaacttttctttaaaagacaagcatttcagtaagctagttattttcatgggttgctcatccatttttttcagtgatctaaaaatgtagggagatggctactactgaagttgtctgtctacttgggataatagcaaattaattgaagacaatgggaaagtaagttataaaaaatactgggaaatctgtttctcttctgagcaagcattcagggcaggtataaacatcaaacatagtgacattgtcaaaacctcttccatttgaacattgattaattcatcaaataaatggtatagtaataaattttgcttgcagaagaaaaaaaaaaaaaaaaaaaaaaaaaaaaaaaaaaaaaaaaaaaaaaaaaagg

SEQ ID NO: 24004 - DNA, 1597 bp, Homo Sapiens
ggcacgagattataactgccccctttgattgtaaccattcagtttgcagcattcgtttttgtaatagcagtttggctgctatgggtgtgattcaatggtaacctacaaggcaaatttgtacaggagctgacagatttttctaacaaaataaggagactttgaagcacattgaataggagtttttaaatgaataggattttttaaaggaaaaagagtaggagcttgggggggaaggctggttgaaataaatgagcaaatcacaaataataaatcctttagaaataccttgattggcagtaagtgtggattatgctcatctcagtatttaattagaaataacttacctttgtcttttgtctttttaattaaagtggctgtaaaaaagaaggtccagatgaactgagattgtttgcttaggaattctgttttactcttttccttttacctgatgttctaaaacagggcttaccttgttgaggaccttagaggctttgcaattctagattgtgattctttcatatcattttagtttttctcccaagactacactaaaggagacatcacgagatttgcaaggttaaaaacaattctgcacgtgcttcctcctgctcccaaatccggtcatccacctttcagagcagcaccgtaaagtgaagacagacatttattagatgaaattctggtttcacttttacacttgtgcaagcatttttaacagtaaaggagaggaaagggaggaatttatatttctagataatatatgaaaattaccttgatattgtatttttaagatctttcaccaatactgcagtgctgcactagaaataattagtttaagaaaatacattcaacattgtccaggtgatcctgtcaccttttagatgacgaaaaacatcttgaggatgttttgtacagttattttcccattgttactcttagagacttttgtttcaaaaaggcaggctcattttattttgttttatcttagaacattttagcagctctttgtcatgggttaaaaaaatctagaattaaaaaaatgtttaatatatgatttatataattttgacaagaatacaaattcttagtcgttcaaaattggaagcgctcttagaagtgtcaagctcagctttccattccacaaatgaagtaactggtaactgtgacttattatgttatacagtgacagttattatgttatacagtgtcagttatacagtgacaaccaggacaaaatcctagggttctagattccccttctggtgctctttttaccagatgatggcattactaattgcctaccttgaggcctttgaaatcaccatgtctgataaaaacatgcaattgctttggtgaatttgtttgttttattgttgttgctttgagtgaatgcttcagtttgctctagattttactttgtttgttaaaaattaccatgttttaacccccgaaaacatttaatgtttttgaaatgattttttcataacaatcttatgagtctattatataataggaagtattttggaaatttaatggtgatatttctttggaaaagaaaaataaaaactctggaatgcaaaaaaaaaaaaaaaaaaaa

SEQ ID NO: 24005 - DNA, 1585 bp, Homo Sapiens
cttcgtcatcaactcactcagctcgtgttttggcttcctcgatcctactctgtctctctttgttttggagaagttcaatttaccagctggatatgtgggactagtattcctgggtatggcactgtcctatgccatctcttcaccactatttggtctcctaagtgataaaaggccacctctaaggaaatggcttctggtgtttggcaacttaatcacagccgggtgctacatgctcttagggcctgtcccaatcttgcatattaaaagtcagctctggctgctggtgctgatattagttgtaagtggcctctctgctggaatgagtataattccaactttcccggaaattctcagttgtgcacatgaaaatgggtttgaagagggattaagtacattgggacttgtatcaggtctttttagtgcaatgtggtcaattggtgcttttatgggaccaacgctgggtggatttctgtatgagaaaattggttttgaatgggcagcagctatacaaggtctatgggctctgataagttacttttaattgtgtttaagggattagccatgggcttgttttatctactggagtattcaaggagaaaaaggtctaaatctcaaaacatcctcagcacagaggaggaacgaactactctcttgcctaatgaaacctagtccgatggatcctggattgatacaaggttgagaaatgaatgctcctggccttaaacatcaccgtaggaagggtttttaaaattttacgcgcaaaactccgtggaccccgtgccagtgtcttggaagtgtcaacgtgtttttggatgatcctgtattgggctgtacttactgtgatactgaaaagctgtcctgctgaagcagctatatttgaaatattaagtatgaaaggagtaattaaaaacaagcaaaacaaaacaagacttagtttttaaatgaccaaacttgtccttaaagatgttgttattaactcgagttagttcttatttcctctgtttattttttattctaagtacactgattctgtgaatgtaccttttttattaacagggaaagaaatgaattaatttgatatgctctaaatacataaaggtgcttcaaaatatgtagaaacattactatgaaatcagtttttaaaagatatactttctctttgtcctgaggtttttcggtcttgttcaaaaggaagaattcttgcctgccatacagaaactctctagcactccctgaccttaagcttttctaaaaattctgtttgtgtgaaaagtacaagaataacaatacttacaacttccatttttgtaacctacgttcacttatgatctggatttataaacattacttggtataacgtttttcatttcctttaatgtctctgttttttggctctaccatctgttttgtttttgtttttatctatatcttggtagatgtatttcatccctagagcaggtcagcctccttcccctaatgcgaatgcttgttttgttagggaagggcttcctccaacttcgtgtgaaattgtgatgttgaagtgaataaatgtctattgtgtaaaaaaaaaaaaaaaaaaaaaaaa

SEQ ID NO: 24006 - DNA, 2578 bp, Homo Sapiens
ggcacgaggattttatattctagaatgttaactgtggtatttcagaagacagagcttgactcaatgaattgtagaaatataggcttgacttaatttttgtaactgaaaggctttagacttaaaaaaaatttattgtgcatcctaaaatctaaaccaattattaatgatcatttattgtaatgagtttgcatttcagctttattcaatgcagtacaaaatagttttctttaagcagtcttttatcaatcaatgctgcactagaaatagattctcaaaagttactaaacattttactttttttgttttttaaaagaaatgcagatgagtgtaaaacatctgttctcaattatgttgatctgtgtgcgcagtactggagcatttacccattcatgttgagcctcaaatgcttgttttctggggtccacaaaagacagttttatacattttgagttgttcataaagtttgtcttgtgatagtcctggcacttaaagacaaatttttctggtagtaaaagttcagatttattactatgtcatgaaacacagtacattcaaatcaaacggcagttttctttctaagtaaatgatttccagtcatctaaaaggtgggcaagatgagataaagacattttgatacagtaattgttttggttgggttttcatgtcagtttatgtttgactaaagctctcttcatatgcaggtttataaatttgttaggtctgttgtcccatgattaaacatgcagtgcctcctctctgatttaatattctgcaggtcattgtaacctgctaggcaaagtcacaacattgcattaaagaggtgatagctttgctaatatcactgttttaaaggacgtacagttaaaggaatattaagtgggagaaagcctacaaggcttttagaatattatcagtatcttcatttctggtattcagatgttatgtgataaaacacattttttttggctttcccagatacactatatatttgttcaagggtaaatctataaaatgtatatactttattttgtggttttgctatttataaatttaatgttttaactgttgctcatttatggtttgttttgggtggtggtgttcatctgtatatcaccatgttaatttgtaatggaagtgcacttcgtagtgtatattgttactgacattaaaatactttatagcattgtctctgagcaaaagctagtatttaattgtacaaatgaataagcaagttacatgttattgtttgctcttgacagggtaggcctcttaaaagaaaaaaaacaacttgttttttctttatgaatcccctatgccaaacacataccttccatgcatgacatgagatctgcaaactggattttagccaccgtatttatttagtcaaaaaaattgtccattgtagcagacccgaaaacctttttgctgtgacatgaaaccatgttattcttatcttcttaaaacacagcctgggatggaatggccatggcatttttttcagagaacatcctttatctgctatgactgaatccttaggaaatgtaagctataaccctttgattttcaagaactaccgaataagtgtatgaagaggtggttttttaaaacttcaagttggaatttttatgaggtcactgtgtaatttgaagaattgtgtgagattgtcatgatataaattccttttaaggactgataaatagaatgaaaagtttccaggtagtttaaaactccacaggtcagtttccttttcattcctgcttcactgtggtttataagcctacgggagagcaccgttgctcagatgctactgtgagcttcctgtccggtgttagaaagtaactagttaaaagttcattttagaatgtatggtttttggggatgaactaagaattagttattagttccaaaggactgagaaccaattttaatattttcacatttataggaaagaaattcatatgtccctgaaacttctaggacaaaaccaaacaagtaaggagggaactgttgcaaagccatttcatcgagaaggggacagaaggagaaatacacacatgtatacacaaacagaatggttgagaaaacgttttaataaaatgtgagggttgtatgtgtgcgtgtatatatttacacttaacctctaaaattctcttctacagtatctctgttatgaatatgatggaaaagcaacattttggtggtgagactattgttaaaataaatttgagaaagacgaaaattttgtgagtcttgataattacaagtcaacagctatcgaaagttagcacagcttgtctgtggtgctgtttttttccccactgcagtggacttatgctgttttcatgtttagaaacaaaaaggtttcatgtgattcatgtgtaagatgcacagtatttgacatcctgattatgtaatccctattccatctatccagtcttacacttatggttggcctcaaatctattgcatttatgataatgtattatatctagttgagtttaatatttttttattagcctgtaaataaagatggcatcttctacattaaaaaaaaaaaaaaaaaaaaaaaaaaaggttt

SEQ ID NO: 24007 - DNA, 1257 bp, Homo Sapiens
ggcacgaggtttggtggtacctctagctattacaggaaagtaaggctatatgtgtcctcctacataaccgcaccacctcgtggtgtgttactataaaagcaaatctaaaacagttatctatatgacaagtttattagcaagcagggcttctggaaagcttggagaagttctttctctgctcctaagtaaccccacaaacaccttgactaaaaagttcacagtgaagcagaagcagtgatattctgaaagcagaattaagaaacctaattgcttggttggatcaggccacagtcataaacgtgtgtggagtgctggagggggaaggtacaggggcaaggagatctctagacctgaggtactataaaaagtcattattttgcaggatctgccagattcttacacctcatttcatgcattttgcctctaaaagtctagacaaccacctacttttcaggctgcattcatcagtgaaaaattactaatatcccttatgctgatgaacactctggcgtatatttagataagtgtttaaagcatcttcctagccacctgattgaggtgcttcaaatactaacttacccccagaacaagattgaagttaaattacacagcacacatccattacacagtttatatttgaagtattttaaagtaaattattgcataataagtaacagtcagcaataaattctcccatcttttgcattactttttttaaaatctgattgaaatggactattggcctctatctattctgtgcattgaacacttaaaggcatgatggggctgggttccgtggcttacactgtaatccgagcactttgagaggccaaactccgctcccgctctttcttctctgctgtgacaccctccaaggctgcaactttcatccgtaatggattcgtttacacttggtcaaggctctcgacaacagtgggaccaaaacccagaggttcacagaaactacaatagtcaccgtgagtcaggccagtctgcccagaggatggcctgcaggactgcccacagcatttggaggccaggcctcagctgcatctctgaagcccaggcaaaggcggccctggggaaggtggaacaccagcatttctactgatgctctggggtcctgcagaaccctgactgtgccacagaccttctgtaccgtgtccatttccatataatctaataaatccttcttacaaaggaaaaaaaaaaaaaaaaaaaaaaaaaaaaaaaaaaaaaaaaaaaaaaaaaacgttt

SEQ ID NO: 24008 - DNA, 1072 bp, Homo Sapiens
ggcacgaggggatttgtttgagtacgaagggtgcaaagtgggacgcggcacctacggtcacgtctacaaggcgaggcggaaagatgggagttgagggagaactgtaggaacaccttgggaagcctttactggttgtcctcttaagaagagctggataatgtactgagaatacctgtcctttcttggtcctggagggcagacagcagctacagcaggactggtggaaccagcttcctggcaggaattaccctcccccaaagctagggacccaggaagatgccctgtccagcatagactttaaagagagtcaaactctacggaagaggattgtaacggaccatttctgaataaagtgatgatcagccacaatgacattagtaaaatttgaagtgccgcttatctttgtgcgtgctgttataatttgatgtggttggtatatgaactctaggactaaagtacgttgtgtgcgtatgcactaacttcataaaacaactctattataaagtgttttgtcataaggtatcgtgaaaattgcaaagtgctatccaagtgtaaaggattattattattgcagaattttttttttcttttgtaactgaacaggccttaaggtactcagttgtttctcataattcctttaattaccaggtgtccttgaatgcttatcatggaatgtgagatactataattaacatattttggttttggaatatccactccacctgttatactagtgttcttgtgggaattttatcagttatatttggggaaagcacatccagttttccgtttggacattgttaataaatctgaggtgggtttttcccatactcctcatgctaactttgtggtatacttttggttttaaaaaatgtatcttagtgttttttttgttaaaatagctttcttttattagggaacttttgagaagttaaaaattctgcttctgaattgtatttgaatagtatgggcttacaacaaaaaccagataattcttgcttctattctttttgaatatttttcccctctaataaagtacttgattcgaatacaaaaaaaaaaaaaaaaaatt

SEQ ID NO: 24009 - DNA, 1312 bp, Homo Sapiens
ggcacgaggaaaaagcttcttgtgtactcaaaattgaacagagctaccttttgactaaaaatgtcatttttaatgagcagtattttctgaacacaaaattttgtacaagagtgtctccattgcattaatttaattttgttataattttttcccaatgaaaggaaaaaagtattttgtagctcctcttccttatgtaaattcttaacatatatttttgagaaatttgcattttttaaagtaaaattgttatctttggatacttacttttctttgttttcctcatttaaagagaatagggatatttctgtattatatatttactgtttcatccctcacctttggagtgaccatgaccttggcatgaaggagagaaacctctgctttccgcctattgcttccaggagttactaccttactggccttggagataatgctcttttgtgccaacctgaggataattttaacaaaatgtaaggccagtttcagaggttgttttgccccacagagagactaatcccaatacaagaatattgacaacaaaaggacaaagtagttattgcacaggacggaaaggtgtctttatttcatcccctccccacttccaaagatgcaaaaggcctaattgaatcaagtctcctttccatctggcaggagacattttaataaggactttttaatttcctacatttcttggccaagtgtcataggaatgtggcctcttttgaaatttaaaaatgaagaagaaaaaaagagcaacactaagttaatataatggagcagatacttttaatgttcttaccattgaatatgccatttaagtttgttatacttgaaattatatgatttttgtccagctctctaaattgtcatctccaatagatttagatgcttcaaatagtaaccacattactgtgataggtattattagaaaaaagttatttcttgagttacacctaagaggaagaagtaacatgatggaaagtggttggagatagcacccaattaacatcgacagccaagtcttctatttcagaatattgatttatttcgctttggcttttgatgccatcatgagatttaagtctgcagtttcaaaagctcatgctacttagaagagatgatttttgcagcttaaaaaattgcttgtgactgcagtatgtacacagttaaaaagctgttcactgcccctttcaaccttttcattttgagctttactaagagaatgcttttaggaacagaattcctaaagtgtaattttttatgtataaataaagttttatctatatctgaaaaaaaaaaaaaaaaaagcatt

SEQ ID NO: 24010 - DNA, 3349 bp, Homo Sapiens
ctctccgcccccaccccctgtcggcgtctgggcctcgtccccttctctctgtctcccttgcctcccccatcacgtcccctgacaccgacaccccattgctcccacagtctccccagtctccactttggtccccagcgctgtctgcccgaggatttgcctgaaggctgcccccaactctgcacccgccccccgagggccaccgaggaccatgactaagacagatcctgccccgatggccccgccaccccgaggagaggaggaagaagaggaggaggaggatgaacccgtccccgaggcccccagccccacccaggagcgccggcagaagcctgttgtgcacccctcggcacctgcccccctccctaaggactacgctttcaccttcttcgatcccaatgacccggcgtgccaggagatcctgtttgaccctcagaccaccatccccgagctgtttgccattgtgcgccagtgggtgccccaagtccagcacaagatagacgtcatcggcaatgagattctgcgccgaggctgccatgtgaacgatcgtgacgggctgaccgacatgacactgctccactatgcgtgcaaagctggggcccacggagtcggggaccccgcggcagccgtgcgcctctcgcagcagctgctggcgctgggcgcagatgtgacgctgcgcagccgctggaccaacatgaacgcgcttcactacgcggcctattttgatgtgcccgacctcgtgcgtgtgctgctgaagggtgcgaggccgcgagtggtgaactccacgtgcagtgacttcaaccacggctcagccctgcacatcgctgcttccagcctgtgcctgggcgccgccaaatgtttgctggagcacggcgccaaccctgcgctgaggaatcgaaaaggacaggtgccggcggaggtggtcccagatcctatggacatgtccctggacaaggcagaggcggcactggtggccaaggagctgcggacgcttctggaagaggcagtgccactatcttgcgccctccccaaggtcacgctacccaactatgacaacgtcccaggcaatctcatgcttagcgcactgggcttgcgcctgggagaccgcgtgctgctggatggccagaagacgggcacactgcggttctgtgggaccacggagtttgccagcggccagtgggtgggcgtggagctggacgaacctgagggcaagaacgatggcagcgttgggggcgttcggtacttcatctgccctcccaagcagggtctctttgcctccgtgtccaagatctccaaggcagtggacgcacccccctcctctgtcacctccacaccccggaccccccggatggacttctcccgtgtcaccggcaaaggccgcagggaacacaaaggcaagaagaagaccccatcatccccatctctgggcagcttgcagcagcgtgacggggccaaggctgaggttggagaccaggtccttgtcgcgggccagaagcaggggatcgtgcgcttctacgggaagacagactttgccccaggttactggtatggcattgagctggaccagcccacaggcaagcatgatggctctgtcttcggtgtccggtacttcacttgccccccgaggcatggggtcttcgcaccagcatcccgtattcagaggattggcggatccactgattcccccggggacagcgttggagccaaaaaagtgcatcaagtgacaatgacgcagcccaaacgcaccttcaccacagtccggaccccaaaggacattgcatcagagaactccatttccaggttgctgttctgctgctggttcccctggatgctgagggcggagatgcagtcttagaggccctggacacctgacaaagagacagagtccccactagcatctcctgacacccgaggagccctgagtcaccctgagatagagattcccagtaacacatccagagtagagacccctgttagccagccctcgatcattgaggccccattattaacagatactcccataataacccccaaatacagaccccatgtcacccagaaagagattccctgagtagcaccttcaggctagtccctatccccaacccctcagagcagattcccagattaacagatttccatatcaccccaaatgatggtgaccctctccacataatgcattacaacagaacattcttgaatcacccaaccctggatcagaaacctccccattaacaaacactgccccttaagtcctcttgaaataaacataggtcacacccccaaagcaaaagagtaacagacattcatgtcattgttccccatttaacatcagtcctctcaagatgtcgtgaccccatggtcaccctgaagcccttagattccaacccctcaatcagagacttccttcattaacaaagacccttgttcttatccctcaagaagaaacccaccataaccagcccactgtcacccctaatttacagacaccaaaacagtcctggaagtgctaattacaggaccccccaagtcttcctaccctctgcaccctcaagaaacccccagtgccttgtatgaagcccaccccacatggcccacagctcctgtgctggccagactcccagaaaattctctattttttaagtaacgacttccccctttgggggaccccaaaatttggaggccccattctaggactctggggatcccaaaccctagagtacacacgtcccaaactcccctgtgccctcaagtcctacagcccctagaagaccccaatgccgtaactcctaggacccccaaatcatggaatcccaaatccccagggaatcccaaatttgaaaatccaatcccaagtccccaggaaacccaatcatgaggtccttgtgcctggtatggaggagactgcagtcaggatatgcattccaggctcccagacacctcaagccctattcacaggcaccaggaaaccccacacaggaattcccatccctggaaactggagaatttcaatgccccgagtccatgggtttcaagacaccaaattccaagagccccagccctaagggaaccccaaatcctaaagcctccatctctaataaatggaaggccccaaggccctgaggggatctcaaatcctggaaccccgatttcaatctacgttctagtcactggcctcaaaggaccccacagcacctgggccagaccaacagctcgagggagaacctgaaggcccagggggtccagggcggacctggggccccgaccaccaaggacagctcacgactgccccttcactgcatgtccccaaactcagcatgactcctgtcctcttcaataaagacgtttctatggc

SEQ ID NO: 24011 - DNA, 295 bp, Homo Sapiens
tgtataacttatgcagcatttgtgtggcagactactgcagccgtggctttggggtctgaagtgaatgagatgaaacacccacagcaccctttaaaaactgtttttcgtttattttcacagcaaacccaaggagcctgtattcagtgcaggtaagtctgatttaatttatgtatgggaacccctcactcactctctcagaactcaagggacagaaaagaagtagccagcttcaggggccagccttggacacacaggagctttggtttgtgcaggcccagatggagctttgtacctg

SEQ ID NO: 24012 - DNA, 21909 bp, Homo Sapiens
aaggagaattatatataaccttgaggaggggatgaggtttatcttcatttttttctgtttctcctcctctcctcccttttttgcatttgataattgcttagaataaaggtatggaaagtagatcccaatttcagttccccttcacacgctgtgcaaacgtggacaaacaacctctgaacctgtcacctctcagtggaaaaagtggtgataacgtcccacctcagaattgatgctcaaaatgaagcagtatttgtgaaacgaaaatacacacgctcgtggtacgccagatcggtgtttacgtcctcgtcagtgaacgcgtcgatgtttaataagaagggcagccaatcaacacttttcttgtctttttctcgtctgccttcctccaaggactgtgagggtctcaagatgtgtcccatctcggttgtttgtcaacctagtcctgctatgtcgtggggactgagcaggccgactcctcccccatcgcacgtccaggatgaagagcgctgtttaggtttgaaacctgcagactcagtcccaaccgaactgggcagacaccagaccggccccggcaactgcagtccaggctccgcctccctacgcccattggcttattcaattcacgcaggaaccaatgggcggagacggcagccgcgccgtctgacggcttagccgcggtgcagactgcggcggcggtggtctgaggaagttctatcttggcgctaaagcggagacgcatcccccgacccgaggctacgatgagcacaccggccgtgccccaggacctgcagctgcccccgagtcagagggcgcagtccgcattcaaaggtgaaggccgcggtggcggtggcggtggcggtggcggtggcggtggcgggcgcgggcccggcggtcggggctcggggccgcgctggcgcgcttcacctctcccccgctctgtgagatccctgaacgcggcgtcggcctcgccctgcctcattcttggccttgtggaacggatcataaaaacaggaaccgctgcgtggtgttactgtgcggtcgctgctggctgggatgggccctcctaagaaggaatccgttaggcgaggggaaacgcgcgggcctcaggccggggtcggtgtcggagaccctgggtccgcttgggggcggggctgcacaggttcagggaccgactgcgcctgcgctgggtcctccgcctcttaggtccctagcgaatttctgcagggctggggtcgcatcatgtgttatttccaatttcacagcttctccttcgactttatggaaaccgagggttggttgggtcttcaaaactaatattgttattcccttattctacacacgggaaagcagaagaaagtaattctcatctaacccagttctggtaaattagaactttcgagtctagtgcctcacttctaccatttagtttcttaaagcttggctagcaggagctgtatgtagaaaatgatgttctccagatttttcacagggagtagagaatgtgattcttatgcagaggggttttggggacctgttgtggtaacagtctcttctaaggtgatttctcaaaggcaatattgaattggagaattttctgttatatagatgtgacctcaggtggaaccagctttggaagtaaactcttcatttagtcaacaagatttatttgccgttatcgatgttttaactaatattgacttgtagctcttacctttgttatctagagcaaagaagacaaaaactcaaggaacatctgttgagaagaaaaacgctttttgcatacaagcaggaaaatgagatgttatccaggtaaggtcaagtttatttcttttcacttctgtaaaattgtatcagatctgtccaatgaaaatgtaaagtaagccatatctgtaattttaaattttctagtagccacatttagaaaaactgcttacatattattttacgtctttttgtggtacaacgtctttaaaatctggtgtctattttacagttacaggacatttccatttggtctatccacatttcaagcactcagtagccacattggctagtggctactttattggatggtgcagcattagatcatcgttttattaatttttttttttttgagacagagtctcactctgttgccaggttggagtgcagtagcgtgatcttggctcactgcagcctccaccttctgggttcaagtgaatctcctgcctcagcttcccaaatacctgggactgactacaggcaagtgccaccattccctgctaatttttgtattttaaacagagaccgggtttcactatgttggccgggctggtcttggactcctgaccttgagatccgcccacctcagcctctgaaagtgctgtgattacaaggatgagccaccgcgcccggcctagattatcgttttctacgtaaattaattcacagtctaagagaaaaaaacaattataaagcaaagtatgtgcatagactagattatcaacttactgtttacaccacacaaaggtcagtctttctattatttagcaaagctttttactcagtgtatgggggagttcatcagggaagggttgggtggccctcccaaatgcttagagattactagttgtagtctcaaccctccacagaaatatctttattattttgttaaaatatcttagatagtacatagctgtagcaaaaacaaaaacccatgaaagtagatgaagcagaaaggcaaaaggtcccctcactctctagggataaccagtaataacatccttacaggcttaggctgggtgctgtggcttacacctgtaatcccagcactttaggaggctgaggtgggcagatcacgaggtcaggagatcaagaccagcctggctaacacagtgaaaccccgtctctactaaaaatacaaaaaattagccaggcatggtggtgggtgcttgtaatcccagctactggggaggctgaggcaggagaatcgcttgaacctgggagatggaggttgcagtgagccgagatcgtgccattgcactccagcctgggtgacagagcgagactccgtctcaaaaaaaaaaaaaattgtctcaggtaaacaaaattgtatataccacccacacacatattcagagagtggaaatgataacgcaaatgggataaaaattttaacaataggtggatcctgggtaaagagtgtacagatattctttgacctgtttatatttttgcaactttgtgtaagtttggcattctaaaattttaaaaataatttctaactttatattaataagttgctttagtttggaataaacagtttatccttcacaaataaatcttttatttctttgtttaagacaaaaaggtgatcctaggttttttatttgaataagtaaatgaatggtgataaccgtatactgaaataggaagcctgaaggaggagctggggaattaggagttctgttttgactatgtttgaggtaccaaccagacatccaagcagatatgccaaataattgtgtgtctgaagttcaggggaggggttggggctggaagcataaactcaggaattgattagtatacagatgatatttacttaaaaaccttaggatggaatgaaattactagggaataagtagagataatatggattcagacagtgactctcaaccacttatttaaataaagaatccaacaaggtcaggggtttataatactcttaataggaagaaaagaaaattctaaaacgcttcatgtggcttaagtactacatttattcctttcagaaaacagatgttggctgggtgcagtggctcatgcctgtaatcccagcactttgggaggctgaggcgggtgtatcacttgaggtcaagagttctagaccagcctggccaacatggtgaaaccccgtctctactaaaaatataaaaattagccgggtgtggtgtcaggcgcctgtaattccggggagggccgaggcagaagaatcgcttgaacctgggaggcggaggttgcagtgagccaagatcaggccatcgcactccagcctgggtgacaagagcgagactttgtctcaaaaaaaaaaaaaaggaaaacagatgtcaatttaaatgttatcacctcagcagtgaatcattaaataagacaaccaacctgtgttgcagcttttcagaattaaacagttatattttacaatctctaaagtatagatatcctaagactcatttccgataacccttctgagggcagttttataataagacagaataggattaagtctccccactggacaggtgagtaagatgggttcttcttgtcatcctgagttttgttttgttagctggcagttagctactaagataccctgttaagtggcacattttgatcttccttcaccattgttcaaaatgtatagtacaggttgtgtcaaagttctgttccttctccaagctgacagaacaaatagatatgaaaggcaatgtaagcaaaattattaactactaaattatgtcaaatgtaaaatatatatatatatattttgttttgttttgtttttttgagacggagccttgctctgtcgcctaggctatagtgcagtggcgcgatctcagctcactgcaacctctgcctcgtgggttcaagcgattctcctgcctcagcctccagggtagctgggattacaagcatttgccaccatgcctggccaatatttttgattttagtagagacagggtttcgccgtgttggccaggctggtctcaaactcctgacctgaggtgatctgcccaccttctctacccagagtgctaggattacaggtgtgacccactgttcctggcctcattttttttttcagagaatgagagatcacgcattttaatgtgatctctgaacttaggatctgtcttaaaatcaatggcatgtctaattgaccgtattttttcctatcgttatagtacacaaaattgttaaaatcacttgctaagagatgctcacagtctgccttagccagtttatagctgtaaaaataagttaagtcagtttcttgaggagggattttctttgcaataccgcctagaaactaacgttcttttttttgagagatgatctcattctgtgtcactcagcctctagtgcagtgacgggatcttggcccactgcctcaactcccaggctcaagcagtcctccaccccagcctcccaagtagctgggactatggcacccaccaccacacccaactaattttttatttttttgtagagatggggttttgccgtgttgcccaggctgctctcgaactcctgagctcaagtaatccccccacctcggcctcccaaagtgctgctattacaggcatgagccaccacaaccagcagtgcatattcttaatgtatcctaatataaattaagctgtgaatggcatatggtaatttttggatcacttctgggagggctctttaataaaagtattttcaatgtagtacatctgttactaagtacttaaaactaacccaaggaggtattacttactaaaggttatttgaagacttgtttgaatgacttgagaatgatttgaaataagattattaagtatttacaaattctatgggcagagagtgttaggacttttagaaaatatctttaaattcctcagccatttgtttacactatttttttttgagacagagtctctctctgtcacccaggctggagtgcagtggctcgatcttggctcactgcgaactccgcctcccgggttcatgccattctccttcctcagcctccctagtagctgggactacaggactacaagcgcccgccaccatgcccggctaattttttgtatttttagtagagacggggtttcactgtgttagtcaggatggtctcgatctcctgacctcgtgatctgcccacctcggcctcccaaagtgctgggattacaggcatgagccaccgcgcctggccgcttaggacaaatttcaactcaggtcttttttaaatttaaaattagtaagtcagttaattgttaacattgccctcttcttcctccccaaaaggaagcctccttggtacaggattgattgatcattttgtttgtttgtttttaagtagtagagatcagagagttgtgacatctgaggaccaagttcaagaagggactaaagtgctgaaacttaaaacaaaaatggtaagatgtggacatagcactcttaaactgtccccttttccattttgcctttcctaaacacttttcttaaataattctttcaggctgataaagaaaacatgaagagacctgcagagagcaaaaataatacagtggtggggaaacattgtattcctttaaaaccttcaaatgaactaaccaattcaactgtagtaattgacacacataaacctaaggatagtaatcaaactccgcatttgttactaactgaagatgatccccaaagtcaacatatgacattaagccaggcatttcaccttaaaaacaatagtaaaaagaaacaaatgactacagaaaaacaaaagcaagatgctaacatgcccaagaaacctgtgcttggatcttatcgtggccagattgttcagtctaagattaattcatttagaaaacctctacaagtcaaagatgagagttctgcagcaacaaagaaactttcagccactatacctaaagccacaaaacctcagcctgtaaacaccagcagtgtaacagtgaaaagtaatagatcctccaatatgactgccactactaaatttgtgagcactacatctcagaacacacaacttgtgcgacctcctattagaagtcatcacagtaatacccgggacactgtgaaacaaggcatcagtagaacttctgccaatgttacaatccggaaagggcctcatgaaaaagaactattacaatcaaaaacagctttatctagtgtcaaaaccagttcttctcaaggtataataagaaataagactctatcaagatccatagcatctgaagttatagccaggcctgcttcattgtctaatgataaactgatggaaaagtcagagcccgttgaccagcgaagacatactgcaggaaaagcaattgttgatagtagatcagctcagcccaaagaaacctcggaagagagaaagtaagtagatataattttctttattacattagttttcaataaagtactgtttgtagatttggattataatttccttgactgcattagaattttctttcatggtttctcttctgtcatatgcaggcaaatttatattgtggaacaatatgacctaaaagtttttgtgtttgagtatgttttataaggttgctttttaaaatctaaggtaaatgcttaataataattgggaaatactttataatctcaaatcaaaaaatgcattcatggaatcattgagcataattgacgttgatatgtttaatatttcttcaagcttgtgaactatatatgccattaaagtaagattacttaaaaatatgattttttcttttaactttatttgacagagttctgtcagcaatttcaaagtaacgtttatatctgcttctaactatagagctcgtctgagtgagtggaaagctggcaaaggaagagtgctaaaaaggccccctaattcagtagttactcagcatgagcctgcaggacaaaatgaaaaaccagttgggtctttttggactaccatggcagaagaagatgaacaaagattatttactgaaaaagtaaacaacacattttctgaatgcctgaacttgattaatgaggtagagtctttatatttgcttagcattttatagtttgcaaattaccttcataagcattatttcattaaattatattgtcagtctttttgaccaggtgatgttggtgatactatgttgacttaacattaactgtgaggttattttaacaattatttaattgcgagatacactgcttcattcattaattgtgagcttattagcctttaactgactacattttgcattgagttcatataaatatacaggttgagtatcccttatccaaaatgcttgggaccagaagtaattgaagatgttttttgttggattttggaatatttgcatatacataatgagttatcttggggatgagatccacaaagttcatttacgttttgtttgtttgtttgcttttgagacagtcactctcacccaagctggagtgcagtggtgtgatctcagctcactgtaacctctgcctcctgggttgaagcccttctcctgcctcagcctccagagtagctgggattacaagtgtgcaccacacgcctggctaattttttgtatttttagtagagacagggtttcaccatgttggtcaggctggtctcaaactcctgacctcatgtgatccacccacctcggcctcccaaagtgctgggattacaggtgtgagccactgcgctcggcctcattcatgttttatatacagcttatacacgtagcctaaagatagaatactttttatagttttgtgcatgaagcaaagtttgtatacattgaaccattagaaagcaaaggtgtcactttgtcagccacccatgggacagtctggttgtttggcaacaccatcattcctcactctgaatttccatgctaccaataagcaattattctcttacatttattcacacataattaattaacagtttaaaaaaagacacattaatacagtgaaaaatatgttcagagtaattaagcagcacagtagcatcatcagaacgcctgtatcagctgttagacaatagcaacaacaaacagcagcacgttttcaatctccatctatgatgttgtgtttaattaagaggtattttacaccgtgttttatttttttaggtgagaagaaacaccagaagcagttgagggaccaggaagtgggttctctagggataaggaggcattctgctgggtggctttttaagatatttacttcagagtcatctgcctcattagcaatggtttttgtcttagaagtttctctttgattttataaagggacatgatttctttttctgttctggataaatgctgctctagttcttcagtaagcctgttgcatactttcaccttgtcgcctgtaggtacattttctgcagtgttaatgatggtcatctgcattgtgatgttgatactcaaaagttttggatttcagattttggattttcagattagggatactcaacctgtatcaaagggataattgggtttttttactgaattacaaatatttgatttctctgagctaattaatatgtaatacactgaggtgatatttacttactgcttctaatattttgtttcttacatctattcattatatttacacattattttttacgttcattacacattttaccaaagactagcaacacaaatactgtgtgagtcattattatcacagattaagttacctaaaatactcaaaaaaaaaatcccattcatctggtcaggtggggtggctcacgcctgtaatcccagcactttgggaggccaaggcgggcggatcacccaaggtcaggagtttgagaccagcctggccaacatggtaaaactctgtctctactaaaaatacaaaaattagctgggcatggaggcgggtgcctgtaatctcagctactcagaaggctgaggctggagaatcgcttgaacctgggaggcagaggttgcagtgagccgagattgtgccgttgcactccagcctgggcaacaagagcaaaactccgtctcaaaaaaaaaaaaaaaaaaaaacaatcccattcatctaagccaacatcatcatgtttttgaatttattgcagaattttgctatttggaccaaaatcctatggagtataataatcagctccagaacaatattctgtttaataatagataatatctttgtttcctgactgctctttaatcttgttttggtcacccactagtgtgtaagatccacagcaaaactgaattcaaggtatgatttcaaactttactcttcatgagcatcttttaacttcttgtggttctgaacaccagtaaaagttacaatcaggaaaactcttgagtctctaatagaatagaattagagtttatttctgctcagtttaagtttttccttttgatactatgaactttttctgccctattatttaattatatgtaactgtgacataaaccattacagattcattttaatcttaatatcaaaacctgataaagacgaggaaaaaaaactccgcagactattcttactcataaacatttggtagaaggtattaacaaatggaatcccacaatatatatgaggataaaatcaagatcaaataagtgttcattttttactaataaatttctcaactaatgtttcatttttttgctttatgcttagggctatcgttatcattgatcttgactatagtaggctcaattattgttcccactttgtaagctaaaaaatattacacacattttttcttgcttttttagggatgtccaaaagaagatatactggtcacactgaatgacctgattaaaaatattccagatgccaaaaagcttgttaagtattggatatgtcttgcacttattgaaccaatcacaagtcctattgaaaatattattgcaatctatgagaaagccattctggcaggggctcaggtaagataaaaatttactgatctttacaattacagtgtagtagacaattcggaattaatttgaaacacatcacaacataacttgagaaaattttctttgtatatgtagtggtaataaatgtttaaaggctgcaaggattgcattataaaagctgtttgttggctttctaagtcttttattcctgtattgggaataatcagattttagaaaatggatataagctgaaatgtatatttaatgaaactttctgcatgaaatgttttagcatattattgtatgcatttcctggttggaagtttactgggagactgaatgtaatattaaaatttgtttattgaatataaagcaaaagggattaaattcgctttttaaatgttatcaagctctcttggttttgtgtgagaactctttaagagtaaacccgaatgtactcatatatgtatatatatacacacatatatatacacacatatatatacacatatatatgcacacatatatacacacatatatgcacacatatatgcacacatatatatacacacatacacatatatacacatatacacatatatacacacacacatatatatataatatgtatacactgtatatattggtcctttctgcatacagaaaatggcaataaaccggtttctctaacattattacctctatagtgcctcgataccatactccttatctcttctagcgtattgatacacaaagttttgggtatagaataaatcatttcttgagttttttgtttggttgggtttttgtttttatggatacatgttcttcaaatatgtttccttttgaccaggtttctcagaaacacattcttggagattgtttacatagataattttttaaaactcccttttaagaaagatctattcacctttgtctcaacaaaatcaacgaacgctatttgacttttcacttaaataaaaaatcagatattcagcagatagtctgtcagtggctgtcatgtgtaaaactttctagaatggtaattatatttgacagaatgctacctggaggggagtgttaggcccctactacattgtatcagaagggacattacttaaggcagctaaggacattgtagcaaggatgcaaaactggagccaaggctcacatagaaagcaataatgtaaacagcaagatgtaacaccagaggaaaagctgctggaaaacaagaatcaaaattagccaacatggctgggcacagtagtggatacctatagtctcaactacttgggaggccaaggtgggaggattgcctgagcccaggagtttgagtccagcctgggcaacatagaccccatctcttaaaattagtggccaggcatgatggttcacggctgtaatcccaacacgttgggaagccgaggcgggaggatcgtttgagtccaagagttcaagaccagcctgggcaagagggtgagaccccccatctctgcaaaaaataaaatttttaaagttttttttttggtggtagacagttgtggtcacagctatacgggaagctgaagtgggagaattgcttgagctctggggttcaagactagtgagccatgattatgccactgaactccatcctgagtcaacagagcaacaccctgtctcaaaaaaaaaaaaaaaaaaaattagccaagaaaactgaaagcaggatagctgagtaattcaggactcagttctggaactaagactgtgaattacaccttccctaatcttgattgtgttgggtggaacatagcaaatgcttaggtaaataatggtcacttagtaattttttgtaaatttttgaatgaatgaagtatgttgagatgatcaaccttagctcttcagagatacatttcatagcatatgaaacaaaaatataaccatagacttaaatgtaagagaaaaggagcaagacttaagtaaaattatggaggaagttttaaaatatgaaattctaggccaggcgtggtggctcacacctgtaatcccagcactttgggaggccggcaaatcatgaggtcaggagttcaagcaagcctggccagcatggtgaaactctgcctctactaaaaatacaaaaaattagctgggcatggtggtgcccacccgtaatcccagctactcgagaggctgaggcaagagaatcatttgaacctgggaggctgaggttacaatgagccgagatcgcaccactgcattccatcctggcaatagagggagactgtctcaaaaaaagaaaaaagaaaaaaaaggaaaagaaattctatccttcatttttactctataaattggaaaagacagccatttttcgtttttggtttttttgtttttgtttttgttttttttttttgagatggagtctcactctctcgcccaggctagagtgcagtggcatgatctcggctcactgcaagctccgcttcctgggttcacgccattctcctgcctcagcctcccgagtaactgggactacaggcgcctgccaccacgcccggctcatttttttgtgtttttagtagagacggggtttcaccgtgttagccaggatggtcttgatctcctgacctcgtgatctgcccgtctaggcctcccaaagtgctgggattacaggcgtgagccatcgtgcccagccaagacagccatttttcaatcttaattgtaagtggtctgagaagcatggtttaagagccactcttactttaaaatacagtatgaaaatttaatcgcgacttggatacctagttaatgtcagagaaaataaaacttacatggatctgctttcttcattaaaaaaattaagcctattgaagagatgcgacacacgattgtagatattctaacaatgaagagtcaagaaaaagctaatttaggtaagttttagttattttatttccttcatgtgaactgtagtttttttttgttgttgttttttaacttttattttaagatcaggagtacgtgtgcaggatgtgcaggtttgttacaaaggtaaatgtgtgtcatgggggtttgttgtacagattattttatcacccaggtattaagcctagtatccattatttttcctgatcctctccctcctccaacccatgtgccccagtgtgtgttgttctttagctgtccatgtgttctcatcacttaactcccacatgcagtatttagttttctgttcctgtgtttgcgaaggataatggcctccagctccatccatgttcctgcaaaggacatgatctcattcctttttatagctgcatagtattccatggtgtatatgtacattttctttatccagtctatcattgatgggcatctggattgattctatgtctttgctattgtgactagtgctgcaataaacatatgcgtgcatggatctttataatagaatgatttatattcctttgggtatatacccagtaatgggattactggattgaaagtatttctgtctctaggtctttgaggaatcgccacactgtcttccacaatggttgaactaatttatactcccaccaacaatgtaaacgcattcctttttctccacaaccctgccagcatctgctatttctttggccttttaaggatagccattctgactggtgtgagatggtatttcattgtgaattgtagttttattgtttctttgctgaattagtttttcttttatctttttaaatttttaaaatatgtaggtttctttcctcatacttctgttgacctgcctctgagataaagtggctttatgtagtataaagaatttttaattaggagatctggctcaatatttagatttgtcactgaatgtctgtgaaagttgcattgtctctctaggctttgtctgccttaaaatgaggcagtttgactagatatccagacttttcacctgttaaattctgtgatctgttgtgttggctagaaaagctcatttaagaattctctttgctggggatagtagatggagataagagattcattagttgccagtcataaaaacattttaagattcagataaagtttatgccagttgatatgattttaggcaaaaaataccctcttatctgtaaaatacagattttttgggaccattgaatgaaataatatttatttatttatttatttattttttttttgagacggagtctcgctctgtcgcccaggccagactgcggactgcagtggcgcaatctcggctcactgcaagctccgcctcccgggttcacgccattctcctgcctcagcctcccgagtagctgggactacaggcgcccgccaccgcgcccggctaattttttgtatttttagtagagacggggtttcaccttgttagccaggatggtctcgatctcctgacctcatgatccacccgcctcggccttccaaagtgctgggattacaggcgtgagccaccgtgaaataatatttataaagtatcatagtctatgacacatagtaaagtcattaaactgtagtcattaatattaattaactttagaaaaatggttttcaattatttgctgtaactgtatattatacagtcaacaaatatttgagtgcatattatataccatcgcctatatatctagttattttcttttgattaattttaacaagagtcaaacagtttgaactttttcttttttttttttttgaaagagtcttgctctgttgcccaggctggagttcagtggcgcaatctcggctcactgcaacctccgcctcctgggttcaagcgattctcccgcctcagcctcctgagtagctgggattacaggcatgcgccaccttgcccggctaattttgtatttttagtagagatggggttttgccatgttaggcaggctggtcttgaactcctgacctcaggtgatccgcccaccttggccttccaaagtgctgggatgacaggtgtgagccaccgcacccggccaacagtttgaacttttaaagtctcctgatacatgctgccagattgctttccagaacagtattagtacctttttagtatgcaaaattaatttaagatgtagagatctaggttgaagggctaaaccttaaaaaaaaatcaaagagcatactaaagttctaaattaagtatgttatgtaagcttttgattacatgtattaactgaaaaaaaaaacttgttcattggggttaatatgctaatggctgtgttggaggtcatgcttctaatggcagcatgcttagttcatcatggattatttcaatttatggtgactgctaatatgtaccaagggaacatacagaacatctatatgatctgatcttactagtagtatttagtgaaggagcttgagaaggagggagagaagggaaaaccgaggaaagattagtgtaccacaaacaaaaggaggagaaaagtttaagaataacccagtcctggccgggcatggtggctcacgcctgtaatcccagcactttgggaggcctaggcgggtggatcacgaagtcaagagatcgagaccatcctggccaacatggtgaaaccccgtctccactaaaaatacaaaaattagctgggcatggtagcatgtgcctgtaatcccagctactcggggggctgaggcaggagaatctcttgaacccgggaagtggaggttgcagtgagccaagatcgcaccactgcactccagcctggtgacagagtgagactccgtgtcaaaaagaaaaataaaaaaaaagaataacccagtcctgtctcttattcacaaaagacagcgacgtggaaattcaaatttcataaaaagatctctcataattctatttctggagatatgtggaaagataaaagcagtattctgattaagttgctcttcctatcttataggatagtactagttggtgttttctagcaggtatcattagtctttagatgggggaaggaggtatccataaactcttggctttctgaaatgtataattgtaagttctggatataaaaccaatttcacaaatcagttatttgtgaacagcaaaagaacataagtggtcgaagtagttcagaagagggttaaaaaaaaaaaaaggacaaataataagaaacaagcaccacgtgggtgtttcatagctacctgaaacacaaatagccaaacttgaacacataattttcccctaaacctgattattcttttagttctctgtcttaatgaatggccttgtttggttgtccaggtcagaatcttggtgtgattgtttactccttctttctttcccagttcccaaccttttttccccagctaatcaaattcagtttaacttcctaagtatttcttaagatctatctacttcactccattcctactctcctttgtatagtcaagatgacctacacgcttacctagactataacagtggtcttcaaacttaagtttcctgcctctctgctcttcattccaatccattctcaacactgcaaccaaaatgttctgtcactcatctgcataaattcctgagtccagcctcttctctttccctctcccctacatccctgaatttctctttctttttttccatttcctgaaaggtttttactctcttttccctccaggtctctccaagacaatcttctactttttcttaatttctgcttatcctttagacttcaattcaaatgttagttccttggagtagccttccctgatgatttccctgatataccatcccctctcctctcaacctaggtttagtgcacctgttttgtgctccctgtttttttccctatgcaatatttgatgcatttgattgtactatgtagttgtttgtcctgtcttttgcatatgtaaactcagtagataaggacagtgtctgatgttcctgaccattgagtctcctgtgctaatgcaatgcctgacacatatttggcacttaaatatttgttgaattaatctatattcttttctctccttcagcttccacttaaaactcagtcactatcatgcaactaaaacttctcttagtaaaaatttttaataattttcctaataattaaattcagaggtttttttttccagctcaatggattcaccaggatgtctcacaagtatttccagcctaacatgttttattttgaactctttgtctgccctcactgctttcccatgcccagtatccctttcccatacccaacatccctttctcccaaaaaagaaaagaaaaaactcttctctggcatttatgactcttaagaaatgttggataagacgctcctaatacatttgcacactcattcctacacagtcatgtattcatttgttaataagttctgacttgggtgggtgtggtggctcacgcctataatcccaacaccagaagtccaaggtggaagaatcgcttgaggtctagaattcgagaccatccttggcaacatagtgagaccccatctctacaaaaagtaaaaattagctgggtatggtggtacacacctttaggcccagctacttgggaggctttggcaggaggatcacttgaacctgggaagttgaggctgcagtgagctaagattatgccactgcactccatcctaggtgacagaacggcagacaccctgtctctaaaaaaaaaaaaaaaatgttctcagaaatatttctcagattggacccttcctttcctatctgatctcttcctaacttacttaggctattacaacaaccttgtcttcttgccatcacagattgttacttttcattctctgccattctagacagtcctttacattgaccaaatttaattatgtctgtctctggtgaattttttttaccaaacttctttcatataaagctcattacaatctagctctctggtgaattttttttaccaaacttctttcatataaagctcattacaatctagctcttgtttacctatctaagctcaatacctcctgctcccactcctaaccttgttccttaccctatattctaaacacactggctctttaatgttatgttaatttaatagatcattttcttttatgtgccatatgaaggttgtcttccttggtcttgatcaagtactcatttttaagacccagcctaaatctcgcttgtgaagcattccctaaccatctccctataccacaggcaaagttagttgtttctttttgtgggttttaataatcctttgttcttatttcatatatagcatttatttcattttataatagtatttgttatatagttggcagcagtatttgctgaggaaaaggaatggttcagagatggcaatcgtgttcttttattttgaaaatgtggccaactaggaacaactttaatgtcttctgattttgttcttaaaattcagccaaaagcttaatctataaatgtattttctataggagaaaatatggagaagtcttgtgcaagcaaggaagaagtcaaagaagtcagtattgaagatacaggtgttgatgtagatccagaaaaactggaaatggagagtaaacttcatagaaatttgctatttcaagattgtgaaaaagagcaagacaacaaaacaaaagatccaacccatgatgttaaaacccccaatacagaaacgaggacaagttgcttaattaaatataatgtgtctactacgccatacttgcaaaggtaaacttttaaaatgtaccatgatttgttttcatgcttggagataataaataacggcatttaaaaatctttgagatagcttcagattacagctaccatttattaatatagaaatttcagtacgggcatggtggctcacgcctgtaatttcagcactttgggaggccgaagcagacagatcacttgagcccaggagttcaagactatcctgggcaacatggcaaaaccccatctctacaaaaaataaaaaaaattttggctgggcaaggtgctgtgtgcctgtagtcccagctacctgggaggctgaggtgagaggatcacttgagcccaggaggcagaggttgcagtgagccaagatcatgccactgtcctccagcctggatgacagagcgagaccctgtctcaaaacaaaaaagaaaacagaaaagtttttaaacaaatagaatgtcattagaacatttcacctcttaaatactgtatttactttccctaactattgccattttgaaaaagaaaacttttatttgaatttactttaatctgtgtgttattaataacagtaggttttggctttcaggaattagccagttctacagatactcaggtatctactgtatacaagttgtaatgacaaattgagaaaaggataagtttctcacttcggtgagcttatagtacctctctaaaagacaattaaatgcttttacctgcttataacatacaagctatatagtatggtacatatcatgaaagtacagagtaaaaatgttaacatgtttttgaactctggaatattgttttaattttcagtgtgaaaaaaaaggtgcagtttgatggaacaaattccgcatttaaagagctgaagtttttaacaccagtgagacgttctcgacgtcttcaagagaaaacttctaaattgccagatatgttaaaagatcattatccttgtgtgtcttcattggaacagctaacggagttgggaagagaaactgatgcttttgtatgccgccctaatgcagcactgtgccgggtgtactatgaggctgatacaacataagagaaataaagctctgttagggaatggggtttttattatttgtggggtgttttgttttgagtagctttatattgctcttaggtctggagttggccatgtacctatgtatcctaagcattcacggcagtgagctcctttactaacattcatgttatggcaagagttgtcctctacattggaaagctaatcctaccttgtcagtttcaaccaactgagttttttctttaagaaaggtaaattttgtcagctagtttactatgttccttgaatataaacaggttataatactaccctgttcactttactaaatataagtacagtaatgatgcataattagaaaatgaggtattctaggtaaaatgtatgtttgccttgacatgtttttaaaagttatgatgtacctccctgcctttaaacagaatacttttttcttttttttggcctttctcagattagtcaaaaattctatagaatgactcacttcgaatactaagacacaggaggtttagcctgctttcttaccaaattcatgttacccagacttgtgttctcttgcgtcccttggactgcctgttgattgatggaaagtgtctgcactgacacttttcgtcagtagtctgtagtttcgtggcctcttttgattataactggggtcaccaagaaggtttacttaattaaataccgcatttctaagagaagatactttgtgtaagaaaagatgccacatttagtggtttaacttttgtaacttcacttgatagtttttaagcaattagaatggagttagggaaagaacatatcatactgaacaaatgtcattctagtttagatagcatttctaagataactgatactaatacttgttttcttccctataacataaaaaacttcactgttaagtcatgtcccttgaaacatgatagttacatacacagttttctctccacacataaataacaccactaaagttgttttgtaaggttccaaactaatatggcatatatcaactctacagtttcaaataaatgactttttaattgtaaaagattagttgaaaaactgtatgaatgtgaagatcacatgcttagtcatttttatgttcattccactttgtatatcttttctatttattgacttctcatgttctagagagtaggacttttattccgtgtacctgatatatatacaattaaaatatctgtgtaattatgttttaatgaagtttatttcaacagatattttatgaaatgcagtttaaccacagtgaatgaattttagctttgcttttgaaatacattgtaagatttgacttgaggtttttgacacttaagtacatgcttaatgatatattttcaaaagtcatcagtctacttacataaactttacctaatttttttcactttaacaaaaacataactatgcccttgttttttcatactttgacccaaaatatgccattttgaaataaaatttaagctttgatacactctcagctttttaatatctgtaccatataattcatttgtctgtatagcagagtttgaaatgcctctgttagagaactcaaga

SEQ ID NO: 24013 - DNA, 1392 bp, Homo Sapiens
gtagggagaggcgggttgcgggcggcggcggcggcggcggcggcggtggtggttgtggcgaggctgtgcggcagggcgcacgggacctgtgctgcagcggctctctcaggccgtgggtcgtcgctgcagctgccgggaaagaaggaaacgacgactccgggggcgaacttggcacacagggaggaagggaaaggatgcatggtcatggaggctatgattctgattttagtgatgatgaacactgtggagaatccagcaaaaggaaaaaaaggacagttgaagacgacttactgctccaaaaaccatttcagaaagaaaaacatggaaaggtggcccataaacaagttgcagcagaattgctggatagggaagaagcaagaaatagaaggtttcatctcatagctatggatgcttatcaaagacatagaaagttcataaatgactatattttatactatggtggcaaaaaagaagacttcaagcgtttgggggaaaatgacaagacagacttggatgttatacgagaaaatcatagattcctatggaatgaggaggacgaaatggacatgacttgggagaagagacttgctaagaaatactatgataaattatttaaggaatactgcatagcagatctcagtaaatataaagaaaataagtttggatttaggtggcgagtagaaaaagaagtaatttcaggaaaaggtcaatttttctgtggaaataaatattgtgataaaaaagaaggcttaaagagttgggaagttaattttggttatattgagcatggtgagaagagaaatgcacttgttaaattaaggttatgccaagaatgttccattaaattaaatttccatcacaggagaaaggaaatcaagtcaaaaaaaagaaaagataaaaccaaaaaagactgtgaagagtcatcacataaaaaatccagattatcttctgcagaagaggcctccaagaaaaaagataaaggacattcatcttcaaagaaatctgaagattctctacttaactaataatcattattggagaggagttgtctgctaatgtaactactttgaaactctgatgaggaagaaagtgcttcagaatctgaactttggaagggtccactaccagagacagatgaaaaatcacaggaagaagaatttgatgagtattttcaggatttgtttctatgagacgagagagagaagcctccgctccttaatgtgaaacttcatgaagttttaaacttcatgcaatttgaaattccatataagtttttatctgcaagttacagcttgtgtggtttgtctttggaaataaaaatccaggttctctcagaatgtcagaggctttggaagttcattagttcaattaaagactttcctgtcctttaaa

SEQ ID NO: 24014 - DNA, 599 bp, Homo Sapiens
cccgttctccgcaccgtgcagaggcggcgggctggggagggagcggcgccagcacgaggttcccagccgctgggaagcccctagacgcgccgaggggccgggctacgagcggctgagagaaaatgatgcatcctgttgccagcagtaatccagctttctgtgggcctggcaagccttcctgcctcaatgaagatgccatgagagctgctgatcagtttgacatatattcctcccagcaaagcaaatacagccacacagtcaaccacaaaccaatggtttgtcagaggcaagacccattaaatgaaacacacttgcagactacaagtggcagaagcatagaaataaaagatgaactaaagaaaaagaagaatctcaaccgatctggtaagcgtggccggccttcgggaaccaccaaatcagcaggataccggaccagcacaggcagacccctgggaaccaccaaagcagctggatttaagacaagtccaggcagacctttggggacaactaaagctgcgggatacaaagtcagcccaggcagacctccaggcaggaaaaaagcagcaagccttcaggtgttccagtgatgcctgacacaa

SEQ ID NO: 24015 - DNA, 3254 bp, Homo Sapiens
  misc_feature (2907)..(2907): n is a, c, g, or t
ctttgagcggaagttggatcactgaagcgccaaaaaagaatttaggggaagacctgattttcgcttgaggcatttttgcggcgctgtgcgctacagacaccttctggaagctgcggtggggaaactgagtttcccgagccgttgagacagatggggttcagcaccgcgcggggacgacaggaaagctgcggctgaagagaactgcggacttggcaggagtcgcctgaggagctaagatcccggagactcttagccccgtggtgcttctctacgggagcgggggagggagaatccggccggacagatctgcgcgtatcctggagccggcccagttgtgaactaggagagctttgggacctctgtcccaagcaagagagatgaatggagagtatagaggcagaggatttggacgaggaagatttcaaagctggaaaaggggaagaggtggtgggaacttctcaggaaaatggagagaaagagaacacagacctgatctgagtaaaaccacaggaaaacgtacttctgaacaaaccccacagtttttgctttcaacaaagaccccacagtcaatgcagtcaacattggatcgattcataccatataaaggctggaagctttatttctctgaagtttacagcgatagctctcctttgattgagaagattcaagcatttgaaaaatttttcacaaggcatattgatttgtatgacaaggatgaaatagaaagaaagggaagtattttggtagattttaaagaactgacagaaggtggtgaagtaactaacttgataccagatatagcaactgaactaagagatgcacctgagaaaaccttggcttgcatgggtttggcaatacatcaggtgttaactaaggaccttgaaaggcatgcagctgagttacaagcccaggaaggattgtctaatgatggagaaacaatggtaaatgtgccacatattcatgcaagggtgtacaactatgagcctttgacacagctcaagaatgtccgagcaaattactatggaaaatacattgctctaagagggacagtggttcgtgtcagtaatataaagcctctttgcaccaagatggcttttctttgtgctgcatgtggagaaattcagagctttcctcttccagatggaaaatacagtcttcccacaaagtgtcctgtgcctgtgtgtcgaggcaggtcatttactgctctccgcagctctcctctcacagttacgatggactggcagtcaatcaaaatccaggaattgatgtctgatgatcagagagaagcaggtcggattccacgaacaatagaatgtgagcttgttcatgatcttgtggatagctgtgtcccgggagacacagtgactattactggaattgtcaaagtctcaaatgcggaagaaggttctcgaaataagaatgacaagtgtatgttccttttgtatattgaagcaaattctattagtaatagcaaaggacagaaaacaaagagttctgaggatgggtgtaagcatggaatgttgatggagttctcacttaaagacctttatgccatccaagagattcaagctgaagaaaacctgtttaaactcattgtcaactcgctttgccctgtcatttttggtcatgaacttgttaaagcaggtttggcattagcactctttggaggaagccagaaatacgcagatgacaaaaacagaattccaattcggggagacccccacatccttgttgttggagatccaggcctaggaaaaagtcagatgctacaggcagcgtgcaatgttgccccacgtggcgtgtatgtttgtggtaacaccacgaccacctctggtctgacggtaactctttcaaaagatagttcctctggagattttgctttggaagctggtgccctggtacttggtgatcaaggtatttgtggaatcgatgaatttgataagatggggaatcaacatcaagccttgttggaagccatggagcagcaaagtattagtcttgctaaggctggtgtggtttgtagccttcctgcaagaacttccattattgctgctgcaaatccagttggaggacattacaataaagccaaaacagtttctgagaatttaaaaatggggagtgcactactatccagatttgatttggtctttatcctgttagatactccaaatgagcatcatgatcacttactctctgaacatgtgattgcaataagagctggaaagcagagaaccattagcagtgccacagtagctcgtatgaatagtcaagattcaaatacttccgtacttgaagtagtttctgagaagccattatcagaaagactaaaggtggttcctggagaaacaatagatcccattccccaccagctattgagaaagtacattggctatgctcggcagtatgtgtacccaaggctatccacagaagctgctcgagttcttcaagatttttaccttgagctccggaaacagagccagaggttaaatagctcaccaatcactaccaggcagctggaatctttgattcgtctgacagaggcacgagcaaggttggaattgagagaggaagcaaccaaagaagacgctgaggatatagtggaaattatgaaatatagcatgctaggaacttactctgatgaatttgggaacctagattttgagcgatcccagcatggttctggaatgagcaacaggtcaacagcgaaaagatttatttctgctctcaacaacgttgctgaaagaacttataataatatatttcaatttcatcaacttcggcagattgccaaagaactaaacattcaggttgctgattttgaaaattttattggatcactaaatgaccagggttacctcttgaaaaaaggcccaaaagtttaccagcttcaaactatgtaaaaggacnttcaccaagttagggcctcctgggtttattgcagattaaagccatctcagtgaagatatgcgtgcacgcacagacagacagacacacacacacacacacacacacacacacacacacacacacagtcaaatactgttctctgaaaaatgatgtcccaaaagtattataataggaaaaaagcattaaatataataaactaatttaagaagtgataaagtctccagatgcagtagctcacactgtaatcacagtgactcaggaggctgaggtgagaggattccttgaggccagggttcgagaccaaccttgggcaacatagcaagaccccatttcttaaaaaaaaaaaa

SEQ ID NO: 24016 - DNA, 5538 bp, Homo Sapiens
gcggcacagagccgcggcttgctttcaggacacgggtcgctggcgggttaggtggctgcgtggccgcctcacttcgcgcacgcgccgctaggctgggggagttgatttgcactgctccgggtgtcggctccggcgggacgggcggttctgcgtacccctctccagtgtcaacctggggctgaatcttcaacctgtcaaagccttcttaattatgtctgagaaaaggatcctgattgagtcaatgctttgcattctcagtcctctgcataaagctgagagatgcctacagctgagagtgaagcaaaagtaaaaaccaaagttcgctttgaagaattgcttaagacccacagtgatctaatgcgtgaaaagaaaaaactgaagaaaaaacttgtcaggtctgaagaaaacatctcacctgacactattagaagcaatcttcactatatgaaagaaactacaagtgatgatcccgacactattagaagcaatcttccccatattaaagaaactacaagtgatgatgtaagtgctgctaacactaacaacctgaagaagagcacgagagtcactaaaaacaaattgaggaacacacagttagcaactgaaaatcctaatggtgatgctagtgtagaggaagacaaacaaggaaagccaaataaaaaggtgataaagacggtgccccagttgactacacaagacctgaaaccggaaactcctgagaataaggttgattctacacaccagaaaacacatacaaagccacagccaggcgttgatcatcagaaaagtgagaaggcaaatgagggaagagaagagactgatttagaagaggatgaagaattgatgcaagcatatcagtgccatgtaactgaagaaatggcaaaggagattaagaggaaaataagaaagaaactgaaagaacagttgacttactttccctcagatactttattccatgatgacaaactaagcagtgaaaaaaggaaaaagaaaaaggaagttccagtcttctctaaagctgaaacaagtacattgaccatctctggtgacacagttgaaggtgaacaaaagaaagaatcttcagttagatcagtttcttcagattctcatcaagatgatgaaataagctcaatggaacaaagcacagaagacagcatgcaagatgatacaaaacctaaaccaaaaaaaacaaaaaagaagactaaagcagttgcagataataatgaagatgttgatggtgatggtgttcatgaaataacaagccgagatagcccggtttatcccaaatgtttgcttgatgatgaccttgtcttgggagtttacattcaccgaactgatagacttaagtcagattttatgatttctcacccaatggtaaaaattcatgtggttgatgagcatactggtcaatatgtcaagaaagatgatagtggacggcctgtttcatcttactatgaaaaagagaatgtggattatattcttcctattatgacccagccatatgattttaaacagttaaaatcaagacttccagagtgggaagaacaaattgtatttaatgaaaattttccctatttgcttcgaggctctgatgagagtcctaaagtcatcctgttctttgagattcttgatttcttaagcgtggatgaaattaagaataattctgaggttcaaaaccaagaatgtggctttcggaaaattgcctgggcatttcttaagcttctgggagccaatggaaatgcaaacatcaactcaaaacttcgcttgcagctatattacccacctactaagcctcgatccccattaagtgttgttgaggcatttgaatggtggtcaaaatgtccaagaaatcattacccatcaacactgtacgtaactgtaagaggactgaaagttccagactgtataaagccatcttaccgctctatgatggctcttcaggaggaaaaaggtaaaccagtgcattgtgaacgtcaccatgagtcaagctcagtagacacagaacctggattagaagagtcaaaggaagtaataaagtggaaacgactccctgggcaggcttgccgtatcccaaacaaacacctcttctcactaaatgcaggagaacgaggatgtttttgtcttgatttctcccacaatggaagaatattagcagcagcttgtgccagccgggatggatatccaattattttatatgaaattccttctggacgtttcatgagagaattgtgtggccacctcaatatcatttatgatctttcctggtcaaaagatgatcactacatccttacttcatcatctgatggcactgccaggatatggaaaaatgaaataaacaatacaaatactttcagagttttacctcatccttcttttgtttacacggctaaattccatccagctgtaagagagctagtagttacaggatgctatgattccatgatacggatatggaaagttgagatgagagaagattctgccatattggtccgacagtttgatgttcacaaaagttttatcaactcactttgttttgatactgaaggtcatcatatgtattcaggagattgtacaggggtgattgttgtttggaatacctatgtcaagattaatgatttggaacattcagtgcaccactggactataaataaggaaattaaagaaactgagtttaagggaattccaataagttatttggagattcatcccaatggaaaacgtttgttaatccataccaaagacagtactttgagaattatggatctccggatattagtagcaaggaagtttgtaggagcagcaaattatcgggagaagattcatagtactttgactccatgtgggacttttctgtttgctggaagtgaggatggtatagtgtatgtttggaacccagaaacaggagaacaagtagccatgtattctgacttgccattcaagtcacccattcgagacatttcttatcatccatttgaaaatatggttgcattctgtgcatttgggcaaaatgagccaattcttctgtatatttacgatttccatgttgcccagcaggaggctgaaatgttcaaacgctacaatggaacatttccattacctggaatacaccaaagtcaagatgccctatgtacctgtccaaaactaccccatcaaggctcttttcagattgatgaatttgtccacactgaaagttcttcaacgaagatgcagctagtaaaacagaggcttgaaactgtcacagaggtgatacgttcctgtgctgcaaaagtcaacaaaaatctctcatttacttcaccaccagcagtttcctcacaacagtctaagttaaagcagtcaaacatgctgaccgctcaagagattctacatcagtttggtttcactcagaccgggattatcagcatagaaagaaagccttgtaaccatcaggtagatacagcaccaacggtagtggctctttatgactacacagcgaatcgatcagatgaactaaccatccatcgcggagacattatccgagtgtttttcaaagataatgaagactggtggtatggcagcataggaaagggacaggaaggttattttccagctaatcatgtggctagtgaaacactgtatcaagaactgcctcctgagataaaggagcgatcccctcctttaagccctgaggaaaaaactaaaatagaaaaatctccagctcctcaaaagcaatcaatcaataagaacaagtcccaggacttcagactaggctcagaatctatgacacattctgaaatgagaaaagaacagagccatgaggaccaaggacacataatggatacacggatgaggaagaacaagcaagcaggcagaaaagtcactctaatagagtaaagaattgaagaaaagttaagagctgccgaaatgcacagaggtgaaaatgacaaaccaaatggaatttctcttcagagttcagaattttcagatactaaggaggaagaaaggatccactacttcttgttcttatgaatgactctagaaaaatcagaatcaagttgtgggtggaaaaatcaacgtggcctttgagttcagttgttataaaccattgtgactattgttggtcaaagtattggtacttatattgttagtaattgcatcataattacattaccagtgttggaaaactaatgaagaaaacactgtaattgctactcagcaaatgtgaataaaaggtgtttgcgttattaggatgtctgttaagtaatcatttaatattattatattggtaatggttgtatgtgtgatgctatgcccagaatatgaagtatctgtttttgaaattcactttatttaaaagataagcagctgactgggcacggtgcctcatgcctgtaatcctagcaccttgggaggctgaggcaggtggatcacctaaggtcaggagttcaacaacaccagcctgaccaacatggtgaaaccccatctctactaaaaatacaaaaatcagccgggtctcatggcaggcacctgtaatcccatctactgaggcaggagaattgcttgacccaggaggcagaggttgcagtgagccaagatcacgccattgcactccagcctgggggacagagcaagactctatctccaaaaaacaaaaaagataagcagctttagaatatggcgcattcaaaacagtctcagtaacaaagacattaaaagaaaacaatttactttctaattaaaattttgtgtttcttaagatcaaatcatataggtaacttcatagacctaaattaaaagtgatttttggctggactggcaacaatgttcccaatgtctttactttttaaaaaaggcttttcatatttaagcacatacctattttgtagacttacattgtttaatatttattttaatcttaatatttttacattattatattgcattatttattttttctaagttccagaataatagtgtcattattatagactatatgttttgaagtttgatattataatgggatattcattttttgttcttttcttgactcctttctcaagtgtgtgataaggtctgctgataaaatatttaaccccaagaaagtgaaaactaatataaaattagaaagacctatccaaattagacagtcaattccattaaaataagaagtgagaaaaacaatgttgggcattgaggtgtaaattttgcccagatgtatacccagtgtgaaatatcttctaataaaaatatatttggctcttatccctgcacatgtagaggcataaaaattggtaaacatgtcccgctgtgtagaactttaaaaaaaaggcatttttgaaagtgttgagtggcactgataactggtgaagcctacagccatccgcccaaaagtctgttctgatggcactgagttttcattgttctggatgtataagtctgtgtgtcaggtacagctgggcccagccagcttgagtcactcttgtacaagcttgtttttttctgtcttgtgaatgcacttgataatttaaaaataaaaatatctgtttctctgcaaaaaaaaaa

SEQ ID NO: 24017 - DNA, 3654 bp, Homo Sapiens
gcggcacagagccgcggcttgctttcaggacacgggtcgctggcgggttaggtggctgcgtggccgcctcacttcgcgcacgcgccgctaggctgggggagttgatttgcactgctccgggtgtcggctccggcgggacgggcggttctgcgtacccctctccagtgtcaacctggggctgaatcttcaacctgtcaaagccttcttaattatgtctgagaaaaggatcctgattgagtcaatgctttgcattctcagtcctctgcataaagctgagagatgcctacagctgagagtgaagcaaaagtaaaaaccaaagttcgctttgaagaattgcttaagacccacagtgatctaatgcgtgaaaagaaaaaactgaagaaaaaacttgtcaggtctgaagaaaacatctcacctgacactattagaagcaatcttcactatatgaaagaaactacaagtgatgatcccgacactattagaagcaatcttccccatattaaagaaactacaagtgatgatgtaagtgctgctaacactaacaacctgaagaagagcacgagagtcactaaaaacaaattgaggaacacacagttagcaactgaaaatcctaatggtgatgctagtgtagaggaagacaaacaaggaaagccaaataaaaaggtgataaagacggtgccccagttgactacacaagacctgaaaccggaaactcctgagaataaggttgattctacacaccagaaaacacatacaaagccacagccaggcgttgatcatcagaaaagtgagaaggcaaatgagggaagagaagagactgatttagaagaggatgaagaattgatgcaagcatatcagtgccatgtaactgaagaaatggcaaaggagattaagaggaaaataagaaagaaactgaaagaacagttgacttactttccctcagatactttattccatgatgacaaactaagcagtgaaaaaaggaaaaagaaaaaggaagttccagtcttctctaaagctgaaacaagtacattgaccatctctggtgacacagttgaaggtgaacaaaagaaagaatcttcagttagatcagtttcttcagattctcatcaagatgatgaaataagctcaatggaacaaagcacagaagacagcatgcaagatgatacaaaacctaaaccaaaaaaaacaaaaaagaagactaaagcagttgcagataataatgaagatgttgatggtgatggtgttcatgaaataacaagccgagatagcccggtttatcccaaatgtttgcttgatgatgaccttgtcttgggagtttacattcaccgaactgatagacttaagtcagattttatgatttctcacccaatggtaaaaattcatgtggttgatgagcatactggtcaatatgtcaagaaagatgatagtggacggcctgtttcatcttactatgaaaaagagaatgtggattatattcttcctattatgacccagccatatgattttaaacagttaaaatcaagacttccagagtgggaagaacaaattgtatttaatgaaaattttccctatttgcttcgaggctctgatgagagtcctaaagtcatcctgttctttgagattcttgatttcttaagcgtggatgaaattaagaataattctgaggttcaaaaccaagaatgtggctttcggaaaattgcctgggcatttcttaagcttctgggagccaatggaaatgcaaacatcaactcaaaacttcgcttgcagctatattacccacctactaagcctcgatccccattaagtgttgttgaggcatttgaatggtggtcaaaatgtccaagaaatcattacccatcaacactgtacgtaactgtaagaggactgaaagttccagactgtataaagccatcttaccgctctatgatggctcttcaggaggaaaaaggtaaaccagtgcattgtgaacgtcaccatgagtcaagctcagtagacacagaacctggattagaagagtcaaaggaagtaataaagtggaaacgactccctgggcaggcttgccgtatcccaaacaaacacctcttctcactaaatgcaggagaacgaggatgtttttgtcttgatttctcccacaatggaagaatattagcagcagcttgtgccagccgggatggatatccaattattttatatgaaattccttctggacgtttcatgagagaattgtgtggccacctcaatatcatttatgatctttcctggtcaaaagatgatcactacatccttacttcatcatctgatggcactgccaggatatggaaaaatgaaataaacaatacaaatactttcagagttttayctcatccttcttttgtttacacggctaaattccatccagctgtaagagagctagtagttacaggatgctatgattccatgatacggatatggaaagttgagatgagagaagattctgccatattggtccgacagtttgatgttcacaaaagttttatcaactcactttgttttgatactgaaggtcatcatatgtattcaggagattgtacaggggtgattgttgtttggaatacctatgtcaagattaatgatttggaacattcagtgcaccactggactataaataaggaaattaaagaaactgagtttaagggaattccaataagttatttggagattcatcccaatggaaaacgtttgttaatccataccaaagacagtactttgagaattatggatctccggatattagtagcaaggaagtttgtaggagcagcaaattatcgggagaagattcatagtactttgactccatgtgggacttttctgtttgctggaagtgaggatggtatagtgtatgtttggaacccagaaacaggagaacaagtagccatgtattctgacttgccattcaagtcacccattcgagacatttcttatcatccatttgaaaatatggttgcattctgtgcatttgggcaaaatgagccaattcttctgtatatttacgatttccatgttgcccagcaggaggctgaaatgttcaaacgctacaatggaacatttccattacctggaatacaccaaagtcaagatgccctatgtacctgtccaaaactaccccatcaaggctcttttcagattgatgaatttgtccacactgaaagttcttcaacgaagatgcagctagtaaaacagaggcttgaaactgtcacagaggtgatacgttcctgtgctgcaaaagtcaacaaaaatctctcatttacttcaccaccagcagtttcctcacaacagtctaagttaaagcagtcaaacatgctgaccgctcaagagattctacatcagtttggtttcactcagaccgacagtcactttgctgaattcaacacatgtatattatggtggaaaaagcactagactcagggtcagccagccagaagaactgagccgacctgggatcccaccacttcctaactgttttgttaggtagttcactttctctcttcggataaatgtctccacatttcctacttcatagaattgtcagaatcaacacaatacatttaatactttgaaactcataaaatattgggagaataaacagtatgaggttaaaaaaaaaaaaaaaaa

SEQ ID NO: 24018 - DNA, 7163 bp, Homo Sapiens
tgaccctgaggcattgccgtcgcgcggtgcacagctaagacgtcgcgcttgcgcaggcgctcggcgcagaggcctgcgggaagccaagatggcgcataggggttctccaggctgcagttggcgccttatcagtatctaagcggagtgttttggaaggagttaaggggctgtggcaaacgccctctccgccgtcatggcccggcatcggaatgttcgaggctataactacgatgaagattttgaagatgatgatctctacggccagtctgtagaggatgattattgtatttcgccgtcaacagctgctcagtttatttattcacggcgtgacaaaccttccgttgagcctgtggaagaatatgattatgaagatctgaaagaatcttccaattctgtttcaaaccatcagctcagtggatttgatcaagctcgtctttattcatgccttgatcacatgagagaggtacttggagatgctgtgccagatgaaatattaattgaagcagttctgaagaacaagtttgatgtgcagaaggctttgtcaggggttctggaacaagatagagtgcagagtttgaaggacaagaatgaggcaacagtatctacaggaaagatagcaaaaggaaaaccagtagattcccagacatcgcgaagtgaatctgaaattgtgccaaaagttgctaaaatgactgtatctggaaagaagcaaactatgggatttgaagtgcctggagtatcttctgaagaaaatggtcatagtttccacacacctcaaaaaggaccgcccattgaagatgccattgcttcttccgatgttcttgagactgcttctaaatctgctaatccaccccacacgattcaagcatcagaagagcagagttcaaccccagcaccggtgaaaaagtctggcaagctgaggcagcaaatagatgtgaaggcggaactggagaagcggcaaggagggaagcagctactcaacttagtggtcattggtcatgttgatgctgggaaaagtactctgatgggccatatgctttatcttctgggtaatataaacaaaagaactatgcataagtatgaacaggagtctaaaaaggctggcaaagcttcgtttgcatatgcatgggtcttggatgaaactggcgaagaaagggaaaggggagtaaccatggatgttggtatgacaaagtttgaaaccacaaccaaagttattacattaatggatgctccaggccataaggacttcattccaaatatgattacaggagcagcccaggcggatgtagctgttttagttgtagatgccagcaggggagagtttgaagctggatttgagactggaggacaaacacgagagcatggactcttggtccgttctctgggagtgacgcagcttgcagttgcagttaataaaatggatcaggttaattggcaacaagaaaggtttcaagagattactggaaaacttgggcactttcttaagcaagcaggttttaaggagagtgatgtaggttttattcctacaagtggtctcagtggtgaaaatctaatcacaagatctcagtcaagtgaactcacaaaatggtataaaggactatgtttattagaacaaattgattcctttaagcctccccagcgatctattgacaaaccttttagattatgtgtgtccgatgttttcaaagatcaaggatctggattttgcataactggtaaaatagaagctggttatatccaaactggtgaccgactactggcaatgcctcctaatgaaacttgtaccgtgaaaggaatcactctgcatgatgaacctgtcgactgggcggcagcaggcgatcatgttagtcttactttggttgggatggatatcatcaaaatcaatgttggctgcatattttgtggccccaaagtacccattaaagcttgcactcgtttcagagcccgaatcctcatctttaatattgaaattcctatcactaaaggatttcctgtgctgttacactaccaaactgtcagtgaacccgccgttattaaacgattgattagtgtcttaaacaaaagcacgggtgaagtcacaaagaaaaagcctaagtttttgactaaaggccagaatgcattggtagagctacagacacaaagaccaatagctcttgagctatataaagactttaaagagctggggaggttcatgctacgttacggtggttctacaatagctgctggtgttgtcactgagataaaagaatgatgggtcagaatttctaccacgtttctggatacagtgaaatagctaacctctgtttcaagaatgcagttattaagtcaaaggaacaatgtgcaattgatatgtttttagatgagagagaaaaattaaagctaaaattagctgcaaagaagtattaataatcacctctgcaaaaattctaagttgccaactggcaaagaaagtctaatgttaaaaacaactttgcctttgaaacgttaataaatggatttactttgctaagatttatggcaagtgtcaaaaatagtatctgaagatactgaatcatcatgaaatgaactctacttctggccaaagcacaatgtatttgcagttttctcttttgattcaattatactgcacatgttttaaggaaaagtaacttaattgggtttttcaggcagttgatatttgacctaagcttttttttttttttttttttccagttaatgctaagaaaagatttggggaaggttataataaaagtattttgtggtgaccataagaatgtccctccccaaaacaagtaaacttgtgaaagtttaatttggaattagtggaagctgttcctttgaaagccaagatattatttaagttgtaaagccagctaataaaatgccttagtttgagcataatacaaactgtgttttgttctttagacatttatgagattctctgccactaacagtaaatatgatttaggggttttgtgggatctttttcacctaagagtttcctagctctgtcacatgaattcttttttatcctaatggcagatccaatttcatctcattcatttttttaaccataacttgcttttcccattctcacttttagaattatacctatgatggccctttctttatcttgcttaccttatagattataagtcccctgtgagtaagtaagagtcatgtttttctttaaagtttcaacaacaaaccccaaggtttatttatttaacaacaggtattcgttgaggtgccttctgggtgcaaggagctttagagtagattttgacctcagctgaacctggaactctgatctgatagactgtttatgataagcttttttttttattagcagcgtgatttgtatatcgatggcttaacatatacaacagcatttcttctccctgcaccttttcgtgaacctgacattttgaacataagcaataacatctgtatggtaaagtaggcagattatacatgtgttgcttagtgaatgattaccaagtgaacacacttggtatattgctttaccaaaatacatgtgtagttgtcacttcagattcactgagttaagaaagttttatttaaatattaatattaatcaagaatttaacagatatatgtgacagaaatctaacttcaagtgactgaagcagaaagaaaaatttttgaatgacataactgagaaaattagaggtagctctagctttgattccatttagatcgagcagctcacacaatgttagcaaggactcatctccactctgccttccctggtgctggttttgctctcaaactctatatagaactctcggccgggcgcggtggctcacacctgtaatcaaaacactttgggaggctgagtcgggaggatagcgtgagcccaggagtttgagaccagctaaggcaatatagtgagaccatgtctctacagaaaaaatttaaaaacagatcagctgggtgtggtgccacatgcctgtagtcccagcttctcaggaggctggggtgggaagatcacttgagcccaggaggtcgaggctgcagtgagccatgatcacatcactgcagtccagcctgggtgacagagcaagacctgtcaccctgccacccataaaaaacctcttctgtaatgccaggttcttgacaagatgtgataattccacacttacatcctcagatctcccatccagggcaaggacagactaaaagagcatatcttctccagaagtcctagaaacatctcatcattgactatgattgaattttatttattaatacttccctaggatatcctgtgtttgagtgtgaagttaatatcacacaaagcatgtagctaacagttgtgtgagggttggaaattcagggtgctgttaggaaggggaaatggattggggtttaaggtagggggagtaaaaacaagaaaccatccactctgtatattatataagactgtgatcgaattaagaattttagtttacagtttagcataaacaaatagtagtagaaatgaatgcatttattcattccttccttctccaatagtgtttaagtacaatctttttatttgcattttattgatgattgattgtggttgaaaggagtggtgatattatttcgaggatccactgtgtaagaagactgttggcagtggaaggctcgagttgattaagtgacaaagaggtaaagcagacatgcccaagcttggttatgctctgatttcctaccctgttactttcatccataatttatagtacatccattttgtgtcattttgcttcaggtatttcttgtcctgactgtcttcttttttatgattttactgtttcttcacactaatggctttgtcctctgactttgactctttgtgagattcttctgagcagttaacctctaggataatgtggcttgaacacattacagaactatgttttgacttgttagtattattcacacattcatgacaattgagcctctctactgtgagaaatgttttagaggccagtttctaggcatagctgtttttctcccatgagtatgcaaatcaatagttttaaccattgttaaaatgcaatcatagtgacttcagaaaatttggaaaatacagaaaatatagggaagaataaaattaacccacagttctgtcacctaaaggtaactgctgccaatgttttcatgtatttcttttctgtctctccaatgcatttttttacatagttgtgagcgttagccaagttattttcatgttgttatgtaatcaatatttttcaatagaagtattagaggttttttttattgatataaaaataacaattacagatcctgatatatagaagttattcaaaattatacagttttcaaaaaatcaagacaagtaggcccaatacaaactactgaatcatcttctaatttccctctaaaatatttatagaaatatgtaagtagaaaaacattcatcctttcctcgtctaattatgatcctgccatattccaggcacaagagaaagctctggggcttgagtcttaatagggctgatagtccaaccaggggacagggtatcataaagagataattcaaaactttaagattggagggtaggtgatggtagaaaattctgcggcaaacatttgttgatgctcatcatttgttgatgtcatcaaagatcaccagggcataattataatcaaaattagttttattgatgcttgctgcagcaagagagactgcacaccactggggtctatgggtgcttctcagtgggaaggtgtaaggaggggcttgctaagaatttgagcacatgtagctaattttaaggagggctcaagtgagcaagggtttcttctggattgagtgctgtcagaaagtggattgagtgctgtcagaaagtgggagtgattttgcaactgggtatcttaatttttatgttgtgggtgggaggaaaggaaagaagcaacagtcacccatgttagccacaagaagaggttggctgtttatggtttgcacagtgactttgtttttatctgtgctcaggcatgattacagtatctcattttatccggattacagtgacctcatctgatgttagagatttgagaattgttaaatgttcagcaggagaacgccaccgcctagtgtgaatgctaggtcagaagctgctttttcacactgaaaccatttaagtatgtacaaataagttaatagtgtaaatgtaggtgtaaaatacaatgcaaaacaaaataatgaagtaagtgaattaaattattgcaccaaatatggggatatgaaatagggaaagaaaagcattaagttacttatagtccataaagggactacattattttgttactctgataatcccataaaacaaagttttaagaatgtttacagtaaccatgaatggaattagtgaaactattcatatcaatgcaaaaaaaaaaaaaaaaaaaagcaaagaaactaagtctgtacagcaaaagatggtaaggaaacaagaaaattaaatgaagacaaaggttgtgattattacagtaaatgaaaataggtttttatctttaaaatgtagactcaaactgcaaagctaatgatatgctatctgcaaaatattcctattttgtaaataaataaaaccatagatttaaagaagaaagggcacagatgtactggggagacaaaaataactgatccgttgggtgtataccatgtgccaagcaattttcatatactcatttaacatgacatatctataattatatgaggcagatattattaacctcagtctatagatgagaagactaaagctcagagggattgctaaaaactagtaaataaattatggaaccatgatttgaatttagatttaagtctgactgaggcatgttcaaagacactacactgcctctccagaaatcaggagtagcaatattaacactggacaaagaatttaaagcaagtaaaaaaaaattaagagaatttcatattaataacaagtataatgcacaataaaactgtaccaaatgacataaaaatgcataatgaaatttattagaaattaaaaattaaagggcatagttacaattattgaggaattctcatagctctgccttatagatcatgtaaacaaacaaggtcatagaggacttaaatagcaaagcagaaaaaaaaaaaaaaaaaa

SEQ ID NO: 24019 - DNA, 2814 bp, Homo Sapiens
gccgggtgtcagcgaacccctttcccaaaccttcggggagaagggaggtgggaggaggcaaagaaactacaggcagtgagctggaagggggggtggggggggcaggagacaagaaatcaagacaccaggcagcaggacacacacacactcacatacactcacacacatagagaccaacagatagacagctacctaaagcctgaaagactgacagcaacacagaaaaaaagaaacaggcagaaagagagacaaagacagaaatagaaacagactaacacacagagtcaaaaatacagagacagaaagacagggagaaagagaaacagaaaattagacaccaaagacatacgaacagggaggaaggccgactgaaagaaagacggagaagaggagagagaagccagggccgagcgtgccagcaggcggatggagggcggcctggtggaggaggagacgtagtggcctgggctgagctgggtgggccgggagaagcgggtgcctcagagtgggggtgggggcatgggaggggcaggcattctgctgctgctgctggctggggcgggggtggtggtggcctggagacccccaaagggaaagtgtcccctgcgctgctcctgctctaaagacagcgccctgtgtgagggctccccggacctgcccgtcagcttctctccgaccctgctgtcactctcactcgtcaggacgggagtcacccagctgaaggccggcagcttcctgagaattccgtctctgcacctgctcctcttcacctccaactccttctccgtgattgaggacgatgcatttgcgggcctgtcccacctgcagtacctcttcatcgaggacaatgagattggctccatctctaagaatgccctcagaggacttcgctcgcttacacacctaagcctggccaataaccatctggagaccctccccagattcctgttccgaggcctggacacccttactcacgtggacctccgcgggaacccgttccagtgtgactgccgcgtcctctggctcctgcagtggatgcccaccgtgaatgccagcgtggggaccggcgcctgtgcgggccccgcctccctgagccacatgcagctccaccacctcgaccccaagactttcaagtgcagagccatagagctgtcctggttccagacggtgggggagtcggcactgagcgtagagcccttctcctaccaaggggagcctcacattgtgctggcacagcccttcgccggccgctgcctgattctctcctgggactacagcctgcagcgcttccggcccgaggaagagctgcccgcggcctccgtggtgtcctgcaagccactggtgctgggccccagcctcttcgtgctggctgcccgcctgtgggggggctcacagctgtgggcccggcccagtcccggcctgcgcctggccccaacgcagaccctggccccgcggcggctgctgcggcccaatgacgccgagctcctgtggctggaagggcaaccctgcttcgtggtggccgatgcctccaaggcgggcagcaccacgctgctgtgccgcgacgggcccggcttttacccgcaccagagcctgcacgcctggcaccgggacacggacgctgaggccctggagctggacggccggccccacctgctgctggcctcggcttcccagcggcccgtgctcttccactggaccggtggccgcttcgagagacgcacggacatccccgaggccgaggatgtctatgccacacgccacttccaggctggtggggacgtgttcctgtgcctcacacgctacattggggactccatggtcatgcgctgggacggctccatgtttcgtctgctgcagcaacttccctcgcgcggtgcccacgtcttccagccactgctcatcgccagggaccaactggccatcctaggcagcgacttcgccttcagccaggtcctccgccttgagcctgacaaggggctcctggagccactgcaggagctggggcctccggccctggtggccccccgtgcctttgcccacatcactatggccggcagacgcttcctctttgctgcttgctttaagggccccacacagatctaccagcatcacgagatcgacctcagtgcctgagaccaccaacgggactctgggcatggctggggcccctggacggccccttggctggctcctggccctacttggggtgatggcccgcctgtgagctgctgaccgtgggccacgttcatcagccacacgtctaggccttaagcccacttcttaaaggatctgcacccatggggggacatagagggtcccagcctactggacctcccgagctgcccttcaggtctaaagcaacatctggacatctcggctggggcagattccccatcaaaggcaacctggggggtgcaggctggtgcactgcatggagtcgaggtggaggtcacgtgcagagctccatgaggtcccggagcccccctctcaacccgctcctaccccgctggtccctctgaaagcaccgaggggttgatggcattcctttcccattctaaactccacgcagccaatcgctttcctggaggagcgccaacctcgaagacaactcagcactgggcgggttcccctctgctgcttgtgcgcatgcgtgcggccgcccagcaagctgtgccttttgcgcctcttgcgcgtgcgccggggcacagggagggacagcgggaggtgtcgcggggagcctggtgcccttctagatgggcgacggaggcaaggacaagacgagtccgagctcaataaatgcgctgtgcaccctca

SEQ ID NO: 24020 - DNA, 2351 bp, Homo Sapiens
taggatgacctcaccctccagctctccagttttcaggttggagacattagatggaggccaagaagatggctctgaggcggacagaggaaagctggattttgggagcgggctgcctcccatggagtcacagttccagggcgaggaccggaaattcgcccctcagataagagtcaacctcaactaccgaaagggaacaggtgccagtcagccggatccaaaccgatttgaccgagatcggctcttcaatgcggtctcccggggtgtccccgaggatctggctggacttccagagtacctgagcaagaccagcaagtacctcaccgactcggaatacacagagggctccacaggtaagacgtgcctgatgaaggctgtgctgaaccttaaggacggggtcaatgcctgcattctgccactgctgcagatcgaccgggactctggcaatcctcagcccctggtaaatgcccagtgcacagatgactattaccgaggccacagcgctctgcacatcgccattgagaagaggagtctgcagtgtgtgaagctcctggtggagaatggggccaatgtgcatgcccgggcctgcggccgcttcttccagaagggccaagggacttgcttttatttcggtgagctacccctctctttggccgcttgcaccaagcagtgggatgtggtaagctacctcctggagaacccacaccagcccgccagcctgcaggccactgactcccagggcaacacagtcctgcatgccctagtgatgatctcggacaactcagctgagaacattgcactggtgaccagcatgtatgatgggctcctccaagctggggcccgcctctgccctaccgtgcagcttgaggacatccgcaacctgcaggatctcacgcctctgaagctggccgccaaggagggcaagatcgagattttcaggcacatcctgcagcgggagttttcaggactgagccacctttcccgaaagttcaccgagtggtgctatgggcctgtccgggtgtcgctgtatgacctggcttctgtggacagctgtgaggagaactcagtgctggagatcattgcctttcattgcaagagcccgcaccgacaccgaatggtcgttttggagcccctgaacaaactgctgcaggcgaaatgggatctgctcatccccaagttcttcttaaacttcctgtgtaatctgatctacatgttcatcttcaccgctgttgcctaccatcagcctaccctgaagaagcaggccgcccctcacctgaaagcggaggttggaaactccatgctgctgacgggccacatccttatcctgctaggggggatctacctcctcgtgggccagctgtggtacttctggcggcgccacgtgttcatctggatctcgttcatagacagctactttgaaatcctcttcctgttccaggccctgctcacagtggtgtcccaggtgctgtgtttcctggccatcgagtggtacctgcccctgcttgtgtctgcgctggtgctgggctggctgaacctgctttactatacacgtggcttccagcacacaggcatctacagtgtcatgatccagaaggtcatcctgcgggacctgctgcgcttccttctgatctacttagtcttccttttcggcttcgctgtagccctggtgagcctgagccaggaggcttggcgccccgaagctcctacaggccccaatgccacagagtcagtgcagcccatggagggacaggaggacgagggcaacggggcccagtacaggggtatcctggaagcctccttggagctcttcaaattcaccatcggcatgggcgagctggccttccaggagcagctgcacttccgcggcatggtgctgctgctgctgctggcctacgtgctgctcacctacatcctgctgctcaacatgctcatcgccctcatgagcgagaccgtcaacagtgtcgccactgacagctggagcatctggaagctgcagaaagccatctctgtcctggagatggagaatggctattggtggtgcaggaagaagcagcgggcaggtgtgatgctgaccgttggcactaagccagatggcagcccggatgagcgctggtgcttcagggtggaggaggtgaactgggcttcatgggagcagacgctgcctacgctgtgtgaggacccgtcaggggcaggtgtccctcgaactctcgagaaccctgtcctggcttcccctcccaaggaggatgaggatggtgcctctgaggaaaactatgtgcccgtccagctcctccagtccaactgatggcccagatgcagcaggaggccagaggacagagcagaggatctttccaacc

SEQ ID NO: 24021 - DNA, 4883 bp, Homo Sapiens
caattatccacgggagactcggttttcctctctgtaaattacggatattaggaatacttgccgcctggggttgttttgagcactttcattgtttaggtgctgtatttattgggtgtgcgttccctgggagagcccgagggagacggctcctgcaccggccccaagggcctctctgcccgtggagtgcaggagcgaaggggctggcctagctgaccaccagggcccctgctggctctgaccgccctcctatcccaagtaattatttacacgtttcgcgttcgcttatgtattatgtgtaatcatggcacagtatcctgaagccgtcggagtctgtgtgctggtgcaaggtctgggacaaatttaagaagagagagaacctaaattggtaataaatcaataagaaatatttacattcactcagtgaaaagtgtcatgtctgagctcagcatatatcggagccacacatggacacctctccttcctccactaagagcggaaaatgaacaaatcccaggaacaagtgtcattcaaggatgtatgtgtggacttcactcaggaagagtggtatctgctggaccctgctcagaagattctatacagagatgtgatcctggaaaattatagcaatcttgtctcagtagggtattgcattactaaaccagaagtgatctttaagatcgagcaaggagaagagccctggatattagaaaaaggattcccaagccagtgccacccagaaaggaaatggaaagttgatgacgtgttagagagcagccaggaaaatgaagatgaccatttttgggagcttctattccacaacaacaaaacagtaagtgtagaaaatggagatagaggaagcaaaactttcaatttgggcacagaccctgtttctttaagaaattatccctataaaatatgtgactcatgtgaaatgaatttgaaaaatatttcgggcttaattattagtaaaaagaactgttccagaaagaagcctgatgagtttaatgtatgtgagaaattgctccttgatattaggcatgagaaaatccctattggagagaagtcttataaatatgatcaaaaaaggaatgccattaattatcaccaggatctcagtcagccaagttttggccaatcttttgagtatagtaaaaatggacaaggcttccatgatgaggcagcattttttacaaataagagatctcagataggagagacagtctgtaaatataacgaatgtggaagaaccttcattgaaagtttaaagctgaatatatctcaaagacctcatttggaaatggagccgtatggatgcagtatttgcgggaagtccttctgcatgaatttaaggtttggacatcagagagctcttacaaaggacaatccttatgaatataatgaatatggggaaatcttctgtgacaattcagctttcattatccatcagggagcttacacaagaaagattctccgtgaatataaagtgagtgacaaaacctgggaaaagtcagctctcttaaaacatcaaatagtacacatggggggaaagtcttatgattacaatgaaaatgggagtaatttcagcaagaagtcacatcttacccagcttcggagagctcacacaggagaaaaaacctttgaatgtggtgaatgtgggaaaaccttctgggagaagtcaaacctcactcaacatcagagaacacacacaggagagaagccctatgaatgtactgaatgtgggaaagccttttgccagaaaccacacctgaccaaccatcagcgaacacatacaggagaaaaaccctatgaatgtaagcaatgtggaaaaacattctgtgtgaagtcaaacctcactgaacatcagagaacacacacaggggagaagccctatgaatgtaatgcatgtgggaaatccttctgccacagatcagccctcactgtgcatcagagaacacacacaggggagaaaccgtttatatgtaatgaatgtggaaaatccttctgtgtgaagtcaaacctcattgtacatcaaagaactcacactggggagaaaccatataagtgtaatgaatgtgggaaaaccttctgtgaaaaatcagctctcactaaacatcagaggactcacacaggggagaagccgtatgagtgtaatgcatgtgggaagacctttagtcagaggtcagtgctcaccaaacatcagagaattcacacaagggtgaaagctctttcaacatcctgaatgttagaagccttcatacacttgtgaaattggttatacagtttcaaaaaaggagatcagagaaagccaaagaatgtcagaaatttgtagaaaatgacttcttgtttgaatatgtaaaagctttcaagaaaaattaaaacttttcattagaaaatttgtactgaggggaattctattcatctaagtaatatggtgaaaatatttatctggaatttatgttgtttagtgttatattccagacgtgataccaaaattttgttgcaaatataatggacaatatttatttatacccatattcacagtggaatctgaagcttataaaagttgaatgacagcagcattaaacatatatgtgaagagtccccgatgtttgtagaccttatgtgagtatgcaaatatataaatttgagtatgcttgatttgtatattggaactcaacatgatcataaggagaagatacgtacccttaattgagtaactactatggtatttgttaatattttctacactaaataccattggtgtctttataggttgacataattatatatgtgtatgtacatatgtttgtgtgtatatgtaaatatatttctacacacatacttaaatatagtgatgtgctagtataacctcatactgacttaaaagttctgattgttaaattttaaggaattttgtgagccagttattaaaagcagtcattatttaaaatatgtaaacttacagttaaaaacaaaggtaataaatactcagcactcatcacttcctaattattttgctacatttcactattacctttgctgttttacttatttaatctgtatgatgaaaatactgtataatagtgtgcactgcacatctgtctcttcccagctccacattcagtgctgtcttggtagcttggacttagtgggagtgtttacaccatggaaattgacaaactataaatcagggttttaattttctcagagaacctgctgtcaaatatttacagcacatcactgtgtatatatgaaaacgtatttggcaatacaaaccacataccccttctatttcctgacataaataaatggctatggccatttacagctgaaccacgtcttcaagaaagaagccaaaaatatttccgtgaggtttttaactacctctgaatctgtcctactctaaatactaccggagtctctttgtaggttggccagtatatgtttttagtgaaatattatttcacaaagaactatatcacgtacctttcctctgactgtttcctggcatatatgcatgaatatggccattattgaactatcacttcagtaaagaagttaaacagtacttttctgaggtttttcagctacctctgggtcattctgtaatgtaaatgttgttaataagaatggtttttacataaattatgcaaaggttaacaagcagtaacactgcactcctcaaaaagtggcggtatgtaatgaaaggcccttttgatatccttgatttttcattgtgtatctgtttgggcacggtctatgtaacactagttctgcgtattagtattttagagtatctctgcctcccttgtcctgttgtttcttttgcccccttggaacacattggtcagcagttctaagagacactgcccacatgatggccattccctacttcatccttgctgagctaaattttatatttttgtgcatccttctcccagatgacttaggtggtaagtccagattagtcaaagctaatcatggaagttccattttaatgattctgttggggtgaacttgggagcaatgagatgtttgggaagtattgtgtagtacttctgggaaagatctccttgatacaacattgtcatgacatgagaagagactctgctgggctttttcatgtctgtaacatggtattggcttatcgtttttatctctgaagggcagtagcctgaagataacagtgcacaaggtgggaaaagccagctcagaggtgacgttgccgagctactctgctctctatacctgttctctactgggactttttataaccctcaataactgttttttatttggtcttagggctgtctgatacttagagctgaaggcattccagctgacacagaggaatatttttctaagtgttaatgttctatatggtaattagggggaagaattatttcttttcacaagttaatatagggatggctgtttgtatcagccatggttctttctggtggaaaacagaattctccaactaaaaatattttaatggcagactgattacagtggtgtgggccagaaacaagggacagtgaaacacccagagacttgtatcagcaggaagccattgccattctgagccttgaagggcaaggagggaaacagtgttaccagagcccagtaagaactgctgtcatgaaggaggggccaccttgtaagagacatcattactaccagaactgtggtgccaaattgctggtgtctctctttggagaaaccaaccagatacatctgctggagagcccaggtgggcacagagaagggtggagagagaatctgggaagagaaatggagaataagcagcacagtgttattcatttctgtaaattcctatgtagaaggctcagtgttagaaataaagttattctactagttgc

SEQ ID NO: 24022 - DNA, 6505 bp, Homo Sapiens
gcgggagccgcttcgggccttctgggcatgtctgccatatggctccaggtttgtttttctccccggcactctgacggggagggctcccggcatctcctggcgtccgggtaaaggacccggaggatgctgagctgctggcgcactgcagcacaactagagatgtacggatgcccccatcttgatcttacagaatcagaggtacagccgcgagaaagagtcaagaacagacagagtcgcttgaggactcaggagggtgtttgctgcgttgacaacagactacaccctcacagtttgctctgctcttccaacaccagtggaagatgatcacatcccagggatcagtgtcgtttagggatgtgactgtgggcttcactcaagaggagtggcagcatctggaccctgctcagaggaccctgtacagggatgtgatgctggagaactacagccaccttgtctcagtagggtattgcattcctaaaccagaagtgattctcaagttggagaaaggcgaggagccatggatattagaggaaaaatttccaagccagagtcatctggaattaattaataccagtagaaactattcaataatgaagttcaatgagtttaacaaaggtggaaaatgtttctgtgatgaaaagcatgaaataattcattctgaagaggaaccttctgaatataataaaaatgggaacagcttctggctgaatgaagacctcatttggcatcagaaaattaaaaattgggaacaatcttttgaatacaatgaatgtgggaaagctttccctgagaattcactcttccttgtacataagagaggttacacaggacagaaaacctgcaaatatactgaacatgggaaaacctgtgatatgtcatttttcatcactcatcagcaaacacatccaagagaaaaccactatggtaatgaatgtggagaaaatatctttgaggaatccattctccttgaacatcagagtgtttacccattcagccagaagttaaatctcactccaattcagagaacccactcaattaacaatattattgaatataatgagtgtggaacatttttcagtgaaaaattagtccttcatttacaacagagaacacatacaggagaaaaaccttatgaatgtcatgaatgtggaaaaaccttcacccagaagtcagcccacacaagacatcagagaacacacacagggggaaaaccctatgaatgtcatgaatgtgggaagaccttctataagaattcagacctcattaaacatcaaagaattcatacaggggagagaccttatggatgtcatgaatgtgggaaatccttcagtgaaaagtcaacccttactcaacatcaaagaacgcacacaggggagaaaccatatgaatgtcatgaatgtgggaaaaccttctcatttaagtcagtccttactgtgcatcagaaaacacacacaggggagaagccctatgaatgctatgcatgtgggaaagcctttctcagaaaatcagacctcattaaacatcaaagaatacacacaggtgaaaaaccttatgaatgtaatgaatgtgggaagtcattctctgagaagtcaacccttactaaacatctaagaactcacacaggtgagaaaccttatgaatgtattcagtgtggaaaatttttctgctactactccggtttcacagaacatctgagaagacacacaggggagaaaccttttggatgtaatgaatgtgggaaaaccttccgtcagaagtcggccctaattgttcaccagagaactcatataagacagaaaccctatggatgtaatcaatgtggaaaatcattctgtgtgaagtcaaaactcattgcacatcatagaacacacacaggggagaaaccctatgaatgtaatgtttgtggaaaatcattctatgttaagtcaaaactaactgtacatcagagaatacacttggggagaaaccctataaatgtagtaaacgagggaaattactctgggtgaagtcagaactttgtagaacacagaacataaagggtgagagaaatctgttaatataatgataatgagaacacctttgccctgaagtcagttctcacagtatagaagagaacttaaagagggaaaaaaaaacaatatgaagatagggaatgcaggaaaacattattctggaatttggaccatacactatgttacaaaactaaaagtggaaaaaacttattggtgaatgaatataggaaacattttgcccaatgccactcttcattaaacatcagagaattcacacggggtgaaacctgggtcagcatccctaggttgagaagggatgcatttttctgctactactacagtttcacagaatacctgagaagacacacttggagaaaccttttgggtgtaatgaatgtgggaaaacctttcatcagaagtcagctctaattgttcaccacagaactcatataagacagaaaccctatgggtgtaatgaatgtggaaaatcattctgtgtgaagtcaagaggccagagaaaatgcacaaactgtaggaaactataggaaagcatttactatgaggttatattttatggagtatatgtaataagaagtagcttctcagtgaacatcagatagtagagaaagtatttttaactgtatccaatgtgtggatgttttaagttaaaatctaaatttaatatagaacagaggtgttgagttgcaggatatctagcaatttaagaaaatgtggaaaaaatatttttattgagaaatagcattttactttgttaatatctagtttagttcattgtcaagactgctattttctaagagacttctaaagacgccactcaagccaatggctataagtagttcaaaggtttattgcttagccatatgaaaaataagggaagattttttagcaaggggacccacaaacaagagtgctcttgtatgtccagaagaaagagaaagaccatcaatcaggggccatagtacaggagcccaccagcaggatttttgaataatcctagggcagactaaattcagacgacccatctcagaatggtggatcaaagcagcaagtcaatttgccttgtatgcaacttatgaggattagtagaagagagtgggtccagatttctggtggtttctgccctgcagatgtctaacacataagccaggacattctgctgtgagtgacttattgtacccaactctatttctctccatactgaaacatgtctttcataggtgatacaactttttaaaatgtatgtgtagatataacttaaatatggagctttcaaaaagcacaaataggctggacatggtggctcatgcctgtaatcccagtactttgggaggctgaggtgggcaaatcacctgaggtcaggagttccagaccagcctggccaacatgatgaaaccctgtctctactaaaaatacaaaaattagccgggcatggtggtgcacatcggtagtcctggctactagagaggttgaggtgggaggatcacttgaacctgggaggtgggggtttcagtgagctgagatcatgccactgcactccagcctgagtgacagagagagattcaaaaaacaaaaaaaagcaaaaatatactttgctattgggtaaggtatagtagttggcagcagaatggacccattgaggataactataaaattacagaaaatatttaaatgcaacttattgctatagaagcaaagaggactaaagggcaaaattctagagagtggtaaatctcagaaagcacaagcataaaatgcagctctgggggccctttccacttctggctatagggaagaacctgaatactgaacttgattcaggcagaggaccataacctgggggtcaggggaaggcatgggggggaccagaaaccagaagaacaatcaagactgcaatgaaaaaaatggatacattaggagcttcaaacacatataatttctcaagaaatttccagatgtctcatgctgcatagggcaggagcctgaaaagctaatttgagaagataataagtaggatttttgttttgttttgcattttgcagtacaaaggagaaatgattagaacttaggaagtgccagtgggttggtgaacatgccatcagtaaaagccctggaaacaaggtcatactagagattggttgtgccttgtcacaactgcaaacaatacctgagtggagtattcaaaaacttgcttagaaagaaaactctaggaacagatggcttcactgaagttattccaaatatttaagaaataataccaggcttttataaacttttctagaagaaaaaagatggaacttttccaattcagtttttgagggcagtacaaccttgataacaaaacctaaaaaaaaaacaacaaaaaaacccataaagctatagaccaaagtctcatagatttagatgcaaaatcctaaaattgaaaaaaacatctagccatatccataaactatatcatcaccaagagatgtttattagggcaatcaaaagatttattattttaaaaaaatcagtgtggacttccattcctctttcttttgattcccccctttgacttttcatgtatctctcctgccttccttccccagagtggaggagttagacttgcctcgtgggatgagaggagttgtggctttgtgtctgctggcaccaagagggctgagggtgaggtgtggaagggacagggggaggagatgggcagcattgttgagagattggtaacactgagcaaataaatatgttgagaatgatgacagcaagatttctccattagagaaggtatttataaaaataggaatgaggagagctagaaaacctggagtgtggcattagaatagaactcatatcttttaaatatataggaacaaataaataaattgttgtgtgtgcacatatgcatatattttgtgttcattctactgagaggacctaaacacaatgacacctcagtaacagtaagcacaccaactgccaagttattagttcctaaatactatccacaaaaaaggggaacagggatgattcctagtcagagattgggagaaatacaagatgagcctgaatcatctcatgtacctgacagtaagaaaatactctggctggtctcagtggctcatgtctgtaattctagcatgttagaaggtcaaggtgggtgggttgcttgagctcaggagtttgagaccagcctgggcaacatggcacaattgtctctacaaaaaatacaaaaattagccaggcatggtggcatgcacctgtagtccgaggtactcaggaggcagagacgtgggaggatcgcttgagcctgggagattgaggctgcactgagctgtgatcgtgccactgtactctagcctggaagacagagtgagaccccatctcaggaaaaaagaaaaaaaaaaagatgtcattcagcaggttaatggataaactgtggaacatccagaaaactttaacattcttcaaagaaatagaaaacacaatcctaaaatttatatgggaaccacaaaagacttagaatagtcagctatcctgagcaaaaggaatcaaactggaggaatcatattacctgacttccaattattcaacagagctacagtaaccaaaacagcatgatactggcataacaacagacacataggaacagtatagacaacccagaaacaaattcatacatctatggtgaccacttttgacaaaggaatgaagaacatacactggggaaaagataatgtctttaataaatggtgctgggaaaactggatatccatatgcagaagaatgaaactagacccccatctcttagcatatacaaaaatcaaaattaattaaaaagttaaatctaagacctcaaactatgaaacagctaaaagaaaacatcggggaatctctccaggacattggagtgggcaaagatttcttgtgtaatacctgacaaacaggcaaccaaagcaaaagtggacaaatgggatcacatcaagttaaaaatcttctgcattgcaaaggaaataacaaagtgaagagacaacccatagaatgtgagataatatttgcaaactatccatctgtattaggccatttttgaagtactacaaagaaatacttgagactgagtaatttataaagaagaggtttaattggctcacggttttgcaggctgtacaggaagcatggtgctaacatctgatcagcttgtagggaggcatcaggaagtttccaaccatggtggaaggcaaaaggggaataagtatctcacatggcaggtgcagggcaaagagaggggggaagggaagtgccacacaaccagatcttgtgagtactcagattttgtgaggggtgcttgaggtcatggatacccatttaccctgatgtgtttatacacatttcatacctgtattaaaatatctcatgtaccccataaacatatacacctactttgtacccacaaaaatttaaaaataaagttaatttcaatgttt

SEQ ID NO: 24023 - DNA, 4999 bp, Homo Sapiens
atggaggagaagcccggccagccacagcctcagcaccatcacagccaccaccatccgcaccatcaccctcagcagcagcagcagcagccgcaccaccaccaccattattatttctacaaccacagccacaaccaccaccaccaccatcatcaccagcagcctcaccaatacctgcagcatggagccgagggcagccccaaggcccagccaaagccgctgaaacatgagcagaaacacaccctccagcagcaccaggaaacgccgaagaagaaaacaggctatggtgaactaaacggtaatgctggagaaagagaaatatctttaaagaacctgagttctgatgaagccaccaaccctatttccagggtcctcaatggcaaccagcaagttgtagacactagcctgaagcagactgtaaaggccaacacctttgggaaagcaggaattaaaaccaagaatttcattcagaaaaacagtatggacaaaaagaatgggaagtcttatgaaaataaatctggagagaatcagtctgtagataagtctgatactataccaattccaaatggtgtggtaacaaataattctggttatattactaatggttatatgggtaaaggagcagataatgatggtagtggatctgagagcggatatacaactcctaaaaaaaggaaagctaggcgcaatagtgccaagggttgtgaaaaccttaatatagtgcaggacaaaataatgcaacaagagaccagtgtcccaaccttaaaacagggacttgaaactttcaagcctgactatagtgaacaaaagggaaatcgagtagatggttcgaagcccatttggaagtatgaaactgggcctggaggaacaagtcgaggaaaacctgctgtgggtgatatgcttcggaaaagctcagatagtaaacctggtgtgagcagcaaaaagtttgatgatcggcccaaaggaaagcatgcttcagctgttgcctccaaagaggactcgtggaccctatttaaaccacccccagtttttccagtggacaatagcagtgctaaaatagttcctaaaataagttatgcaagcaaagttaaggaaaacctcaacaaaactatacagaactcttctgtgtcaccaacttcatcttcatcatcttcatcatctaccggggaaactcagacccaatcatcaagtcgcttatcccaggtccctatgtcagcgctgaaatctgttacttctgccaacttttctaatgggcctgttttagcagggactgatggaaatgtttatcctccagggggtcagccactgctaactactgctgctaatactctaacacctatctcttctgggacagattcagttctccaggacatgagtctaacttcagcagctgttgaacaaattaagactagcctttttatctatccttcaaatatgcaaactatgctgttgagcacagcacaagtggatctgccctctcagacagatcagcaaaacctgggggatatcttccagaatcagtggggtttatcatttataaatgagcccagtgctggccctgagactgttactgggaagtcatcagagcataaagtgatggaggtgacatttcaaggagaatatcctgctactttggtttcacagggtgctgaaataattccctcaggaactgagcatcctgtgtttcccaaggcttacgagctggagaaacggactagtcctcaagttctgggtagcattctaaaatctgggactactagtgagagtggagccttatccttggaacccagtcatataggtgacctgcagaaagcagacaccagtagtcaaggtgctttagtgtttctctcaaaggactacgagatagaaagtcaaaatcctctggcctctcctacgaacactttgttaggctctgccaaagaacagagataccagagaggcctagaaaggaatgatagctggggttcttttgacctgagggctgctattgtatatcacactaaagaaatggaatctatttggaatttgcagaagcaagatcccaaaaggataatcacttacaatgaagccatggatagtccagatcaatgaaggaccagactgcctattcgtaacctttctgcagcattagagccatcgttcatgggggacacaaggcttttatgctcctagatcttcaacgcagcagaggaaccataagtagaatcacaggataatatatacaaatatatatatatacatatatatatatatagttatttaaaaaaggcaactgaaagtaattagacttcttaaggaatcaaatttatttcaagagactacacatggttatttaatctccggtactgaataggttttttttcttctgttagtttttgtttttaagtgtgaatgcaagtgattaatgaatacagacttaacaagtgtggttctaaagttcctgctgtcatcaacttgggcaacaaatgacccactggaaaggcaaatccacttaaaagatctctgtatcttgttctgtgactgaagtgatacactaatcacggggaacccagaatgattcaacattttccccccactcctcccttgatctttttggttttactttaattaagccctgcgagaatgctggataaatgccttgaagttagcagggtgtatttttttagcgaatatgatttgcatgtcttgccaggagttaagcggcctctggggtgttggggaaatactttatttctttccatttattttttgtggggcggggataggggagggcattgaagttctacaattctggaatagttagttgatggtacatagttaacttggcttcggttacatattggactttaacaactgaagaatctatgcgtgtcatttaaagaaaagttgcagaacaagcaattggcttagatatacaatctggaaaaatattcctgtgcccatattttaatgtaattgtataactgggagcaaaaatatattctgcttttcaactgtaggtgctccagacttgctctccgtcactaacactaaatgtgctgttttccttgtttttcatcaaacatttaagacaaacttagacctttctgtaaattatcttttaatttctcagcaaaatctaaaaggggaagaaaaaagtccatgaaaactaaaacttttcatgtttttagccagtgagaagataataaaccctgactgtagaaggtgtgttttcatgcaaactatacttctgagcttgttagcttctaattatatcttaataaatatattttattactagagcaagatgggtttttaaggaaaataatgtgaaattctggaaattttctttggggcagagaagagcattagccctgtcttatcattacattgccatcctgttgcactgcagcttgtgtatagcatgctaaaataaatttttgtgtgtgtgtgcagaaattaagggtccaattgagattgggtgatgttagtaacataataacaagttgtctggcctgacacagcatcacatcacacacacagaaattagtatatccatgtatgtcaaatacaggttaaaatatcagggcatttatataaagagttgtagtcttctgataaaagtagactggatcccctggggtatttggggagaaagtaactactttggctctacccctagaaatgtccagttttgagtgactgtagtatggatgggttttcttgttttgttgattatttgaggcttttaaaacaagtagttcatgaaagaagctgttggactcaacatagagtagagtaactatctttttagtctggatttctgccctgcttagattttaaaagtataagcatggattgccaattccacttgatgtaaacaaaacttttttttatacataatatatatatatatatataaaataacttattgtatcagtccaggttcagaaacttgtggtaggccagttccagatagtttcatttcacctgtaaactgtatcactttgactgatattgtaattttcaaatgtataatatgtttacagatgtgccctgcatttagtctgccttgttcctattttgatttttgttgagtctcctgcctgcttgccaaaagctaggatgcttcaggcccatgtacaattgaaagcagaggcatccttgagctttaaagcattgaacaaactggaaaatgcaacataccacataactgaagtgaaaaaagtctgtgtttttgtgtttttttaaataaaaattttcaaaaagttaaaaaaaaagacatataaggttgattaaagggaaaaaaggctccagtttgttttacaggttttaaagttctgctgtgtgttcaattgccttgtgtaaccacttgtcgccttagggccagattcccctctctagtccccttttttaaatgtccattttgcttgcctggaattttaaagttcttccgtctcacaactcacaagaaactttctgggtttgtgacatacagaggttgaattgagtatatatttgaaaaggaaaaaacaaaaaacaaacccagaccccacctgaattgggctttttaacttagaagcaacacttgattaaacatctttagaaagctattgcttttctaatttccttccatatccctcaggcctcagtgttcagagaagccaaaaagaatgtatcacttctctgtctgtccaaaggtttttgagagtctcacttctaaatgaaacaatgcaacatttcactttgatttctccactgaaatttccttgattatatggttagaggtatgtagttaggaatgtctgttaactttctgagaaccctagtgccccatcatattaactgtcagtattttgggggcattaggttaatagacttaattgcctaggtacaagcaggactttgggacaaatctctttgtgctgtttggtaacacttaactctatttgttgcaatctttctccttaggtcctcacacaattccttacagagcacttattaaaaaaaaatcttaagagtt

SEQ ID NO: 24024 - DNA, 2918 bp, Homo Sapiens
gatggataactcagagctcatcagaaatgtgaccctttgtggacatctccaccatggcaagacatgttttgtggattgtttaattgaacagactcacccggaaatcagaaagcgctatgaccaagatctgtgctatactgacatcctcttcacagagcaagagagaggtgtaggcatcaaaagcactcctgtgacagtggtcttgccagacaccaaaggaaaatcttatctcttcaatatcatggacactccaggacatgtgaatttctctgatgaggtcacagctggcttgcgcatctcagatggagtggtccttttcattgatgctgctgagggggtgatgctgaacacagagcggctgatcaagcatgcggtgcaggagaggctggcagtcactgtgtgcatcaacaagattgaccggctgatcctggagctgaagctgcctccaactgatgcttattacaagctgcgccacattgtggatgaggtcaatggattaataagcatgtattccactgatgagaacctgatcctttccccactcctgggtaacgtctgcttctccagctcccagtacagcatctgcttcacgctgggctcctttgccaagatctatgccgacacctttggtgacattaattaccaagaatttgctaaaagactctggggtgacatctacttcaaccctaagacgcgaaagttcaccaaaaaggccccaactagcagctcccagagaagtttcgtggagtttatcttggagcctctttataagatcctcgcccaggttgtaggtgacgtggacaccagcctcccacggaccctagacgagcttggcatccacctgacgaaggaggagctgaagctgaacatccgccccttgctcaggctggtctgcaaaaagttctttggcgagttcacaggctttgtggacatgtgtgtgcagcatatcccttctccaaaggtgggcgccaagcccaagattgagcacacctacaccggtggtgtggactccgacctcggcgaggctatgagtgactgtgaccctgatggccccctgatgtgccacactactaagatgtacagcacagatgatggagtccagtttcacgcctttggccgggtgctgagtggcaccattcatgctgggcagcctgtgaaggtactgggggagaactacaccctggaggatgaggaagactcccagatatgcaccgtgggccgcctttggatctctgtggccaggtaccacatcgaggtgaaccgtgttcctgctggcaactgggttctgattgaaggtgttgatcaaccaattgtgaagacagcaaccataaccgaaccccgaggcaatgaggaggctcagattttccgacccttgaagttcaataccacatctgttatcaagattgctgtggagccagtcaacccctcagagctgcccaagatgcttgatggcctgcgcaaggtcaacaagagctatccatccctcaccaccaaggtggaggagtctggcgagcatgtgatcctgggcactggggagctctacctggactgtgtgatgcatgatttgcggaagatgtactcagagatagacatcaaggtggctgacccagttgtcacgttttgtgagacggtggtggaaacatcctccctcaagtgctttgctgaaacgcctaataagaagaacaagatcaccatgattgctgagcctcttgagaagggcctggcagaggacatagagaatgaggtggtccagattacgtggaacaggaagaagctgggagagttcttccagaccaagtacgattgggatctgctggctgcccgttccatctgggcttttggccctgatgcgactggccccaacattctggtggatgatactctgccctctgaggtggacaaggctcttcttggttcagtgaaggacagcatcgttcaaggtttccagtggggaaccagggagggccccctctgtgatgaattgattcggaatgtcaagtttaagatcctggatgcggtggttgcccagaagcccctgcaccggggcgggggccagatcatccccacagccaggagagtcgtctactctgccttcctcatggctactcctcgtctgatggagccttactactttgtagaggtccaggcccctgcagattgcgtctctgcagtttataccgtcctggccaggcgcagggggcacgtgactcaggatgcacccatcccaggctcccctctgtacaccatcaaagcttttatcccggccatcgactcttttggctttgagactgatctccggactcacacccagggacaagccttttctctgtctgtcttccaccactggcagattgtgcctggtgatcccctggacaagagcattgtcatccgccccttggagccacagccagctcctcacctggcccgggaattcatgatcaaaacccgccgtaggaagggcctcagtgaagatgtgagcatcagcaaattcttcgatgatcctatgttgctggaacttgccaaacaggatgttgtgctcaattaccccatgtgagtgcgtggactcctgggagctcctgctccctacagtgggctgcaactcctgtacttgaagctgagacctcatatgacgtggccttcgtgttgtcagagagtgtctggaagctgctgttgccatcttgaacaactcaccaacctccaacccagagccccagtgagagaggagcatttggcctcctgcttccttctgtggcctctgccgggctccattcccaaggaaaagagaggagcttgggctcacagaaagagaaggggatgaaaccccaaggggccctatctttgggatttacatggaattttattttctacaagtttgaccttagccatggtttgcaagtgaacagaacattctgaaaaag

SEQ ID NO: 24025 - DNA, 2636 bp, Homo Sapiens
ggaaggagcaggaggcagcccaggcggagcgggaggagctggcagcggggcgcatgccaggcgggggtcctcagggcgccccagccgccgccggcggcggcggcgtgagccaccgcgcaggcagccgggattgcttaccacctgcagcgtgctttcggaggcggcggctggcacggaggccgggctacatgagaagctcgacagggcctgggatcgggttcctttccccagcagtgggcacactgttccggttcccaggaggggtgtctggcgaggagtcccaccactcggagtccagggccagacagtgtggccttgactcgagaggcctcttggtccggagccctgtttccaagagtgcagcagcccctactgtgacctctgtgagaggaacctcggcgcactttgggattcagctcagaggtggcaccagattgcctgacaggcttagctggccgtgtggccctgggagtgctgggtggcagcaagagtttgcagccatggatagttctgagaccctggacgccagctgggaggcagcctgcagcgatggagcaaggcgtgtccgggcagcaggctctctgccatcagcagagttgagtagcaacagctgcagccctggctgtggccctgaggtccccccaacccctcctggctctcacagtgcctttacctcaagctttagctttattcggctctcgcttggctctgccggggaacgtggagaagcagaaggctgcccaccatccagagaggctgagtcccattgccagagcccccaggagatgggagccaaagctgccagcttggacgggcctcacgaggacccgcgatgtctctctcggcccttcagtctcttggctacacgggtctctgcagacttggcccaggccgcaaggaacagctccaggccagagcgtgacatgcattctttaccagacatggaccctggctcctccagttctctggatccctcactggctggctgtggtggtgatgggagcagcggctcaggggatgcccactcttgggacaccctgctcaggaaatgggagccagtgctgcgggactgcctgctgagaaaccggaggcagatggagctggaaccaattgctttggatccaccatggaagcctcgacatcctgaaccaaactcctattaatgaaacttcccaaatttaaacaaagcaagacaaatagatatccacacagcgtagatcatgacttctttagacatcatgaaaagaaaaagaggacccacgtggaagaatacgctcatttatgatcagggtagcatcatattcctctcccttttaacattatttcaggatagcagctgtctggatgctggccatgggcttgaaaaaaaccaggtgggcatttctgcccactgtaccgtttctcccatgcgtttcccagtcccctgtcatggcatgaaaaaaccgctattgttctgtgttgggacaattagatttttgtaggggggagaaaccacccaaaagcaaatggaaaaatatgctatgattaatgtcagttacgggaattaaacttcggaggcctttaggacaattatgaaggaatcattttccccttggtggcaatatgtactacagttgtcccttgatatccatgggggattaattccaggacgcctgtggatacagaaatccacgtgtactcaagtcttgttttcagtggatatgaaaagtcggccctccatatctgcaggttttacacttggcgaatgctgtatttttgattcatgttggattaaggatctggaacccctgatacagactgtatttattgaaaaaaaagtctgcctatgagtagactcacatgttaaaacccgtgttgttcaagggtcaaccataactgcaggcagaacatctgggcaggaagctcctgcaggaagacctgtaaactcaggtctgtggaacggcgatgatcttcttcccttgcttccagaattattgctgtgagatcaggtgcactggctacgaccttactctttgtgcagaacttatttctggtctggtttaagtgaacgttattctttctgtgcagtcctgtggttacatcaaaggttaaatttcatatagcatgtctgttatatcagacttctctgatggcctgtccagagcaaacattttaaaatattggtcctattctgtcttataacagtctgctctggtgatttttgtctcatcaattggattatgacactgtcagccactgttagtgttattctcaaattcagtcttccattcatctctccttcccttccctggcagacagacttctgcagccactgggactgttggggtgaggaaaggcaagaaccgatgtttcattctctccctcccttcttcctccctcttttttgttggttgtggggtgggctacatcttcttacccaaacaaccaggagcatttgttggcaagtttattgtgcccagtgccgatgtctggacaattaattccctaggtcagtggctttcacagtttgtgatggtgactccaggaaggaaactcaccatgaccctgtatatacatagaacaaaaatgcagcccactctgatattgtatttgttctattctagttcattaaaagtgaatgttggtcttcatccttt

SEQ ID NO: 24026 - DNA, 39160 bp, Homo Sapiens
acactgctcatcaacaggtactaaaaattacaatgaatgaagtgaatgttgctttgaataaatgtatacaattaatatgagtctggatgtggattcatgttagtccatttaaaaaatattaagaaaaacggtcttttataatgtttgagaagacttgtttatttaaatatttatttatttttaaaagactagtcaagtggaagtggggaaagagtggtacaacgggcaaccaactgtgaataaccaattgagacaattcactaccttgggaccagccaaagcttgctttttaaagtaaccttgaaatacataccatattccatattatacaaagctttacatattgctcttagttttgaaatagaaaaagaacttttgaagagaataagaatcataaaactaggtctaaaaattgtaacacctgttcttcataaaacatatataactttatttacattaatacattatttaggaggttcaagcctttaacataacccttcccattaatctataactgtaaagagttcatgtatatttctcattttctgcacatatgtattaatgtaaaaaatttgtcctgccgtattttttttagtcaacaattatctggagcattttatcagttcgtgattcaacttctaatacatatgtcgcttaagagtaaaaagcccctccataacttgaaaacatcttttttttcttaacctgaaataggcttaaattctcacattgtcagatgagtcttaacactttagtatttgctaaatttagcatattaaaaatttttaaaaggagtataagggccctaaattggaaaaaaaaactctactacgatcataactgtgggatttcatttccagttcattctgtcagaatcaatctaaagtccatgtaatgtaaacagttcgaaaaaagtcttaaaaatgaattgttgactttaaacacacaatcttcggagccgctcacaacgtccgtagaagcagactcctccccgctcctggggaaaaccctgcctaatatttataacgttatgacatactgtaatactcacaaggtggttgtagaagtataaacacgactggagttatctgattggctgctggtgatgtaacacccatgtcaatacttcccagtgaacgcacgtgttcgaccttttatttaaatttccatttcatcacagcaataagacactcggggcggtgcattttctgtgaaatgactactgtccggggcccgaggtgctgcctcgcacaatgcatcaaaggaggttgtgtccgtggtcgtaacctcttcgcgtgaaaggcaccgcctggtccagtctttgtgaaggaacaaaataagttcacttccttgggcaccgccacccaccctcagcaaatgacaaggctggagcgcagctcccaccgcacagttatttgcaaagtcccaggtgaactcgtggcgagagaaggaaaatgcgcgtcccgggcgcgggtaggtgcgtgtgggcagcggggaggcggccagaccctgacactcgccagctgtttgtcctccgcgtagcccggccccggccgcacacgcccgccccctccctgagacccccagcccgccgcccggccttttgtccccaacccctcggccgacttccttccccgcggccgcacccccgcccccaggccggaggcgcagcccagcccctttcccggtcccctggcgcccccaccccaccccagcccagccccaagcccagcccccctcccccagcccggcccccaccctttccccctccagcggttactgctaccccggtgcattgtgggcgcacggtccgttgttcatttgccattcgacctccgccagggcctggtcggacggaaacgctccgccggctttattgtcgcttcgttatgtggcggagccgagcagtttagcgtgcctctcaccctcagcgcctgcgaagccggcggcggcgtcgggactcctcggcgcgcggaggaaggatatctgtgtggaggatcggtgtgtgcgcgcgcggctttaaagagggggcagcggagggtctccccgcactccgctgctcaacttcgaaggcctcgctcgctgcaggctcgctcctcacctctccgccgcccgcccccttctccgcgcgggacgctgcccggagcgcggcggggcgggggtggaggacgagagagcggtcggaggcgtcggcccggcagcggcagcggcagcggacgcgtgcagcagacccgggagcgagcgcgagccgggctgccgggcgagagggcgaggccgagccccgcgagaccggaacgccgggggcgggggcgagacagagggggagccgcggggagcgcgcgggacgcggcccgaggccgtgcgcgagccggggcaccgggcggcggcggcggcggcgcgcgccatgtcgttcagtgaaatgaaccgcaggacgctggcgttccgaggaggcgggttggtcaccgctagcggcggcggctccacgaacaataacgctggcggggaggcctcagcttggcctccgcagccccagccgagacagcccccgccgccagcgccgcccgcgcttcagccgcctaatgggcggggggccgacgaggaagtggaattggagggcctggagccccaagacctggaggcctccgccgggccggccgccggcgccgccgaggaagccaaggagttgctgctcccccaagacgcgggcggccccacctcgcttggcggtggcgcggggggccccctgctagcggaaaggaaccgtcggactctggccttccgaggcggcggcggcgggggtctcggcaacaatggcagtagccgcggccgccccgagacctcggtgtggcccttgaggcatttcaatgggcgagggccggcgactgtggatctggagctggacgcgctggaggggaaggagttgatgcaggacggcgcgtccctgagcgacagcaccgaggacgaggaggagggggcgagcctgggcgacggcagcggggcggaaggcggcagctgcagcagcagcaggcggtcgggcggcgatggcggggacgaagtggagggcagcggtgtgggagctggcgaaggagagactgtccagcacttcccgctcgcgcggcccaagtctctaatgcagaagctccaatgctccttccagacctcctggctcaaggactttccctggctgcgctattccaaggatactggtcttatgtcttgcggctggtgccaaaagacccctgcagatgggggaagcgtggaccttcccccagtggggcatgatgagctttcgcgagggacccgcaactacaagaaaaccctcctcctgaggcaccacgtctctaccgagcacaaactccacgaagccaacgcccaggtacagtatatcctgctcctacttttttgagatcttttagggaaaggtttatcagcactcccttcacccccacccacccccgaaaaaaaacctcaaaaccattttcctgggtgaagacatcgttccagttgagaggtgcgggaagcttaggcgtgggggtttagaaagcctgggaacaagttttataaaagttctgtatgtgttgtggggggaaggggatggaatgacaattgtcgtggcgctggattttcttttttatgactcatttcttatcagattgaatcaaaaagaaagtgaggttgaaggttttaacctaaaaggctgactttgcggtaaaaaaattttattagctgtgattttagagaagctggtctatgctcacagacgtttagtgtgctggtcgaagtcaaatcgggcaactctttgaagaatggattaaacagtttacctttaaggctacccctttcaggaaaacgtccagccgaaaaaattctttatatgaaatcaaaataatgtcaagtatgagagcagtatgtaaatgtagagaatgctatttggaattccttgctcttgtgaataattttactaaattaatctctgttgaactttcttactacggcttggttttggtaaattattgtagtttttacttgtttacttttactcagatttttgtgctgagatttctttttgtactgttccttttcagaaagatttttaaatgcagtttccaataagtactttaagcttagcattagaaatgtttaatgtgtagttatttgtatcaagtagtggatttggattggtagggaatttatttaccaaacaccgtgaaagtgcttacaaaacaagtaagctgtattttagttcttagtccttgttttaacatttccagtctaaagatagtaagccttactattttgataatctgtgttcaagccaaacagatgttgatcagtcctcctttttgactttaaggcaacctgtggtggtggatggaattcattctttcgtattggttagccagtcgttgattttataaagttagctcttagtattctgtttattggaatgattctgccgttcagcacacttaccctggggttaattaggcgcaccagtaaccccacagacacagcacccatgtttctcagaagttagggctttaactttaaagcacagggtgatcccccgcccccgccccagtggacaatgtagtagggtttttgttgttgttttgcacacattttagttgcctaagccctagaaggaaggtcatttaaagatacaaggccgagaaaggttaagtaaatagtcctaagagtctggggtgacccaactgagactagagcctgtaaggaatgtcgtaatggaaaaagaatggatttggagtaaatctgggttcagatctcagctttctgcaattaactagctttgtgagcttgggcaatagagtgaaatggaactaacagctcctggttttccgtgtgccaaacacatttattctgcaaagtatttattttttgttcccattttacagaagaggaatctaaagccttaaagggttaagtaacattcctgaagttatgtagtaagatgatggagttgcaagggacttgtgaaaatgaaagtttaattttccaaatagggctatgttggttacttagaaaattttaaatgggatgaattttcttaatcggctgtggaccaattcctctttatcagcatagtctctccctgtaggcaaatctgaatgggaatgcaaattataattagctcctttagtgaacctgaaatcagaagaaggggcattaattggataaccttaaggtagcctcagcttgagtgtattcttctcctctgggtatgtatctgcgtcttggaattcctaggaaaaacctttctaaacttgacccgaactacgactctcttcctcatcactcctttaaattcccccatcaatgtaatctgcaggccatctcctttctttgggacattctatacaatatacatatattaagggctacagttttagtaagtcctgtgtgtcctaaggttatatattggtctccttgattggattttgggtgttttcactttgaattgatcttaatcatttattactttcattataactaatcttgaggggatatcttgttatcaaccccccaggtaccacctatataaatacctgtttgtcttaacatgagtaacatgagtaacaggttcctgatctcttttgggcagagtgcaatcattttgtttttcgtttttcttcagtctccaattacctataggaggcagtataacacaacacgtaatgtaagcgcctacttgggcttaaggtcagaggactttgctcttaaatctctactttttaggcaggcaaattagttaacttctagtttcgttatgtatgcaaagtatatgtgccagcataaaaccacttagtgccgttatttattatcattattacctttttgttttgtttttttgagacagtgactctattgcccaggctggagtgcagtggtgagataaaggctcactgcagcctcctgggctcaggcatcctcccgagtagctagaactacaggtgcgcgccaccattcctggctaatttttaagttttttgttgaaacgggagtctcgctatgttgcccaggctggtctcaaccttttgggctcaagcaattctcccaccttgacctccccaaaatgctgggattacaggtgtgagccactgagcctggccgttattactcattttgatcaccaatcagttctcctttttataccttcagagactttgtggccatcaggttctttgaacattctgagcctatttctcatacatgcagtttttctcagcttcacaaagacactcttaatatcttgtcttaaaaacatggaaatgagagttttagaattctttaggcaagaaatcactttgagtctaggagtactaaactcctattttcccaattatttctcaaagagtcccgtttctgagaggaatttggccacatcttaacacagtcatgtactgcatgacgttctcaaggatggactgcatttatgataatggtcccataagattatagcggagctgaaaaattactatcgcctggtgatagcgtaaagttgtagcgtactttgttttgtaatcccagcactttgcggggccgaggtgggtgaatcacttgaggtcaggagttcgagaccagcctgaccaacatggtgagaccctgtctgtacttagtgtagcctaagtgtacggtgctcataaaatctacagcagtgtatggtaatgtcctaggcctttcattcagtcaccactcactgactcacccagagcagcttccaggtatgccagctctgttcatggtgagtgccctataaggtgtgccatatttttactgtacctttttcatgtttagatagattagatacacaaatactattgtgttacagttgcctaaagtattccttacagtaacatagtgtacagatttgtagtctgggagcaataggcccaaccatatagcctaggtgtgtagtaggttataccatctaggtttgtgtacgctaaggcacagtgacaaaatcgatgcatctctcagatcatatccctctcgttaagtgatgcataactgtatgtcatgaaaggttactttcctctaagtaagaaaagtatctttttgttaatcccttggtagttaccaaaaagttaatccttctgttaattggaccttggttattgtggactgttcatgggaaagtcttttaaaacatgctttctgagtctgtgttttgagccttctatttccgaggtgtccctgtatttataaggatgtgagggacaattaatagtttaattttgagtaacaattgactacatcgtcagagtcaggtttaatgattagctcattcagtatctgaccatttggcccagaagactttaaaattccttaataacagtgattaccagttattcttggtttagaccactttctacctaattgtgaaattttcatagcctaaatcacacatcctgtcaactcttcctgggagaaacatgcatccaaatgtattattgttgtaaatttagttaacctttacagaaactaagtaatgaattcagaccagtgatctgattgaaatttccagttggaatatattgatgtcagtagctgagcaaacaaaagaatgtaaggcagatctatcagcctaatttgtttatggcagaaataagggcggaaggttggttggttggttacttggttggtttttaacactttaggaagaaagtctgaaagacctttcactgaggaaaaatcgattagagttgagcctgtagcccattaaattccgttgtttcttatttatatattttacattatttataatttattctttgtgttttattcagtaacagctagttcatagcccttgtgcttttcaaacttgttagcagtgtctgactgtataccttattgtgtacctaggattagcttccttctccatcttaaatttagctgtattaggttggcaaagcactggagataaaaatctgtatgttttgttaacattcattctctctgccctcaaggaacttgtagtttagtaaggagagacagacatgaccgaaaaaagacacagataacatggtagcagtatataatcagggtacattgaagaatttttttttttttgagatggggtctcacttgtcacccaggctggagtgcagtggtgtgatctgggctcactgcaacctccgcctcctgggttcaagtgattcttctgcctcaacctcctgattagctgggactacaggcacatgccaccatgctaggctaatttttgtatttctagtagagacggggtttcagtatgttggccaggatagtctctatctcctgatctcgtgatctgcccacctcggcctccgagagtgctgggattacaggcgtgagtcacgcacccggcctgaagattcttaagggagtgatcagttctacctgcaaaggttggaagaagcttgtacaactgattcttgaattttaattgcatttaattaataggtgttgaccaggatggggagggcatttaggcagtgcaattagaaacagcctaaggaggagccaggcgcagtgagtggttcatgcctgtaatcccagcactttgggaggccgaggtgggtggatcacttgaggtcaggacttcgagaccagcctggccaacatggtgaaaccccgtctctactgaaaatacaaaaataagccaggcgtggtggcaggtgcctgtaatcccagctacttgggaggctgaggcaggagaatcacttgaacctagcaggcaccccactgcactccaactggggcgacaagcaagactgtgcctcaaaacgcgcgcgcgcgcgcacacacacacacacacacacacacacacacacacacagcctgaggaaagtgaagaatggtatcttagagaagggagagtttggttgctgtgcaggatgaaaaatcaagtttgaatagatagactggaggtcatggaggatctcttgtcatgctgaaaacattaaattttattgtcttaacaaatgggcaacaatagcagttttaagcaggggagaatcattatcaaatgtgtatgtgtttcaatctagaggcacctgcgtagtgtgtatgtgggtttagagtttgaggagagaactggttggcaggatgttataataacctgaataggccgggcgcggtggctcaggcctgtaatcccagcacttcgggaggccgagggggatggatcatctgaggtcgggagttcgagaccaacctgaccaacatggagaaaccccgtctctaatttaaaaacaaaacaaaaaaaaaaaaccgagccgggcgtggtggcgcatgcctgtaatcccagctactcgggaggctgaggcaggagaatcgcttcaacgcagaaggcagaggttgtggtgagccgagatcgcgcccttgtgcttggacaacaagagcgaaacttcgtctcaaaaataaaaaataaaaaataacctgaataaccatcgtctgtctgctccctaacactcacaggattagaatttctggggatagtacttaagctaccaaagaggatgccatcactcagagatatagaggtgatcagaaaactgcaaaagagaccttcttgtctttttctctaccaactgttatgatttgtcattgccactagcatgtatttggcaaaacttgctatggccttgtttgtcttccttctataaaatgaatttgttctaaaatttggaaatagaaattactgtttttgttctttcagtatattccagtgggttgctgcagagtaatatttttatgttttcaatgcttttagtttacacttaaatgtttgtgttggaaatgtcttttctgctaattcagttattggaaaagggctgtaattgagtagggtagtaaatactaattgcttgtttctttaactgaataacattttcctattgttaacggattgactacaggtgtgctgtttgactttctattacttgtaactgaagttagcctctcttcctctacccccgcaaaagtgtaggagactgggtgatggtcttgtattctctacaagttggtggcgttgtttaggccccaagctggaatgctgatgaccctatgattctctccctccaccctttacatctgttttatcatgcaagttctgatgatttttagactatttttctaggctctgcttcacacctcattgacacctatcttccctaattaaggtcttttttttctggcatgtatgttgccctattaacagtagctttccagagggtacatggctcacacctgtaaacttagcactctgggaggccaaagcaggaggattgcttgagcccaggagtttgagacaagcctgggcaacacagggagactcttatctctacaaaaatttaaaaaaataaaataactgggcgtggtggcacacatcttatagtcccagctacttgggagactgagacaggaggatcccttgaacccaggaggttgagggtacaataagccatgatctaaccactgcactccagcctgggtgacagagtgacactgtctcaaaaaaaaaaaaaaaaaaaggaaaaatagctttccaactgatcacagtatctgcagtcttcattccctgataataaatctccaccttgctgccataggcatctctcctctttgctatttcgattatatcactgcttctgaaaactctgtaaggtgcctatagcaatggttctaatatttgggagggagaaggggattcaaatctctctctctctttttttttttttttaaggagatagggtttctctatgttgactgggctggtcttgaactcctggctaccagccatcctgtcgccttccaaagtgctgagattacatggcgctcttgtcaaaatggatggacatttacctctgaaatgtgcccaagtgcatatttgcattccgtagggctttttagaaaatcacattgaagttcttttacaaatcttaacttttgaggatgctatagaccatcttatgtttttttaaaatgctgggtttttgttttgttgttttttttttttttaaatgccgtcgcatttacttgaagtgctcatccacccatcccactcttggatcctttaaagctctgctcaggtcttgtttcttcgaaaaagcatccccacactttaaaaacaaaaaactggattagatacacatgctttctgctcttataacaccttaagagtcttacccactaacagtaacttcaaattagcaactgaatcattttgcttcctagtgtagaccctggccaaagtaggtattcatttaatgtttattaaataaatatgtaaagttaggacttttcaagcattttcctttgagtaaaatatttactattttgtagcctatgttctggaaatattgaacatctagataataggttataaggattttaactaactggacacttacctatattttctaaattttggaagacttgatattgaggtctcatccagactaaagttttactaaatggcatctttacaaataaaaaaattcaagatttcatatttagctctgaatgtctgtttctttaaaatctccttgtttagccagtttagactaatgtctgagctaattgtgttttcctttttgggagagaggttagaaaaggtcactacatttgaaaagaccagttgtggaaatagtaattttttttaacttatcagtgatatctgatgttatcagtatactaaaagtggacatagaacgttaaagaaggaaccaaagaggcaaagatacctggagttattagggacctattttgagattttgtctctggcactaagaatttattaatttattgagtttagcaaatgatattggcagtttattttagtgctttgtgcttatttagctctttaacccaaatcctctaataatgatctccttagagagtacacatactcttggaaatgattcattttttttgaaggtcatatttatttatgtggtttcttttttttttttttttgaagggcatatttaatagctgctgcaaacatatggaatagtgctttaatcagtggtgaacaagaaattgctgttgttggttataaaaacaagggacattaatgttcttgttcttgtaccatagtaatgagaaaaaaaaatagtggttgaatggtgtttaatttgtacagtttgtgtcaaagtagaatgggcagatattttggtggataggcttttgtcttagttataaaaattaggacatttggtatgataaaggcagagaatcttaacaattggcactggcccagaaaattcagggtgcagtgaccatagcgtgttatgactgctacagtaggcatagccacctcctgaagtgttttcaactgcttgatatacggactttaggcagttcttgacttgtacatgctaattcactgcttccacaaacagttcatagatatatgctgccagatatttagtgttgaaaacttttgcttcttccaaatattcatacaatattcatgcttttactataatatatagtagattgaacactgaaccaaatgagcttgggttcaggtacagcttgtgtaacaaagcttttagtgttgggcctgtatcaaagcaagattcttcccccttatttgtaatttctatagagagcataggcaaattaataaaatttactcagtctcaaaagggaaaccaagtaaacagaatgatgcttttgtggaaagttacactgtccaagtaattgttacaggtgtttttagtatcattctttacattttcacacaagtcctaaattgttcattcctctttgctacatgatacgaaatttcacaacatactggttttttttttcttttaaccaaatatttgcagtaatccaatacaacatactggtttaatacaagagcttaggttaaataagtctcattattaccttatttcctttctccagttccccaaaaacaaaaataagggtattactcatgaatggacttgttttgattcctctatccgtgacttaacagtttttgcagaattggatcttttggtaggaggagaaaatagctaatttagagcatggaacattattatatggtgggggggggcatgggtgggagttttttggtataagggctttatgcacttggcacaagaagggtatgggaaggttgccaaggatcagtcaaaaatgaggaaatttctctactttgtgtgcttcattctgtagtgatcatatactccagattcgtagagtttttcatactattccattttcacagtgaaacagttgaagtgtgtcctggaatctttttttttttttttttttttttgagacaggtctcagtctgttgcccagactggagtgcagtggcatgatcttggctcaccacaacctctgcctcagcctcccaagtagctgacattacaggcgtgccccactactgcccagctaatgtttgtatttttagtagagacggggtttcaccacattggccaggctggtcttgaactcctgacctcaaatgatctacccacctcagcctttcagtgctgggattacaggcgtgagccaccatgcctggccatgtcctggaatattatttgggttctttcagttgacttctcatacctgggagcagcactataatttttagatggactgggttagtttcagagaattgagatgacagcgtctgtggcctcctgtgacatgcacccaagtaaagctaaaatttttatgatttagccatgcacatgattgcattaagtcatgtttcgtgattgtttagggatccaccatttaggatattgtttgtgagactacttttgcagtctcgtcatctctacaccactaactctcttctaagcatgtcagtactttgagcctgtttacactctagtgtttatttctccatgtttttctccatgctcgtaaaatcatagatccatacatatgtgtatatattttattattttatagaaatggtctatgtttaacttaatattttgtgccaaagaattgacacttgaataaggtcagtattttcagttatcttttctactagaaatggtctaagcaatttttctcttgggaaagagatgattacttcatttgtttagcaaagtgtggcaggcactaatcaaagtgctggagggatattcagctctgccttgagggagcttacccacctagtcactgtatgaggaaagtcataaagttttaactaacatttgtaatactgacttatcgtttaaggaaaaggctcagggatagtgactttccaaggacacgcagttaatggctgatacagacagcattctgaattctggatcatacttttattcttacgattatatcacataattttaattgtgacgccaagtagaactataatgaatacctgtatgataagaagcaaaatttataaacatttagaattttgaattcaggaattttaatttaccttacagtttatagtacttatgaccctaaagagataaagcgttttgaaagttgataggaaattatataactagatattcctatagttgaagcaaattttccccttagggtcttacctttatctctagttagatttaattaacttcattgacctaaactgtttgattttaatgtttgccaagacttaaaatttacctttttattaatggtagatagggtgatatgcctagcataaaatataacttggatattttaagttcaatcgggggagactgttgcttttctatagagataaagcaaacatttaattcctataagagaaagtttcttttcttaagaaaataattgctctttttaattttaattttaagaaattctcaattcatgttcttagcttatatttgaaacatataacatgatgaatgttatttttaaaatgaaaccctgctgatcttcagtcagatgtgtttgatttttttcttttttaataatagcagtgggttgcaccaccactgttcactccatttcttgattactcacaaattaatatatttgattatcgctttttaaaaacttgataattgttttccttggtttgggagtttttaaaaaagtcaataaagtttaatattaatgttttttatccaattacaggagtcagaaataccatcagaggaggggtactgtgactttaatagtaggccaaatgagaactcttattgctatcaacttctgcgacaactaaatgaacagagaaagaaaggtattctttgtgatgtcagcattgtggtaagcggaaaaatcttcaaagctcataagaacatcctggttgcaggcagccgtttctttaagactttatattgcttttcaaacaaagaaagccctaaccaaaacaatactacccacttagatattgctgcagttcaaggtttttcagtcatcttggacttcttgtattctggtaacctggtgctcacaagccaaaatgccattgaagttatgaccgtggccagctatcttcaaatgagtgaagttgttcaaacttgccgaaatttcattaaagatgccttaaatataagcattaaatcagaagctccagagtctgtagttgtggactataataatagaaaaccagttaatagagatggtctgtcttcatcacgggatcaaaaaattgccagtttttgggcaacacggaatcttaccaatttggcaagtaatgtaaagattgaaaatgatggttgtaatgtcgacgagggccaaatagaaaactaccaaatgaatgacagtagttgggtccaggatggatctcctgaaatggctgaaaatgaatctgaaggtcaaacaaaagtgtttatttggaataatatgggctcccagggaattcaagagactggcaaaacaaggaggaaaaaccaaactacaaaaagatttatttataatattccacctaataatgaaacgaatttagaagattgctcagtaatgcagccacctgttgcctatccagaagaaaatacactactcatcaaggaagaaccaggtaaatattatctatacaaggatacttccttgttcatcctaattctagttggatataatcttgaagtatatttttaattgaattattttagttataaagtaatactaaagttgtttacaaaagaagggggaacgtcattcaaatgcataacatatttggtatattttctttgtcttttttcaacacatatatatgtgggtttatcaaaagatgtattaatagccaggtattgcatatattgtcaaggaacgtggactctgctgcatgtacgggtctttgactttcctcatttttagcctctgtgctcactattttatacccagtgttgggaaagatagaatctttagttgtaatatataatcactgtcgtttcagagacccccttaaccttttttattttatttttggctgttaaaacatatttaagtgtttcaaagaattttgccaattatgagattatggtattctagtttgtttagggctactgttcttctgttattttttgtttatttatttttttgagtcggagtctcactctatagcccaggctggagtctcactgcaaactccgcctcccaggttcaaacgattctcctgcctcagcctcctgagtagctgggactgcaggtgcgtgccaccacacccagctaattttgtatttttagtagagatggggtttcaccatgttgtccaggctggtatggaacccctgacctcaggtgatctgcttgcctcggcctcccaaagtgctgggattacagacatgagccaccacacctggcctagagcaggtactgttctgttctcaccatagaagctattttgtttgtccactgtcacctgattttcattcacctttgcattcattgcaaagcctctgaggcctttctcttcaatatatttctctccaaaagttccgtaggaatcttagagaatcacatttacagtgggaatttttttaaaacgagaagaccattgttaagtctttagtttaatctggctgtgcatatctttatttgaagaagctcagtgggtttgaggtttcctatgcatgcctgaggcttgtccaccactgtcatacattatttaatgcttgtttttttcacttcaaagcactgtaactgttcagtgtctgatttatacgatggtggtcatctgaggatggagtattttctgttaaaggaatcactgtttttagttgccagagggcaaaatgccatagtaatcctgtgaaatgttcctctggctttttagatttgggttagctttcagtgataggaattttgtgtatgtatgtgtgtgtgtgtgtgtgaaatttttactgtgtgaaaaatcaagtgtgtatatataacgaatactatatatctttttccttgtactttatatcaagttttaacaataaaatccctgagacaatttagttaaatgaagtattaagggtagatagactccttagctagcactttgttttgtcttaatgtagaagaccttgacagatttctcattagagctacgttgtctttgtgctgtatggattatttctgtttaacagtatggtgggaaccctgtagtgtttttaaatacacacacttttccttaaaggaataaataacatcttttgggtgtagcggttgtttgatggtaactagtcagcagtaacctcatttaaaaaattaatgccacatataattggagtgatttaaagaaaagcattaataatgaaccacaatgcatactttcaaagatgacattactagcaatttttatcaagtatctcctagccatggttgtgttaatggactagttctattataaattaattggtggtctaatatgctttatctcttacatctgttttgtttgtttgtttttaaacggagtctcactctgttgcccaggctggagtgcagtggcacagtcttggttcactgcaaccactgcctcctgggttcaagcgattctcctacctcagcctcccaagtagctgggattacaggcacatgccaccacacctggctaatttttttattattactagagacgggggtctcaccatgttggccaagctggtctcgaactcgtgacctcaagtccacccaccttggcctcccaacatgttgggattacatgggtgagccaccgtgcccagccgtctcttaaaaaggattattttcatttcattgataccagtttggtatccgaaccttgcttaactcacaaatttggttctatccatgccaccagtgttatttggtggaaaaaataaatgggtctcaaaagagcattatggttagggtatataatatgatatagaaccaaggactggtaaatttttactgtaaagggctaaaacagtaaaaaaaaaaaagactttcacctttgttggtcataaaagtcagctcatcaactctgccacttgtgacatgaaagcagtcatttgtactatgtaaacaaatgaaggtaggtgtgttccagtaaaacttgccaacccttcgtatatagcagtggttcttaatcatgggtatgcacgttggtatcacttgggagcattacatgccgtaaagggtctctcttctgtggattccaatttaattggtatggaatgtggtttggatgtggaattttttttaaagttctacaggtaattttatgagttaaggctgagatcagcaaatattactatattggaaagagcctaaattgagtcaaacataatgaatttaaaatttaaaaataagctgtgccacctaccccctgtagtccatgatcaaattaagctcttgtcctcagtttcctcattaaaatattgtgttgattttatagaattattatgaaaatgaagtgacaaatatgaaataactcttggtcatggcaatcctccttaaacttggaaaagactattgaggttattcatatcagttttccggtgctgtgtactttctaccaaatgccagatagatggtcttagcctcagcttgattttttgactgcttgtaaagacttccctaagcagcttccagtgtaggatgactgattattaggtagtcattttaaatgtagccaaaatttgcttctctataacttcctaattctgtcgttgggaatagtgtaatttattatttatttatttatttatttatttatgttttttgagagacagagtctccctgtgtcaccaaggctggagtgcagttgcatgattttggctcactgaaacctccgcctcccagattcaagcgttctcctgcctcagcttcccaggtagctgggactactggcgtgcaccactgcacccagctaatttttgtattttgtatttttagtagagggtttcactatatgttggccaggctggtctcaaaaactcctgaccacaagtgatctgcccactttggcctcccaaagtgctgggaatacaggcgtgagccactgcgctctgcctggaatagtataatttaaacctaacctaattcctctaatctacctgataacccttcaaatgttagacgtttaaagagtcctgtttttgtaggctatgtgctcttctgcccatcttgtgatgaatacacacaatttactctttccaggcaagttctgaccaatatagaacatagcctgtgtttaccaacgttaaggccttcccaaggtcattcagctagtaagagtagaaagaggcaggttgcatatttaggactatgctgcatgaaaaccttgaaattaactactaaagtagtagattcctatcttttttaaaaaattagttccttttaactttaaaatatttttatgatccccttcatcattagttatgctttaatttccatttattgagaaaacagttgtccatgaaataaatgcttttaaataaatttgaagttctatagcaaacatctgaaaagtcttagtgaattgttcaatctgcaaacaatgcttggcatgtttggatttggcgggggtctcttctagttactgtgtcttccctcaggtcttcagcacagagtttgtaagatacagttctaataacgctgtcttgtataatgttgaagcttttgtttgggtgccttttaaagattgagataagaaggtgtacccatagctgcagggtttttattcagatggtatttttttatcttgaaattaacatatttgttgtttgactcactacagagtcatatttgttgtttgacttcacttcagatcatttcttttacacaagaatactttgaaggtagaactcagaaaagttagaaatttctgtcctaagagaatatgcacatactgggattatggaataattaaaactgtcagcaaaaactaaaatctgggtaatcaaataagggtaaaaatgatgtcgtgagtgaattgctctgataatgtaaaaatttcaaaatccttgtcttgctgatttgcaaccaggaaacattaaattttagccaaataaagtagataacctgagattagaaattgaattacagaagtacagataactagtgcctaaatttgttttacaacgtgtattcacacatgttgtgtcccgtttaactagaacaagtcaggtgttaatctgattttttaaaatcactttattttgcgggctcatggaacatggttttctgagcctagatttttaaatttatacctgtcatactagcaacttctacctattataaataattttactctgtatgtacgttgcatgcatacataccttattttgaaatgacaaaagaaacaaattagcaaaataaagtaaaattggcaaagaagttaagagtgctcatcatggatataaatgtggttgccctaattaagcttttaattggctctaagatacaaaacagccttactcaaaagagaaaaacataccagttctaccaggatgacaaacttcctggtactgacttctgaaaggaatttctccagtgggatttttttatgtagttgacaccaagtaatataatggacagtttccttagatgttttctagtaaatgcagcagtcgattattatatttttaatctttgccacaagctgatgtagttctatgtaaatgattttttttccttatgccatacgaatactcaaatgtaaggtaattttagttgattaaaagataaagtttagaattcttttaaataacctggaagtttctttcacctagacttatgatggaaaaatagttttgcagcatttttaggtttgcgttaatccttacaagtagagttgaaatcaggtttaagctttgcacttatttgtgtaattgcttttttggtaaaaaagcatacaatttggtactttgaaaactattttgagaaaagaatatccaaactagatagatataagaaatcgtaataaggcatatatttgaggcagagtcttgctctgtcacccaggcggagtgcagtgtcatgatcatggcttacagaaacctcaacctcctgggctcatgtgattctcccgcctcactctcccgcaatcagccacacagagtacttggaactacaggtgggcgtgcaccactatgcctggctaattttttttttttttttttttttttaagtaaaggtgaagtctcgctttgttgccaaggagactggtctcaggctcaagggatcctccagcctcacttcccaaagtgctgggattacagccttgagccactgtgtccagtctaaaatatgtttcaaaaccatgggacatggctttggtgaaggagacttgggctttagattcagttttgccacaatgctagccttgagtgtatcccagacagcctccctaatgggaaagaagtaaaatttctaccttaaaattctgaaatcttaatagttctgaggacccaaagctttttcttaatcattttggcaacaaatcagctatttatatttttttacttccttaaatgtgaatattcatgggttttttttctttttttcttttttctttttttgagatagagtttcactcttgttgcccaggctggagtgcagtggcgtgatcttggctcactgcaacctcacctccagggctcaagcaattctcctgcctcagcctcccgagtagctgggattacaggcatgtgccaccatgtctggccaattttgtatttttagtagagacgagacgggtttttttcatgttggtgaggctggtcttgaactcctgacctcaggtgatccaccccccccccaacccccgcctcagcctcccaaagcgctgggattgcaggcgtgagccagcacgccctgcaaatattcatgttttattgtataaatattagtgttttgtataaatattcatgttttcattatagggtgctactccagaccccacatggggtgttacagtcatagctataaaatctgaaaaattctgcattctaaatcttaccccaagggtctcacgtaacagatttatggatctgaattagtttttattctcttaggagattccgagtgttttgctaaacctcttaggcatcctatggagtatgctatgaaggatgagatgcaagtcagaatttaatttcatttttcattagcaacttgggggggttctaataattagggggagggtgctgaaggccagatgcttacttatgtatttatttattttattttattaagagacaagatctccctctgaggccgggtgcagtggctcgcgcctgtaatcccagcactttgggaggccgaggcaggtggatcacgagggcaagagatcgagatcatcctggccaacatggtgaaaccccatctctactaaaaatacaaaaattagctgggtgtggtggcgcgcgcctgtaatcccagctactcgggaggctgaggcaggagaatcactttaacccgggaggcagaggttgcagtgagccaagaccatgccactgcactccagctgggtgacagagcgagactcagtctcaaaagaagaaaagaaaaaaaaaacagctgggcacggtggctcacgcctgtaatcccagcactttgggaggccgaggcgggtggttcacaaggtcaggagatcgagaccatcctggctaacacagtgaaaccccgtctctactaaaaatacaaaaaaaaattagccaggcatggtggcgggcacatgtagtcccagctacttggggggctgaggcaggagaatggcttgaacccgggagcagaggttgcagtgagctgagatcgcgccactgcactccagcctggggcacagagccagactccatctcaaaaaaaaaatctccctctgtcacccaggctggagtgcagtgatcatagctcactgcagcctcaaatccctgggctcaagtgatcctcctgcctcagcctcctgagtacctgggcacacctacaggcatgggccaccactcttggctaattttttttagatttttaaaatagagacagggtctcgttatgttgcccacactggtgtccagctcttgggctcaactctcctcctgcctcagcctcccagagtgctggggttgcaggcatgagccactgtacccagccctgatgcttatttttaaaaataaataatagttaatgagttatatgatatactaatgcataagaatcttcagtatttaattttaaaagatggtagtaggcaaccatatggtaggtgaaatagtagtctgccactgtttccccttttgctgtgcttactgttgctttccttccctgtatcatacttgacccaagaagtggctacactgttgattattacctgtaagttagaaactctttaagtggtcagaataaagctgaagagctgaagaagtcttatgtgggtcagttaaggcatttttgtgacttcttcctgctgaaggtgttaagttgtctaaaccatataaatgccagtccctgaaagttttttatagaactgaatttttggtttctgatacagacttaatatatagtagggtgaccagatagtgtaaattttcattcaaagctttactcttcagaaatgttataactttctgggaactccaaaatagctttccacatataataggaaatttggaaacgtttttatttaaaatctaaagacactgagcaataggccacataatgtcaagattgaggagtcccttatgcggaacttattcacaatagggtgactgtggggtagaaacatactcagtgccatgtgataaatgttaaaattagattatttaagatgcatgacggggtgcagtggaacagtcctaactgcccagaggagttgggaaagcttcatagagaaggcagtgtgagtggatcttttgttatgtaggagtttgctaggaggggaagaagagcattcgttgacttgcaagatgggaagaaattggaataagtgggtcgaagaatagaaaaggggtagtgttgtggggacatctccaatttcctactaccttgtctataggtataactagttatttttgtattgtaataaattctgacttgttttacagactctgaagtagtgagtggtttttttaactagagatttgatctgtttatattgcatttaagactaaaaagtttaagagcatttttcatggattggaggtggggcatgtactggggggacctgttagggagaaataacagcactttggaataatgcaaggaagaaacagttgagcctagtctaagtaagatggggcagtcacttgtcaatgagtttgcgagtgaaagggaagctattttgagtttaaaaggctgctacaggaactgtaaagggtggtttatataatacatttgcaactgaatttactctccactgaaaggagaaaactgaagagaaaaaatctatacctgtttatgggggggaaaagcaccaaacacatttacttttagttctgaaactgtcaccgtaagagaaacttgtgctaatatgtgtttatatgaaaatgaaagttgagtagatctgagtctgagtttttatacaacttgtttagctgtttcttaaaacttctttcccagggtcttgtctcatatcttttcaagaatatttgtgttctgagaaaatctggattagtctgcacttgcctaatggttggaatattgagaaccacaagcaaatagtcagggaaacctttccaactcagtcttgtttaatttagcattcacaggcaggtgctgtactactcacttcgcacgtgatttggaagggttgctagcccaccgtgatctaaaattcctgtcatgaccaaggcaccaagattagtcttgtctttaatgataccttgttttgtcttgtactttgctcaatattttcatttactaatatcattggtcatgggcacatttttgggaggtagagactgagatttagaccagtcttttaatcccatctcattctttttccactgttaccagattttcaaaaatctatggtaatattttcatttttttttaggagatagggtcttggtctttcacccatggagggagtgcagtggcatgatcatagcttgctgcagccttgaacttgtgggctcaagcgatcctcctaccttggcttcctcccaaagtgctgggattacagacatgagccattgtacccgtccttccatgaatagtacctctcatgaagatattatttaaaatgcaatacatggttaattagagaagtatataaatgtgaattctaaggaggagattgctttaaagtagacaaaaagtattactgtaaagagcaatgatagctagtaccttggtatccttaagattttggagaatatattgttaaataaagggaaggtaataaagtggatgctggtttaacacagagtggaattaatgtttatttttgttcatttcacaaaaagagcatatcaagtatcagtagcaaagtacgtgtgaatatacttctgcactcgtgttcccagcattgcaaattgtagttttttgattgcctgcttatgtgccaggccctgaggcttggtgcttgtgataaactgtcaggaagcaatgtaatacagttactaaatagtgcagacctctgccactagcttgttatttaacctccctcagccttagtttactcattgataaaaagttgaaagattttactgccggatgcatacaatccatttttgttataggggttgctactatctgttcactgagaaaagacatttttttaaaataggagaaatcctacatggcttgtcatttagctctggtcatttgaatattacataccactcatgtacctgccaccagtcagaaaaatagccgtcattttgtgaaaccagtgtgtgtgtgtgtgtgtgtgtgtgtgtgtgtgtgtgtgttttagacaagtgcagtagtgagaagaggggaaaggaaactaatgtttgaattagtcttcagaaaggatttctgctgtttgcaaagaaatcttagccctttttttgctacctttaaatgaagcataagattcccataggaagatgctggatatcacaaaagcaggtgtattagagtttattttgtaatcttgtaattttagagaaaaagatgatgaccaagagttgctatcatgcttcctaatgaagcaaaattcattcgtgtcaattaagtggttggttgtttggtttctattccattcacatcaacatctctaataatgagttgctaggtggtttggctggttttgaataaggtaagcagtgacgtaatatattggttcctgaaagttaagcacactattgtcaaaagattgtcaacttggaagaactcacctgtttttgagatttgtttttgatatcaagaaccacgtagttggtgcctttcaaaagagacacaagacaaatatacttgatatttattttgtaaggttttggctgaggaggtctatacttgttgtccatgtagaattagaaatcacaaattctaatataatactttagggctagggtaggagataggaaatgcctcttaagagttgaggaaagccttcaacaattcactgtagaattttgcataaatagaaacctgtatttggaaacccacttggcagaattgtaagacatgtccttgaacagactgcatttcagaataatgacttttttaaaaaaagattgagaaatctagtgaaattgaataattgtattttttatttttatttcaattttgttgagacagggtctcactcttgcccaggctgtagtatagtggtgtgattgtagctcactggagccttggactcctgggctcaagccattctcccgcctcagcctcctcagtggctaggactagcacatgcctggccaattttattttttgattattgaaatacatttaactttaagaaaacaaaaccactaaatttcaattaaatattttcagttcatgataggttttagtttaattgtagaccaaaaaaccaaattattcttcagataccatgaattaaaactaaactttgtttagtgatataagttgcaaagggcaagactattcaagccagcatttaactctaatacatatatatcccaaagtgctgggattacaggcttgaagccccaccatgcatggcaaacgatatttttaaaagccttttatttatcatgcattatgataaatactaggaaaatacctaaatagtatcctatctagctattatcctagatacctgaacagtatccccgttcttaaggattgggcaaaggagttctgtatctatttactgttatttaatgtggtaccacattaaataacatttaccacatttaatgtggtaccacattaaatacttgttcattgttctgacttccaacccatttactctaagcaataatgctacattctactaatttcaccttacagagaaaagagaagccaacagcctggtggaatatccttaagttctggctttagctctctctatgtacactgcttgtctctgctgtctctcttaagtacccagacccgtgctcctgtatcacaagactccttaggaatcttacacaatggataattccttctcttcgcagcaatatctttagtattctccctttagtgactccttcctgtcagtattcacatatgtaattttcggccgggtgctgtggttcatgcctgtaatcccagcactttgggaggccaaggcaggaggattgcttgagcccaggcattcaaggccagcctgggcaacatagtgagaccctgtctctacaaaaaattacaaaaattatccaggtgtggtggtgtgcacctgtagtcccagctatctgagaggctgaagtaggagaatcggttgaacctgggaggcagaggttgcagtgagctgagatcgtgccactgcactccagcctgggtgacagagggagaccctgtctccaaaaaaaagtaactttcagtttcttaaaaaagaaaaaaatcagtcgttaccctatttctcacacttcccttttatagctaaatttctcaaaaagattgtcagtattttttcttaattgatcatcatctcttcagaacacagaccactcttattttttctgcttgccccacctactcaccagtatcgctcagtaagattaccagtgacatcctaggtgcttattgaatgaaagtgatgtccatttttagccctcatcttgaattctagggagcattggcaaagtggactacttttcccctaaaagtcttttatatattttttgtaactcattaaatgttaggattattcagtatacttaatcttttctcactgtctcatctgtttcactcccatggttttatttgccatctatattctgtattctgacaaaaactgttttttcttttgagttggggtctcactctgtcaccccaggctggagtgcagtggtgtgatttcagctcactgtagcctctgcctcccggactcaggcggatcctcccacctcagcctcccaagtagctgggactacaggtgtgtgccaccacacttggttaatttttgtattttttgtagaggtgtggtttttccatgttgaccaggctgatctcaaactcctggcctcaagtgatctgcccacctcagcttcctaaagtgctgggattataggcctgagcccccacttccagctaagcagtctagctttaattggtctccacttctgaaccaatgtggatgcaccagcaatgttttatacatctagtacttactagttagtactagcagtattgtttgagcgtcaagtaccataattgtaacacttggcttgttatattatccaattagattcctagatcacatctacgatataggtggatgtaaattagggagaaactaaggcatatggtcacatagcctgtaacagaaacaggagtggcacctaatttaccctggttctacagcccattcctaaccagtacactgtactcactgtacatgtcttaggcttctgtgagccttgtagtattgaacacagtagataattcattacttacagatggtactttttatttaagaaacagttccaagaaagagtggtgttttgggtggtggctatggtgtggtttgtagataaatttttctatgtttccttttcagatttagatggtgctctactctcggggccagatggtgataggaatgtgaatgcaaatttattggctgaagctggcactagtcaagatggaggtgatgctggtaggtacagtaagattttagcaacagtacatttaagattgggaagtgttacatcttacctgcagcctagtgtaatttctcttccataagggggttctattgtatataactactttcaatctatggtagctatgtttatgatgactggaaaattggtaaatgcaaattgatgtttccggttttgtatgtttgacggagtcatttgtttagttttaaaaactcctacatataaaaagtaattgagttaatatggcttatggcttcctgctggtatatagatacggaacggaaatggtaattacgataatggttgaatttattttaattagtttttatgcaaaatgatggtgtagttaatggctatagaaaatgttgattagttctgtgtgatgtcagcagtgcattggaggaagcttgatgaatataaaaacaaagaatccatgagtatgttatgaataaaatagagtaaaagaaagtcattctttacagaagaatgccaagctgatagaagaatgatagaattggaaaaatagctattttgcaatccccacaggaaataattcaaagtcatcagtggatgttaagccaccgttaatgggcttgtccccctatgattgggtgaaagattgttggggaatatcatattcacatggtctcaaattattcccatggattcccatagatgatttccacttgcaaaggggaaaaggtaaatttacaataaggagatctgagaaagattgtcataactaagtgattaaacttagtgccattaaaaagagcacaaaccaaaattaagggctggctgatttgatgtgccacctggcatacaacatttcctatgcagtattcttgagaaactgtttagcttgtatctaatgacaaaggaaaacccagacattgatgtatacgacaggtagtccaaactctaaaatgttaatgttacgacagacaagtggggaaaccactagattgaaggagaccaaggaagtaaactaaagtgcagcatggatcttgattagatcatgggaacaaaaaatggctaaagaggacattttggggccaactggaaattagaatatgtagtgtgtgttaagtgatattcagttaattttaaatttcttatacggtggttatctaggagcatgttctagaagatgcatttaggcttgaagttatgagcatgcatgtttctaaatagtgcatagaaagcatgtatgtgtgtacataaaaacttgacaaaactagtatttgttgaagatagatatggatgtttattgattgtttcaattttattagctttggaattcttttcaaagttggtgagaacagagacagtgaggtacttgttactaagagtagtcgtgggctctgaattcagtatgtactgaccaaaataaaaccacatttctaaagaaactgccttaaggtggtttcccctgactgtttaaaagaatttacaaaacaagttttgaaattagcagtttgtacgtcagatgtcttgaattttaaagatttttttgctcgtacagaaagttgctaaccgcgcaagaagatgttactgcacttgctttctcagttttgaaatctagtccaagaatgggtttaattagggatatttgaattcatatgtaaaattttaaatttgtaaacctttgatatagggttattcctcttaaaggggacatttcgattcattagtatttttgcatctgagatcagcctttgcttgatgattttgatgtcaaaaacttacattgctttttccttagttttctattgtggaataatgtacccagaaggatattattgatcagtaagcaccattttgaagagatctataatgaccttaatgatccttaagtgtattgaattacaatgacagtacctttatttaggccactcttgtaattcctacaagtattctctgttataagaattaggagagatgaaagaaatttggggcaaggtttacttaatttgaattaccattttgtattccagatagagtattcattccttgttatcatggatgttgaatcttggattttcagtttacaaatggttttagggatattcttctgtctcctttttcttttgagatggggtctcactctgtcacccaggctggcctgaatctcatgggctcaagcgatcctcccacagcctctcaaattactgggatgacaggcacgagccactgtgcctggcctatttccttattcttacatgttgtgaataatatttaattgtagatactagaacatctaatgtgtcttttggtactagttttccaagtattttgagcaagtcagaagtatgtattggcatttgctagataacatttattctacaagtaattgtagggcatgtgtcttaaacaatagaaaaaccaaggcaagtaagataggcgcaggagtttgtactgatttagacaagaaatatggatcataaagctcaaactttgtttagagatgtgaaactaacagtaggttgacctccacaggctaccacttccgttccattctttatccctcacacagaaatgcttcactttaggattcttacaacttactcccaaacactaattaggtgcagctataatgagttatagttgaatttatgtagctatgggttcagggggctttctttacatcaaaaaccggtgacggtattccaagtacagcacagtttacagtaatagtaatgatgtgcagttttaaaatattttagagacatttttactttgttgggtattaagactttcaccaaaaaggaatcttaagttatcttaatttttaagagggacagcatgtctgagaacatatatgggaagtgattcttaggaaatccatttgggtaaacattctttacttttaaaaccgtgatgcccatgggaggaaaatgtattattgctgcttgagtgaactgtatcttggcaaggagtgttttaggcagaggaaagcttaagcactttgaattgggagcatgcttattatggacgaggaacagaacagaggtcagtatagttggaatagagtgactgaaaggaaagggtggttggaagccagggctccaccgggtaaagctttggaggatattgaaagtctctagcttttactgtgagggtgggtagtctttgcagccttgtaagctgagtggtgacctgacttaaggtagtgttttaaagaatctgtgatttctctgctgagaacagactctaggaaggcaacagtggaagtagggagacaagtttttggtggctactgaagacagtccaggggctagagctcatgattgattggatcagggtggcaatagttgtggaagattctggatatatattcctattgccaaaaggttcctggtccaaggaattacattaaagatggaattaaatccagtggatataattcctgtccttgctaatctgaagatccttaggcacatgtattattctattttgattctatcttctgcacgttattttatttaaggatggagttagaaagaaatttcagggaaccctgagagcattcagttaccttgccctaatatgtctgaaacaaggatctagtaatagaactttacatttttaattatcctatatatattctttattcttagtctatttttctgtaccaattaatcttaaaattatgtgcctgtcctggattcgtaataaggagaatatcccatttgatagctgggctttagggtgataaaatcttaagtgatagagtagttagaaaaagcaactattaggagttctggtttgaatatacccatcctttaaaagggtaatttcttgtggcgtctgcacaattaaatgatattcatgtttttttctcccgcccgccacctttttttttttttttttttttttttgagacatgatcccactgtgtcgccctggctggagtgcagtggcgcaatcttgaatcactgcaactcccgggctcaaatgatcttccccagtagctgggactgcaggcacacaccaccatgcccagctaatttttaaaatttttttgtagagatggagatggagtttctccatgttgcccaggctggttgcaaactcctgggctcaagtgatccttctgcctcagcctcgcaaagtgctgggattatatgcatgagccactgtgcctggcccatgattaatttttttaactgaatttcttctactatagttgaatggtattttgtttaattgtgataataaagtaggaagacatctcaattttagactaaaatacagttttatttaactcatactatgaaattctatcataatgcctgtaggatataaatataatttctgttttctgactctgatgagagacagatctttattaccattattaattcagaatttttacttgtactaggtacttcacatgatttcaagtatggtttgatgcctggtccttcaaatgatttcaagtatggattgataccaggtacttcaaatgatttcaagtatggattgataccaggtgcttcaaatgatttcaagtatggattattgccagaatcttggccaaaacaagaaacctgggaaaatggcaagtattagtcaactaaacaaatacagaattaattaaataattgttaacaattaaaagctttcatgttctgcattttttaaaaaccaagtagcagtagctccacataattgctgttctcagagatagagataagaagttttgatagcaagttttctgtttaatgtgtaataagcactttctctttttttaattctcataggtgaatcatctctaatcatgaacaagttaaaatgccctcattgtagctatgtagccaaatacagacgaacactaaaaaggcacttgctcattcacacaggagtgagatcatttagctgtgatatttgtggaaaactgtttactcgaagagaacatgtaaaaagacattccctggtaagtaactttaaatacagctgatctttgagataaactatatttatgtcagtgaagtttaaagggatttaaacagttaattgtgaatttaaggaagattgtctcctaaattgctttaaacagtttgactttatgaactgatagtgagctttttacagagaaactggtgtattcactcactattaaatgtgtggtttaatttgagtggttcaaatgcattctattatatataatatccttatattggattttttccccctccaattaggtgcataaaaaggataaaaaatacaaatgtatggtgtgtaagaagatcttcatgttagcagccagtgttggaataagacatggatctcgacgttatggtgtttgtgtagactgtgcagataaatcacagccaggagggcaagaaggtgtagatcagggacaggatacagaattccctcgggatgaagaatacgaggagaatgaagtaggagaagctgatgaagagctagttgatgatggagaagatcagaatgatccctctcgatgggatgaatcaggagaagtttgtatgtctctagatgattaactgacctactatactcctcaaggatgctgcatttggacctaatatgaatcgacaatttggattgttgaacttgaaggcttgcaaaatatggtacatgctggatagtagttatgttgctgtgaaaactgtagggtcaaagccttatagcaaaaaaaatttttttttatatttgcacaggactatacagcaaacaaccatgtggttggattacatggagtccccacatactcagtcagttatcaaagtaaaatattttttatttataggatatacagtaactatttgggtcctatgaaaatagtccttaaagagcttacattcatgtgctactttaacatgaatggagaaaatccgtttatggaagtacagtgacaattgacccaatcactctgtccatcaaaccactcaggctagtttgtactagtagagttttgtttctatttttatttttattaattttattttttttaatacagattttcagtgaggggctttttcaaccccattggttctattttcttgtatttttccatttaatttgcttcataacttaaaccaagtctcttctagtcttaggtattatttctcgattttgtgctgatgggcatgtttataagaactggagaggtaatttattggaatgaactaactgacttcctccattcccctcttcctttttgacatgaattttactacttcacaaatgaagaatgatgttatgaagttaccgtggcgaagttgacaaataccactaaaatgattatgatttagaagtaactttcttctgctgctctaatctgataaatggttactatatgatattttctgacatggtatttggttttgggtatctgttactttggcactattcttgtttgcctctttatttttgccagtgtactatacctcagtcctatttgaaagacctaattgaaagaaaaatcatagaaataagtaaaatgatttgttttataatttatccaccatgtccagtttggttagcttgttatgcaatataagtgaaatatcaggtttttacccgtgtcccttttatcatgaaaattaacacaaaatgtgcattctcttttgtttcatacttagcgggatattgattgttttgaaattatgatcaatacttaatttatttttttctgtccttgaagtcactacaccttgatacagtctttctagtagtcaccatgattcaacagtctcaaaaatcttacaaataaaattctgagaagctttattattctataaattcttcagggtacaaagggtgacatattgaggtgaaattgtcagatttacttagcctggtgacatgaattagctgattgtggaactctcagcagcatttcacgtattgttaacatgtatggcatttattagcatattgtatattatataagattgagggatgtcatattttcagctttcttttaaataaaaattgagtatattttcctattttatatcaggtaactaaattatgctagttatgtggaaaaaattgcaaagatgctttgacagatataatccctttggtgctccatctgatcaaagttgaaaagttgatgttttttaagagacaagctttatcattgtctctgatttcagtagaataatggtttattgttagacaatgatgtttctgcttggataaatcaaagataaattacagttacatggttagatgcatcttttgtcatctatattgtagtttctacataactgtaaacctgacagataagaatagtttcggtttgatttttgtttaaaacagatgagtacttcttaatgttctagacaaatgagtaaaatgtatttctggtagaaattagttgggcaaagatactatgaatgaaaaagtattttaaacgtaaaatgttctttgtgaatatgtaagtatagtataaagatttctttcatcccatttatccccttcctttaaataaactagtttacaattggtagatctgtctatatataaatatatattaaagaacaaagatatatatctaaaaatcacctaaatctgctttattagactacagttcacttattgcatagaaactggacttggctttacattcttaatgtacttttacttttcctcaagatatgaacttactctcttgaagctgaattttcttttactacttaaatcatttatgtatatctggtaaattatgaccaaatttttgttagattgcatacagtaaattgaaatacacacttggtacactacgggattgttgtgcttttgtttggttttagttggaaataaggtttgatgtagatggcttgttactgttaatttaaaatattctataattgtccattactttatgttgtgttgtgacagatttggctatatttttagtcaattgaaatatgatactttaaaagtttgtttttaggtaatccaaaggaaaagtgtttatactcttgaatatattagcctcagcctatataaaaatttctttgaagtaaacattttaccggaaacagaattgacagatttttctacttgctgactgcctaacttattttgtttcatgatctcgagggactgccttttcccatctagatcttttaaaaaaatagttttagtactaaggtatactactggacatttctatttttttaagtgtattctttttctgacttacagtaaaatttcaggaagttgatagatactaagaacttatgattggtctcagaggtaacaatgaaatactcataattttgtctgtggaactctggcagaattatgttacacatttggcgaagttgtctcttgtaatttatattttaaatgaaaaagtattttagagcttttaatgaaggggaagagtataaactttctttcatattcactctgtagttacagaccgtctcataaatcaagattgtgcattattagagttctcagagacagatacttccatatggacccctgttcatttttcttatttactagatattttgctaaatttagcacactagcaattaagagtttaaaaaagaagaaacgttataggaaagggaaactgaacagtaatgagtagctttgaaattggggaaaacacactagctgggttaggtacagctatcctaatggagaagagtgagctaaatgcgttaattcatgtaaagtgcttagaacactggtacataataggtgcataacacatcttaaagttgtttaataatagataagaaccaagaggaaaaagaaataagaaaagatgggggaaaggaaggagaaaataggaaatgaaaggattaggacttgggcatttatattaatacaaaatggtgtaaacggcctgaatatcactgtagtagtatcatacgggggaaagtgtgatggaaaataggtttaaaaatcttaatttttaaaactttagtaagctttatttatattttttaggattttctgaacatagcatgaagggtttagattcatttttctgaaaaacgattaaaaaaactaccaattttttttttgagtgcccacacttgccgttgtgctgtatacatgattttaccttaatcctctataaggtaggtgctaattgtctccattttatagatgaggaaaggctcagagaaattcagaaacttggctaatttaacacagctgtgacagagctcgaatttgaccacgtctgattctgaagcccatactctttcagggaggctctattgctgcctcattaaacaactcttgtagaatttcagctcttaatggagtctatggattatatttttcctataagacagctgtgtttagaattttgagtgtctttcctccccccaataaatttccttactactctttcttcataaagcagttgttttgtcactttgactatattaagacacatcagtgtagcacatgctcttaactggctgtggcattttaattttataaaagaatggtttttatctgaagaactagatagaaaccccagtttttgtgccgttcagtcacccagatccttaaacttaactatggtacataatatc

SEQ ID NO: 24027 - DNA, 1430 bp, Homo Sapiens
gcggccgcgggagctgaccctgcggggtcccggggggggagggggagccgcgaagcccccactgaggccgccgctgccgggcctcccctcccccccgggcgggcgccatgcgggggagcccgggcgacgcggagcggcggcagcgctggggtcgcctgttcgaggagctggacagtaacaaggatggccgcgtggacgtgcacgagttgcgccaggggctggccaggctgggcgggggcaacccagaccccggcgcccaacagggtatctcctctgagggtgatgctgacccagatggcgggctcgacctggaggaattttcccgctatctgcaggagcgggaacagcgtctgctgctcatgtttcacagtcttgaccggaaccaggatggtcacattgatgtctctgagatccaacagagtttccgagctctgggcatttccatctcgctggagcaggctgagaaaattttgcacagcatggaccgagacggcacaatgaccattgactggcaagaatggcgcgaccacttcctgttgcattcgctggaaaatgtggaggacgtgctgtatttctggaagcattccacggtcctggacattggcgagtgcctgacagtgccggacgagttctcaaagcaagagaagctgacgggcatgtggtggaaacagctggtggccggcgcagtggcaggtgccgtgtcacggacaggcacggcccctctggaccgcctcaaggtcttcatgcaggtccatgcctcaaagaccaaccggctgaacatccttggggggcttcgaagcatggtccttgagggaggcatccgctccctgtggcgcggcaatggtattaatgtactcaagattgcccccgagtcagctatcaagttcatggcctatgaacagatcaagagggccatcctggggcagcaggagacactgcatgtgcaggagcgcttcgtggctggctccctggctggtgccacagcccaaaccatcatttaccctatggaggtgctgaagacgcggctgaccttgcgccggacgggccagtataaggggctgctggactgcgccaggcgtatcctggagagggaggggccccgtgccttctaccgcggctacctccccaacgtgctgggcatcatcccctatgcgggcatcgacctggccgtctacgagactctgaagaactggtggcttcagcagtacagccacgactcggcagacccaggcatcctcgtgctcctggcctgcggtaccatatccagcacctgcggccagatagccagttacccgctggccctggtccggacccgcatgcaggcacaagatgtgtcagtgtacaagacggacacggtccccaccctcatagagctcacaggccggagaggaaggaagatgctaaataaatcattctggaattaaaaacct

SEQ ID NO: 24028 - DNA, 1537 bp, Homo Sapiens
gacgtaattttcctgcgcctcggggcgagcagcggcgcgcaaggaaagatcgggttccgtttttcccgcggattctggtgcctgtggggccggtgacccaacaccatgaaggaaacgccactctcaaactgcgaacgccgcttcctactccgtgccatcgaagagaagaagcggctggatggcagacaaacctatgattataggaacatcaggatctcatttggaacagattacggatgctgcattgtggaacttggaaaaacaagagttcttggacaggtttcctgtgaacttgtgtctccaaaactcaatcgggcaacagaaggtattcttttttttaaccttgaactctctcagatggccgctccagctttcgaacctggcaggcagtcagatctcttggtgaagttgaatcgactcatggaaagatgtctaagaaattcgaagtgtatagacactgagtctctctgtgttgttgctggtgaaaaggtttggcaaatacgtgtagacctacatttattaaatcatgatggaaatattattgatgctgccagcattgctgcaatcgtggccttatgtcatttccgaagacctgatgtctctgtccaaggagatgaagtaacactgtatacacctgaagagcgtgatcctgtaccattaagtatccaccacatgcccatttgtgtcagttttgcctttttccagcaaggaacatatttattggtggatcccaatgaacgagaagaacgtgtgatggatggcttgctggtgattgccatgaacaaacatcgagagatttgtactatccagtccagtggtgggataatgctactaaaagatcaagttctgagatgcagtaaaatcgctggtgtgaaagtagcagaaattacagagctaatattgaaagctttggagaatgaccaaaaagtaaggaaagaaggtggaaagtttggttttgcagagtctatagcaaatcaaaggatcacagcatttaaaatggaaaaggcccctattgatacctcggatgtagaagaaaaagcagaagaaatcattgctgaagcagaacctccttcagaagttgtttctacacctgtgctatggactcctggaactgcccaaattggagagggagtagaaaactcctggggtgatcttgaagactctgagaaggaagatgatgaaggcggtggtgatcaagctatcattcttgatggtataaaaatggacactggagtagaagtctctgatattggaagccaagagctggggtttcaccatgttggccagactggactcgagttcctgacctcagatgctcccataatactctcagatagtgaagaagaagaaatgatcattttggaaccagacaagaatccaaagaaaataagaacacagaccaccagtgcaaaacaagaaaaagcaccaagtaaaaagccagtgaaaagaagaaaaaagaagagagctgccaattaaagctaacagttgtatatctgtatatatacctattaaaagggatatttattccaaaaaaaaa

SEQ ID NO: 24029 - DNA, 2935 bp, Homo Sapiens
gtgagggggcgcggtcaccgcccagggttcccacgaacgccaaggcggccacgtcctgctccccctggtgaagaagctgccctgggcttgtcgtcctagggtctccagacatgtctgaggtgaagagccggaagaagtcggggcccaagggagcccctgctgcggagcccgggaagcggagcgagggcgggaagacccccgtggcccggagcagcggaggcgggggctgggcagacccccgaacgtgcctgagcctgctgtcgctggggacgtgcctgggcctggcctggtttgtatttcagcagtcagaaaaatttgcaaaggtggaaaaccaataccagttactgaaactagaaaccaatgaattccaacaacttcaaagtaaaatcagtttaatttcagaaaagcttgagtctactgaaagcatcctgcaggaagctacatcatccatgtctttgatgacccagtttgagcaggaagtatccaacctccaagatatcatgcatgacattcaaaataatgaagaggtgctcactcaaaggatgcaaagccttaatgagaaatttcagaatattacggatttctggaagagaagcctagaagaaatgaacattaatacagacattttcaaatcagaagcaaaacatatacattctcaagtaactgtccaaattaactcagctgagcaggaaataaaattgctcactgaacggctaaaagatttggaagatagcacactaagaaatattagaacagtaaaaagacaagaagaagaagatctcctgcgagtagaggagcagctaggctctgatacaaaggcaattgaaaagttagaagaggaacagcatgccctctttgccagagatgaagatctgactaataaactttccgactacgaacccaaagttgaagaatgcaagacacatttgccaacaattgaaagtgctattcactctgttctcagagtctctcaggatctgatagaaacagaaaagaaaatggaagacttgactatgcagatgtttaatatggaagatgatatgctgaaagcagtgtctgaaataatggagatgcagaaaacccttgaaggaattcagtatgataatagcatattaaagatgcaaaatgaactggatattctaaaagaaaaagttcatgattttatagcatactcaagtacaggagaaaagggaactttaaaagaatataatatagaaaataaaggaattggtggtgatttttaaattcatgacatttattctgatgaaccatatcattatacataaattgattagtccattgattttgagttactttgatacgcctcatcttatcctacattattggaaaataaatgagatgtccacacaaatggattatccacataatcaaagcttatctttttaagcactaaaacttacttcattgtaactatttgaaatagaaatagttctttaaaaatatttctctacttttaaaacaggatacttaatatttttaatgttttttaaagcattaatggacatcatcattaatttcacctattatattgtacccacatatattgatgtctccaggggctaataaagagtatttaccacttcactaaatgaccccaatttgccattttcaaacctatgtctcataccttttctgtcacctgaacttactgtcaggttggttggtaatgtgcctgcctcagccagttcactttcttaggtaattcactgcaggttaagaatccacacaaccaagttcatgggaattttgtgtaaaataaaagataacatgcctgagggagagcctggtgcctttgctatgaattaatatgcactttctgaaaactctaaagcctgggaaacattttagtttttgttaaggttctaaactgtgttacagatacttgtaagacttttaaaatcagagtaagtatgttcttacataaggcctttcttaggaattatgtgtatataaatctttgaaatatctttatatacctgagttttaggttccaactgtgttagacatgagtttgctagatccatggtctctagatggtttacttaaataggccaggcgcagtggctcacacctgtaatcctagcactttgggaggccgaggtgggcagatcacgaagtcaggagatcaagaccatctggctaacagggtgaaaccctgtctctactaaaaaatacaaaaaattagccaggcgtggtggtgggtgcctgtagtcccagctactcaggaggctgaggcaggagaatggtgtgaacccgggaggcagagcttgcagtgagccgagatcgcgccactgcactccagcctgagtggcaaagtgagactctgtctcaataaataaataaataaataaaaataagcctgtggcctgttttgagggaaaagtaacataactctgataattaattatgataataactatgatagttaaaaatacgtcattttaaagatttcccaaaccacaccactaaatttgttttatgaattgattttattttatttgaaattatataatgtagtcaactgcaatatggaagtttgttcttgtttctttgtcaataaccttaccagttttataatgcagtttttgatggaattaaacacaaagaacttgaaagcagtcagttacaaaaaggtagttgtggtcaagtagttttaatatgtaaatttgcaagtttttggagaacccccaaactccttctccactggagttaggagggcctgtggtagacagcgtgaatcatgaaaataagcctggagagttctgttattaaggggcatagcattaatttttgcagtcttaaaattacacttcttgacttctgaatgtctcttatttgcgtgcactgacaaaattctatttgtttacttttatattaatggtaataaaatagattataaagaaaaaaaaaaaaa

SEQ ID NO: 24030 - DNA, 1563 bp, Homo Sapiens
ggaagccgctgtaaaacgtcgtgaggagcgccgctgctttacggctgcctctcccagactagagccccggagcgcccaccgccgtcagccgcgtcttcaagctagtcggccccgcggagagcgagagaccctgcgcaccgcagccctctccgctgcgcccattcctgccgccggcgatgtaactcggggaggcagcggtgcccgctggcccggggttgagacaggcggcaggtgcctgtgaggcgggcgggtgccgggggccagcaggatggaggaaagcatggaagaggaggaggggggcagctacgaggcgatgatggacgaccagaaccacaacaactgggaggctgcggtggacggcttccggcagcccctgccacctccgccgcccccctcgtcgatcccggcccctgcccgagagcctccgggggggcagctgctggcggtgcccgcggtctccgtggacaggaaaggccccaaggaggggctcccgatggggccgcagccaccgccggaggctaatggggtgatcatgatgttgaagagctgcgacgcggccgccgccgtggccaaggcggcccccgcccccaccgccagctccaccatcaacatcaacacctccacctccaagttcttaatgaatgttataactattgaagattataagagcacatactggccaaaattggatggtgccatagatcaacttttaactcagagtcctggtgactatatccccatatcctatgaacagatatacagttgtgtgtataaatgtgtatgccagcagcactcggaacagatgtatagtgatctgattaaaaagataactaatcacttagagagagtctcaaaggagctgcaggccagccctccagatctctatattgaaagatttaatatagctcttggacaatatatgggagcattgcagagcattgtgcctcttttcatatatatgaataagttttacatcgaaaccaagcttaacagagacttaaaagatgaccttataaagctgtttacggaacatgttgcagaaaagcacatttacagcctaatgcctttacttttagaagcccagtcaacaccatttcaggtcacaccttcaactatggcaaatattgtgaaaggcctgtataccctcagaccagagtgggttcagatggctccaactctattttctaaatttattccaaacattctccctccggcggtggaatctgaactttctgaatatgctgctcaagatcagaaatttcaaagagaacttatacagaatggttttacaaggggtgaccagtcccggaagagagctggggatgagttggcttataatagctcgtcagcatgtgcaagttccagggggtacagatagtgaatgtattgaatatgctttcccttcctgaaaagaggacacactgggagctgcagagactgtattcagagcacagtgggggctgcacacactcaggagctctgtcacaaagctgttcatggaagaggatgttggacttcttacttggtttgtaattttaaaacaaaaactaaaaaaaaaaaaaa

SEQ ID NO: 24031 - DNA, 4342 bp, Homo Sapiens
gggtctgaggtttggtgactgcggggcaggccgggggcagctgtctgtctggctctttttgacagcccccagtgcgaaaggctgccagcatgtcatcagtgagccccatccagatccccagtcgcctcccgctgctgctcacccacgagggcgtcctgctgcccggctccaccatgcgcaccagcgtggactcggcccgcaacctgcagctggtgcggagccgccttctgaagggcacgtcgctgcaaagcaccatcctgggcgtcatccccaacacgcctgaccccgccagcgacgcgcaggacctgccgccgctgcacaggattggcacagctgcactggccgttcaggttgtgggcagtaactggcccaagccccactacactctgttgattacaggcctatgccgtttccagattgtacaggtcttaaaagagaagccatatcccattgctgaagtggagcagttggaccgacttgaggagtttcccaacacctgtaaaatgagggaggagctaggagaactatcagagcagttttacaaatatgcagtacaattggttgaaatgttggatatgtctgtccctgcagttgctaaattgagacgtcttttagatagtcttccaagggaagctttaccagacatcttgacatcaattatccgaacaagcaacaaagagaaactccagattttagatgctgtgagcctagaggagcggttcaagatgactataccactgcttgtcagacaaattgaaggcctgaaattgcttcaaaaaaccagaaaacccaagcaagatgatgataagagggttatagcaatacgccctattaggagaattacacatatctcaggtactttagaagatgaagatgaagatgaagataatgatgacattgtcatgctagagaaaaaaatacgaacatctagtatgccagagcaggcccataaagtctgtgtcaaagagataaagagactcaaaaaaatgcctcagtcaatgccagaatatgctctgactagaaattatttggaacttatggtagaacttccttggaacaaaagtacaactgaccgcctggacattagggcagcccggattcttctggataatgaccattacgccatggaaaaattgaagaaaagagtactggaatacttggctgtcagacagctcaaaaataacctgaagggcccaatcctatgctttgttggccctcctggagttggtaaaacaagtgtgggaagatcagtggccaagactctaggtcgagagttccacaggattgcacttggaggagtatgtgatcagtctgacattcgaggacacaggcgcacctatgttggcagcatgcctggtcgcatcatcaacggcttgaagactgtgggagtgaacaacccagtgttcctattagatgaggttgacaaactgggaaaaagtctacagggtgatccagcagcagctctgcttgaggtgttggatcctgaacaaaaccataacttcacagatcattatctaaatgtggcctttgacctttctcaagttctttttatagctactgccaacaccactgctaccattccagctgccttgttggacagaatggagatcattcaggttccaggttatacacaggaggagaagatagagattgcccataggcacttgatccccaagcagctggaacaacatgggctgactccacagcagattcagataccccaggtcaccactcttgacatcatcaccaggtataccagagaggcaggggttcgttctctggatagaaaacttggggccatttgccgagctgtggccgtgaaggtggcagaaggacagcataaggaagccaagttggaccgttctgatgtgactgagagagaaggttgcagagaacacatcttagaagatgaaaaacctgaatctatcagtgacactactgacttggctctaccacctgaaatgccgattttgattgatttccatgctctgaaagacatccttgggcccccgatgtatgaaatggaggtatctcagcgtttgagtcagccaggagtagcaataggtttggcttggactcccttaggtggagaaatcatgttcgtggaggcgagtcgaatggatggcgagggccagttaactctgaccggccagctcggggacgtgatgaaggagtccgcccacctcgctatcagctggctccgcagcaacgcaaagaagtaccagctgaccaatgcttttggaagttttgatcttcttgacaacacagacatccatctgcacttcccagctggagctgtcacaaaagatggaccatctgctggagttaccatagtaacctgtctcgcctcactttttagtgggcggctggtacgttcagatgtagccatgactggagaaattacactgagaggtcttgttcttccagtgggtggaattaaagacaaagtgctggcggcacacagagcgggactgaagcaagtcattattcctcggagaaatgaaaaagaccttgagggaatcccaggcaacgtacgacaggatttaagttttgtcacagcaagctgcctggatgaggttcttaatgcagcttttgatggtggctttactgtcaagaccagacctggtctgttaaatagcaaactgtaggtccaaatctcaattttttagaattttaagttatgaagtgctcaaaggtactgacacagttgattttattcacaccattaggggtatgcaagatgtccctgttttataaacataatcacaacagtaataaacctcaagtagtggctagtgtttagtatagaaatataagatgttgatttagtaaactgataaaaatcgaattcttgtctttttagtgggatccttactgtccctggaaagatatagcatagtggttctcagcacagtctccagaacagaagcatctgtagtacctggtaacttgttagaaatgtacattctcaggctccacagcaggccgcctgaatcaaatcctgggaggtggggacagaaatctgtgttttaagaagccttccaggtaattctgctgcacactcaagttcaggaaccaccggtatagaccattaccttagtggatttacctgtagagtttattggatcctgaaaccaatcaattacttagaactaggcaaagatgaaagtatagccaactattcttggctatatatatatattcaagtgggccgggcgtgatggctcacacctgtaattccagcactttgggaggtcgaggtaggcagatcaccgagcccaagagttcaagacaatcctggccaacggcgaaactctgtctctacaaaaaatatacaggcgtgttagcatgtgcctgtaatcccagcttcttgggaagctgaggcacaagaattgcctgaacccaggaggtggaggttgcagtgagctgggatcgcgccattgcactccagcctggctgacagagcgagactgtctctaaaaaaaaaagactcaagtggaccctacaatgaagcctacacatcccaatagaagccccttcttatgctgagggaagcagccctcagaacatgatagcttgtatccagcagagtggcacgtgctggcacacctcacagaagcaccctggccctggatgcctgcaacctcagaagagtgcagctcccagagggaggcagccatccatctgggatggtcctaagcatggaatcctaactcctgattccgtctcctatttcttgcttggctacgccagttcccaaatctggtagatgtccatgcccatgtgctcctgctgggactcaattcaggctatgtatgactatgaagtcaggctcatctgcttactggctgtgtgaactttttgtatcttggttttcttcatccatgaaatccaagtaatactacctaattgttactgtggagattaagttcaaatgcaatgtatagtaatattaagcaatttctagttattattctagccagtaatggacttcagaatcttttattacacaatataagaatatgtatgtaaagacattttggaatttcctggatgagaaggaagtctgggctgggcatggtggctcacccctgtaaccctagcactttaggaaatcgaggcgagtggatcacttaagctcaggagttcaaggccagcctgggcaacatggcaaaaccccatttctacaaaaaatacaaaaattagctgggcatggtggcacccgcctgtagtccagctacttgaggctgagatgggaggatgagggaggtcggggctgcagtgagccaagatcacgccactgcactccagcaccctgggcgacagagtgagaccctgtctc

SEQ ID NO: 24032 - DNA, 2406 bp, Homo Sapiens
atgttgaggaacagcaccttcaaaaacatgcagcgccggcacacaacgctgagggagaagggccgtcgccaggccatccggggtcccgcctacatgttcaacgagaagggcaccagtctgacgcccgaggaggagcgcttcctggactcggctgagtatggcaacatcccggtggtccggaaaatgctggaggagtccaagacccttaacttcaactgtgtggactacatggggcagaacgctctgcagctggccgtgggcaacgagcacctagaggtcacggagctgctgctgaagaaggagaacctggcacgggtgggggacgcgctgctgctggccatcagcaagggctatgtgcgcatcgtggaggccatcctcaaccacccggccttcgcgcagggccagcgcctgacgctcagcccgctggaacaggagctgcgcgacgacgacttctatgcctacgacgaggacggcacgcgcttctcccacgacatcacgcccatcatcctggcggcgcactgccaggagtatgagatcgtgcacatcctgctgctcaagggcgcccgcatcgagcggccccacgactacttctgcaagtgcaatgagtgcaccgagaaacagcggaaagactccttcagccactcgcgctcgcgcatgaacgcctacaaaggactggcgagtgctgcctacttgtccctgtccagcgaagaccctgtcctcaccgccctggagctcagcaacgagttagccagactagccaacattgagactgaatttaagttcgttgctcatcctaactgtcagcagcaattgcttaccatgtggtatgaaaatctctcaggcttacgtcaacagtctatcgctgtgaaattcctggctgtctttggagtctccataggcctcccttttctcgccatagcctattggattgctccgtgcagcaagctaggacgaaccctgaggagccctttcatgaagtttgtagctcatgcagtttcttttacaatcttcttgggattattagttgtgaatgcatctgaccgatttgaaagtgttaaaaccctgccaaacgaaaccttcacagactacccaaaacaaatcttcagagtgaaaaccacacagttctcctggacagaaatgctcattatgaagtgggtcttaggaatgatttggtccgaatgcaaggaaatctgggaggaggggccacgggagtacgtgctgcacttgtggaacctgctagatttcgggatgctgtccatcttcgtggcctcctccacagcacgcttcatggccttcctgaaggccacggaggcacagctgtacgtggaccagcacgtgcaggacgacacgctgcacaatgtctcgcttccgccggaagtggcatacttcacctacgccagggacaagtggtggccttcagaccctcagatcatatcggaagggctctacgcgatagccgtcgtgctgagcttctctcgcattgcatacattctgccagccaacgagagttttgggcccctgcagatctcgctagggagaactgtgaaagatatcttcaagttcatggtcattttcatcatggtatttgtggccttcatgattgggatgttcaacctgtactcttactaccgaggtgccaaatacaacccagcgtttacaacggttgaagaaagttttaaaactttgttttggtccatattcggcttatctgaagtaatctcagtggtgctgaaatacgaccacaaattcatcgagaacattggctacgttctctacggcgtttataacgtcaccatggtggtagtgttgctcaacatgctaatagccatgataaacaactcctatcaggaaattgaggaggatgcagatgtggaatggaagttcgcccgagcaaaactctggctgtcttactttgatgaaggaagaactctacctgctccttttaatctagtgccaagtcctaaatcattttattatctcataatgagaatcaagatgtgcctcataaaactctgcaaatctaaggccaaaagctgtgaaaatgaccttgaaatgggcatgctgaattccaaattcaagaagactcgctaccaggctggcatgaggaattctgaaaatctgacagcaaataacactttgagcaagcccaccagataccagaaaatcatgaaacggctcataaaaagatacgtcctgaaagcccaggtggacagagaaaatgacgaagtcaatgaaggcgagctgaaggaaatcaagcaagatatctccagcctgcgctatgagcttcttgaggaaaaatctcaagctactggtgagctggcagacctgattcaacaactcagcgagaagtttggaaagaacttaaacaaagaccacctgagggtgaacaagggcaaagacatttag

SEQ ID NO: 24033 - DNA, 2400 bp, Homo Sapiens
gtttgtgtctggagccgtagcggcaagtgggcttgcggctaagggattttcctgggatgagagcgggtcttctgccttcattttggatgcacatcccgctttagccccggcagcctttggtccggctcgtgtccctggggattctcggatctccgaggacaccggacgggagcgcttggccatcctctctccggcagaggagcagacgtttgctttccaagtgcaaaactacagacacgcgcgcgcacacacgcaagcacacgcggagagagaggaaccttgccggtccgaggcagctctgcgcgtcccctcctgcgcttagcatcctcggcccagcgcggcccgcaccgccatggaggtgctggagagcggggagcagggcgtgctgcagtgggaccgcaagctgagcgagctgtcagagcccggggacggcgaggccctcatgtaccacacgcacttctcagaacttctggatgagttttcccagaacgtcttgggtcagctcctgaatgatcctttcctctcagagaagagtgtgtcaatggaggtggaaccttccccgacgtccccggcgcctctcatccaggctgagcacagctactccctgtgcgaggagcctcgggcccagtcgcccttcacccacattaccagtgacagcttcaatgacgatgaggtggaaagtgagaaatggtacctgtctacagacttcccttcaacatccatcaagacagagccaattacagacgaaccacccccaggactcgttccgtctgtcactctgaccatcacagccatctccaccccgttggaaaaggaggaacctcctctggaaatgaacactggggttgattcctcgtgccagaccattattcctaaaattaagctggagcctcatgaagtggatcagtttctaaacttctctcctaaagaagccccagtggaccacctgcatttgccgcccacccctccgagcagtcacggcagtgactcagagggcagcctgagtcccaacccacgcctgcaccccttcagcctgcctcagacccacagcccctccagagctgcaccccgggccccctccgccctctccagctcccctctcctcacggctcctcataaactgcagggatcaggccctctggtcctgacagaggaggagaagaggaccctgatcgctgagggctatcccatccccaccaaattgcccctgtcaaaatcagaggagaaggccctgaagaaaattcggaggaagatcaagaataagatttctgctcaggaaagtaggagaaagaagaaagaatacatggacagcctggagaaaaaagtggagtcttgttcaactgagaacttggagcttcggaagaaggtagaggttctagagaacactaataggactctccttcagcaactccagaagcttcagactttggtgatgggcaaggtttctcgaacctgcaagttagctggcacgcagactggcacctgcctcatggttgtggtgctgtgctttgccgttgcattcggcagcttctttcaaggctacgggccctatccttctgccaccaagatggctctgcccagccagcattccctgcaggagccctacacagcctccgtggtgagatccagaaacctgctgatctacgaggaacattctcccccagaggagtcatccagcccgggctcggctggggagctggggggctgggatagaggttcctccctgctcagggtgtcagggctggagtccaggccggatgtggatcttccccatttcattatctcgaatgagaccagcctggagaagtcagtgcttttggagctgcagcagcacctggtcagcgccaaactggaggggaatgaaacactaaaagttgtagaactcgacagaagagtgaacaccactttctaaagaggctgcctgcaccccctccctttcccttaactctacttttacatccccaaaccacctttgtcatcagcttttcctctttgccactggatcttcatggagacatgggcaagcattagtggcttcagattggagaccagcctgggacttccctgcagtgagagagcatctcttccgggtccatgcccctcctggtgcagaagggagcctgcatccctcccttcctttctcttacggccataggaaataatctcaggggtcggaggtgggacaagcaggcttgtttccaccaatagtgccaaaaagatatggcctactgtgcacctgtgtgaggtgtaaccccccggcttgggagcatgagatggctcttgtccagtcaagcaccccagactctggccacaaaaatgccataatgcctgttggtctttggcaacagcctgacccgtgtcctccgttgatcgccctggggtctctggtgtgaacaaccc

SEQ ID NO: 24034 - DNA, 1451 bp, Homo Sapiens
tcaagtttcatggtgattatagcacagctccgaaaccttcatgccttcttgatacctcatacttcaaaagtatattttagggttgccgttcttccttcctcaactgatgtcagctgtctgtttcgcacaaaagttcatccgcccacagaatccattttattcaatgatgtgttcagagtcgccatttcccaaacagccttacaacagaagacactgagggtagacctttgctctgtcagtaaacaccgaagggaagaatgcctggctggaactcagatcagcctggcagatttaccattttccagtgaggttttcactctatggtataacttgcttccttccaagcaaatgccttgcaaaaagaatgaagaaaatgaggactctgtatttcaaccaaaccagccgttagtagattctatagacttggatgcagtgtcagccttacttgcaagaacatcagctgagttgttagctgtggaacaagaattagcacaagaagaagaagaagaatcaggacaagaagaaccaaggggcccagatggagactggctaacaatgctaagagaggcctctgatgaaattgtggctgaaaaagaggctgaagttaaattgccagaggacagtagctgtacagaagatttaagttcatgcactagtgtgcctgagatgaatgaagacgggaacaggaaagaaagcaactgtgccaaagacctcagaagtcagccacctactagaataccaacactggttgacaaagagacaaacactgatgaagccgctaatgacaatatggcagttcgccccaaagagcgcagcagcctgagctctagacagcatccgtttgtgaggagcagtgtgatagtgcgctcacagaccttttctccaggagagcggaaccagtacatctgcaggttaaatcggagtgacagtgacagttcaaccctggctaaaaaatcactgtttgtgagaaactccaccgaacgccgcagtttgagggtcaaaaggacggtttgccagtcagtccttagaagaacaacacaggaatgcccagtgcggacatctctagacttagaactggaccttcaggcatctctgacccggcagagccgcctcaatgatgagctgcaggcgctgagggacttgcggcagaagctggaggaactgaaggctcagggagagactgaccttccaccaggcgtgctggaggatgagaggttccagaggcttctgaagcaagctgagaagcaggctgaacagtccaaagaagagcagaagcaaggtctgaatgcagagaagttgatgaggcaagtctccaaggacgtgtgtcggctccgggagcagagccagaaggtgcctcggcaggtgcagtccttcagggagaagattgcctacttcaccagagcaaagataagcatcccatccctgcctgctgatgatgtgtgattacatga

SEQ ID NO: 24035 - DNA, 7377 bp, Homo Sapiens
atggtcttgcttctttgtctatcttgtctgattttctcctgtctgaccttttcctggttaaaaatctgggggaaaatgacggactccaagccgatcaccaagagtaaatcagaagcaaacctcatcccgagccaggagccctttccagcctctgataactcaggggagacaccgcagagaaatggggagggccacactctgcccaagacacccagccaggccgagccagcctcccacaaaggccccaaagatgccggtcggcggagaaactccctaccaccctcccaccagaagcccccaagaaaccccctttcttccagtgacgcagcaccctccccagagcttcaagccaacgggactgggacacaaggtctggaggccacagataccaatggcctgtcctcctcagccaggccccagggccagcaagctggctccccctccaaagaagacaagaagcaggcaaacatcaagaggcagctgatgaccaacttcatcctgggctcttttgatgactactcctccgacgaggactctgttgctggctcatctcgtgagtctacccggaagggcagccgggccagcttgggggccctgtccctggaggcttatctgaccacaggtgaagctgagacccgcgtccccactatgaggccgagcatgtcgggactccacctggtgaagaggggacgggaacacaagaagctggacctgcacagagactttaccgtggcttctcccgctgagtttgtcacacgctttgggggggatcgggtcatcgagaaggtgcttattgccaacaacgggattgccgccgtgaagtgcatgcgctccatccgcaggtgggcctatgagatgttccgcaacgagcgggccatccggtttgttgtgatggtgacccccgaggaccttaaggccaacgcagagtacatcaagatggcggatcattacgtccccgtcccaggagggcccaataacaacaactatgccaacgtggagctgattgtggacattgccaagagaatccccgtgcaggcggtgtgggctggctggggccatgcttcagaaaaccctaaacttccggagctgctgtgcaagaatggagttgctttcttaggccctcccagtgaggccatgtgggccttaggagataagatcgcctccaccgttgtcgcccagacgctacaggtcccaaccctgccctggagtggaagcggcctgacagtggagtggacagaagatgatctgcagcagggaaaaagaatcagtgtcccagaagatgtttatgacaagggttgcgtgaaagacgtagatgagggcttggaggcagcagaaagaattggttttccattgatgatcaaagcttctgaaggtggcggagggaagggaatccggaaggctgagagtgcggaggacttcccgatccttttcagacaagtacagagtgagatcccaggctcgcccatctttctcatgaagctggcccagcacgcccgtcacctggaagttcagatcctcgctgaccagtatgggaatgctgtgtctctgtttggtcgcgactgctccatccagcggcggcatcagaagatcgttgaggaagcaccggccaccatcgccccgctggccatattcgagttcatggagcagtgtgccatccgcctggccaagaccgtgggctatgtgagtgcagggacagtggaatacctctatagtcaggatggcagcttccacttcttggagctgaatcctcgcttgcaggtggaacatccctgcacagaaatgattgctgatgttaatctgccggccgcccagctacagatcgccatgggcgtgccactgcaccggctgaaggatatccggcttctgtatggagagtcaccatggggagtgactcccatttcttttgaaaccccctcaaaccctcccctcgcccgaggccacgtcattgccgccagaatcaccagcgaaaacccagacgagggttttaagccgagctccgggactgtccaggaactgaatttccggagcagcaagaacgtgtggggttacttcagcgtggccgctactggaggcctgcacgagtttgcggattcccaatttgggcactgcttctcctggggagagaaccgggaagaggccatttcgaacatggtggtggctttgaaggaactgtccatccgaggcgactttaggactaccgtggaatacctcattaacctcctggagaccgagagcttccagaacaacgacatcgacaccgggtggttggactacctcattgctgagaaagtgcaggcggagaaaccggatatcatgcttggggtggtatgcggggccttgaacgtggccgatgcgatgttcagaacgtgcatgacagatttcttacactccctggaaaggggccaggtcctcccagcggattcactactgaacctcgtagatgtggaattaatttacggaggtgttaagtacattctcaaggtggcccggcagtctctgaccatgttcgttctcatcatgaatggctgccacatcgagattgatgcccaccggctgaatgatggggggctcctgctctcctacaatgggaacagctacaccacctacatgaaggaagaggttgacagttaccgaattaccatcggcaataagacgtgtgtgtttgagaaggagaacgatcctacagtcctgagatccccctcggctgggaagctgacacagtacacagtggaggatgggggccacgttgaggctgggagcagctacgctgagatggaggtgatgaagatgatcatgaccctgaacgttcaggaaagaggccgggtgaagtacatcaagcgtccaggtgccgtgctggaagcaggctgcgtggtggccaggctggagctcgatgacccttctaaagtccacccggctgaaccgttcacaggagaactccctgcccagcagacactgcccatcctcggagagaaactgcaccaggtcttccacagcgtcctggaaaacctcaccaacgtcatgagtggcttttgtctgccagagcccgtttttagcataaagctgaaggagtgggtgcagaagctcatgatgaccctccggcacccgtcactgccgctgctggagctgcaggagatcatgaccagcgtggcaggccgcatccccgcccctgtggagaagtctgtccgcagggtgatggcccagtatgccagcaacatcacctcggtgctgtgccagttccccagccagcagatagccaccatcctggactgccatgcagccaccctgcagcggaaggctgatcgagaggtcttcttcatcaacacccagagcatcgtgcagttggtccagagataccgcagcgggatccgcggctatatgaaaacagtggtgttggatctcctgagaagatacttgcgtgttgagcaccattttcagcaagcccactacgacaagtgtgtgataaacctcagggagcagttcaagccagacatgtcccaggtgctggactgcatcttctcccacgcacaggtggccaagaagaaccagctggtgatcatgttgatcgatgagctgtgtggcccagacccttccctgtcggacgagctgatctccatcctcaacgagctcactcagctgagcaaaagcgagcactgcaaagtggccctcagagcccggcagatcctgattgcctcccacctcccctcctacgagctgcggcataaccaggtggagtccattttcctgtctgccattgacatgtacggccaccagttctgccccgagaacctcaagaaattaatactttcggaaacaaccatcttcgacgtcctgcctactttcttctatcacgcaaacaaagtcgtgtgcatggcgtccttggaggtttacgtgcggaggggctacatcgcctatgagttaaacagcctgcagcaccggcagctcccggacggcacctgcgtggtagaattccagttcatgctgccgtcctcccacccaaaccggatgaccgtgcccatcagcatcaccaaccctgacctgctgaggcacagcacagagctcttcatggacagcggcttctccccactgtgccagcgcatgggagccatggtagccttcaggagattcgaggacttcaccagaaattttgatgaagtcatctcttgcttcgccaacgtgcccaaagacacccccctcttcagcgaggcccgcacctccctatactccgaggatgactgcaagagcctcagagaagagcccatccacattctgaatgtgtccatccagtgtgcagaccacctggaggatgaggcactggtgccgattttacggacattcgtacagtccaagaaaaatatccttgtggattatggactccgacgaatcacattcttgattgcccaagagaaagaatttcccaagtttttcacattcagagcaagagatgagtttgcagaagatcgcatttaccgtcacttggaacctgccctggccttccagctggaacttaaccggatgcgtaacttcgatctgaccgccgtgccctgtgccaaccacaagatgcacctttacctgggtgctgccaaggtgaaggaaggtgtggaagtgacggaccataggttcttcatccgcgccatcatcaggcactctgacctgatcacaaaggaagcctccttcgaatacctgcagaacgagggtgagcggctgctcctggaggccatggacgagctggaggtggcgttcaataacaccagcgtgcgcaccgactgcaaccacatcttcctcaacttcgtgcccactgtcatcatggaccccttcaagatcgaggagtccgtgcgctacatggttatgcgctacggcagccggctgtggaaactccgtgtgctacaggctgaggtcaagatcaacatccgccagaccaccaccggcagtgccgttcccatccgcctgttcatcaccaatgagtcgggctactacctggacatcagcctctacaaagaagtgactgactccagatctggaaatatcatgtttcactccttcggcaacaagcaagggccccagcacgggatgctgatcaatactccctacgtcaccaaggatctgctccaggccaagcgattccaggcccagaccctgggaaccacctacatctatgacttcccggaaatgttcaggcaggctctctttaaactgtggggctccccagacaagtatcccaaagacatcctgacatacactgaattagtgttggactctcagggccagctggtggagatgaaccgacttcctggtggaaatgaggtgggcatggtggccttcaaaatgaggtttaagacccaggagtacccggaaggacgggatgtgatcgtcatcggcaatgacatcacctttcgcattggatcctttggccctggagaggaccttctgtacctgcgggcatccgagatggcccgggcagagggcattcccaaaatttacgtggcagccaacagtggcgcccgtattggcatggcagaggagatcaaacacatgttccacgtggcttgggtggacccagaagacccccacaaaggatttaaatacctgtacctgactccccaagactacaccagaatcagctccctgaactccgtccactgtaaacacatcgaggaaggaggagagtccagatacatgatcacggatatcatcgggaaggatgatggcttgggcgtggagaatctgaggggctcaggcatgattgctggggagtcctctctggcttacgaagagatcgtcaccattagcttggtgacctgccgagccattgggattggggcctacttggtgaggctgggccagcgagtgatccaggtggagaattcccacatcatcctcacaggagcaagtgctctcaacaaggtcctgggaagagaggtctacacatccaacaaccagctgggtggcgttcagatcatgcattacaatggtgtctcccacatcaccgtgccagatgactttgagggggtttataccatcctggagtggctgtcctatatgccaaaggataatcacagccctgtccctatcatcacacccactgaccccattgacagagaaattgaattcctcccatccagagctccctacgacccccggtggatgcttgcaggaaggcctcacccaactctgaagggaacgtggcagagcggattctttgaccacggcagtttcaaggaaatcatggcaccctgggcgcagaccgtggtgacaggacgagcaaggcttggggggattcccgtgggagtgattgctgtggagacacggactgtggaggtggcagtccctgcagaccctgccaacctggattctgaggccaagataattcagcaggcaggacaggtgtggttcccagactcagcctacaaaaccgcccaggccatcaaggacttcaaccgggagaagttgcccctgatgatctttgccaactggagggggttctccggtggcatgaaagacatgtatgaccaggtgctgaagtttggagcctacatcgtggacggccttagacaatacaaacagcccatcctgatctatatcccgccctatgcggagctccggggaggctcctgggtggtcatagatgccaccatcaacccgctgtgcatagaaatgtatgcagacaaagagagcaggggtggtgttctggaaccagaggggacagtggagattaagttccgaaagaaagatctgataaagtccatgagaaggatcgatccagcttacaagaagctcatggaacagctaggggaacctgatctctccgacaaggaccgaaaggacctggagggccggctaaaggctcgcgaggacctgctgctccccatctaccaccaggtggcggtgcagttcgccgacttccatgacacacccggccggatgctggagaagggcgtcatatctgacatcctggagtggaagaccgcacgcaccttcctgtattggcgtctgcgccgcctcctcctggaggaccaggtcaagcaggagatcctgcaggccagcggggagctgagtcacgtgcatatccagtccatgctgcgtcgctggttcgtggagacggagggggctgtcaaggcctacttgtgggacaacaaccaggtggttgtgcagtggctggaacagcactggcaggcaggggatggcccgcgctccaccatccgtgagaacatcacgtacctgaagcacgactctgtcctcaagaccatccgaggcctggttgaagaaaaccccgaggtggccgtggactgtgtgatatacctgagccagcacatcagcccagctgagcgggcgcaggtcgttcacctgctgtctaccatggacagcccggcctccacctga

SEQ ID NO: 24036 - DNA, 1245 bp, Homo Sapiens
cctgcgcggcggcggcggcgaggcgggggagcgagtgagcgcgaggggcgggcgcgagtgactgtgtgagtcacccgtacctggagtgcgagcgacgcagagccagcggcgcggagccggagccggagccgagacccagcgcctgcgagcccgagagcgcggccggccccaggcgccaggccccgtcgccctccccgtgcactcacccgtggcccggcgccgactccctacccggcgcccgccgcccgcagccctcccgcctgccaggaggcggtgcggggctcgccgggggatgtcacagcggctcctgggagccagcagccgccgccgccgccgcccccgggaaccgcgatcatgaacccccagtgcgcccgttgcggaaaagtcgtgtatcccaccgagaaagtcaactgcctggataagtattggcataaaggatgtttccattgtgaggtctgcaagatggcactcaacatgaacaactacaaaggctatgaaaagaagccctattgtaatgcacactacccgaagcagtccttcaccacggtggcagatacacctgaaaatcttcgcctgaagcagcaaagtgaattgcagagtcaggtcaagtacaaaagagattttgaagaaagcaaagggaggggcttcagcatcgtcacggacactcctgagctacagagactgaagaggactcaggagcaaatcagtaatgtaaaataccatgaagattttgaaaaaacaaaggggagaggctttactcccgtcgtggacgatcctgtgacagagagagtgaggaagaacacccaggtggtcagcgatgctgcctataaaggggtccaccctcacatcgtggagatggacaggagacctggaatcattgttgcacctgttcttcccggagcctatcagcaaagccattcccaaggctatggctacatgcaccagaccagtgtgtcatccatgagatcaatgcagcattcaccaaatctaaggacctaccgagccatgtacgattacagtgcccaggatgaagacgaggtctcctttagagacggcgactacatcgtcaacgtgcagcctattgacgatggctggatgtacggcacagtgcagagaacagggagaacaggaatgctcccagcgaattacattgagtttgttaattaattatttctccctgccctttgagctttattctaatgtatcccaaacctaatctttttaaaagatagaagatacttttaa

SEQ ID NO: 24037 - DNA, 9604 bp, Homo Sapiens
cgcccccgctcccgccgccgcccgccagtcagtcagtcagtcagtcagtcagtcagtcagtcagtcagtcactgagcgcgcggcgcgggagctgctggcagtcgctgcgtctctggcgagggagcgccgcgcctggggaggaggcggaggcagcggctggaggagcgcgagcggcggtttccttgcccggggccgcgggaaggccgaccgactgccgcgatggagcagctatcagatgaagaaattgatcatggtgctgaagaagacagtgacaaggaagatcaggacctggacaaaatgtttggagcctggcttggagaactagacaaactcactcagagtttggattctgacaagcccatggaaccagtaaaaagatctcctcttcgccaggaaacaaacatggccaacttttcttaccgcttctccatatacaacttgaatgaagctctgaatcagggagagactgtggatctggatgccttgatggctgatctttgctctatagagcaggagctcagcagcattggttcaggaaacagtaagcgtcaaatcacagaaacgaaagctactcagaaattgcctgttagccgacatacattgaaacatggcaccttgaaaggattatcttcttcatctaataggatagctaaaccttcccatgccagctactccttggacgacgtcactgcacagttagaacaggcctctttgagtatggatgaggctgctcagcaatctgtactagaagatactaaacccttagtaactaatcagcacagaagaaccgcgtcagcaggcacagtgagtgatgctgaagtacactctattagtaattcctcccattccagcatcacttccgcagcctccagcatggactctttggatattgataaagtaacacgccctcaagagctggatttgacacatcaagggcagccaattactgaggaagaacaggcagcaaaattgaaagctgagaagatcagagttgccctagagaaaattaaagaggcacaagtgaaaaagctggtgatcagagtccacatgtctgatgacagttctaaaacaatgatggtggatgagaggcagacagtaagacaagtactggataacctgatggacaaatcccactgcggttatagtttagactggtcactggtagaaaccgtttctgaattacaaatggagagaatctttgaagaccatgaaaacttggttgaaaatcttcttaattggacaagagatagccaaaacaagcttatatttatggagcgtatagaaaaatatgcacttttcaaaaacccacagaattatcttttggggaaaaaagaaacagctgagatggcagatagaaacaaagaagtcctcttggaggaatgtttttgtggaagttctgtaactgtaccagaaattgaaggagtcctttggttgaaggatgatggcaagaagtcctggaaaaagcgttattttctcttgcgagcatctggtatctactatgttcccaaaggaaaagcaaaggtctctcgggatctggtgtgctttctccagctggatcatgtcaacgtttattatggccaggactatcggaacaaatacaaagcacctacagactattgtctggtgctgaagcatccacaaatccagaagaaatctcaatatatcaaatacctttgttgtgatgatgtgaggacactgcatcagtgggtcaatgggatccgcattgcaaagtatgggaagcagctctatatgaactaccaagaagccttgaagaggacagagtcagcctatgattggacttccttatccagctccagcattaaatcgggatccagttcttccagcatcccagagtctcagtcaaaccactccaatcagtctgatagcggagtttctgacacccagccagcaggacacgtccgttcccagagcattgtgagctccgtattctctgaagcctggaaacgaggcactcagttggaagagtccagcaaggccagaatggagtctatgaatcggccctacacttcacttgtgccccctttatccccgcaacctaagatagtcaccccctacactgcttcacagccttcaccacctctacctcctccgccacccccacctcctcctccaccaccccctccaccaccccctcctcccccactccccagccagtctgcaccttctgcaggctcagcagccccaatgttcgtcaagtacagcacaataacacggctacagaatgcgtctcagcattcaggggccctgtttaagccgccaacacccccagtgatgcagtcacagtcagtgaagcctcagatcctggtaccccccaatggagttgttccaccaccccctccccctcctccacccccaaccccaggctctgccatggcccagctaaagcctgcaccgtgtgccccatcccttccacagttcagtgccccgcctcctccactgaagatccatcaagttcagcatattactcaggtggctcccccaacaccccccccacctcctcctatccctgcacccctccctccccaagctcccccaaaaccccttgtgaccatccccgcaccaaccagcaccaagactgtggcacctgttgtgactcaagctgcaccacccacacctactcctccagtgcccccagcaaaaaagcagccagctttccctgcttcttacattccaccctctccccctacccctcctgttccagtacccccgccaacattacccaagcaacagagcttctgtgcaaaaccccctccctctccactgtcaccggtgccctcggtcgtgaagcagatagccagccagtttccaccccctccaactccccctgccatggaatctcagcccttaaagcctgtcccagcaaatgtagctccacagtcccctcctgcagtaaaagcaaagcccaagtggcagcccagctccatcccagtcccttctccggacttccctcctccccctcctgaaagcagcctggtgtttcctcctccacccccatcacctgtcccagccccaccaccgccacctccacccacagcttctcctacccctgacaaaagtggatctccaggcaaaaagaccagtaagacgtccagccctgggggaaagaaaccacccccaaccccacagcgcaactccagcattaaatccagcagtggtgcagagcaccccgagcccaagagaccctcggtggacagtctagtcagcaagtttacaccgccagcagaatcagggtctcccagcaaggagaccctaccacctcctgcagcaccccccaagcctggaaaactcaatctttctggagtcaaccttcctggagttctccaacaagggtgtgtgtcagcaaaagcccctgttctgagtgggcgtggaaaggactccgtggtggaatttccttctcctccatccgattctgattttccaccccctccacctgaaacagaccttcctctgccccccattgagattccagcagttttctcgggaaacacctctccaaaagtggcagtcgttaatcctcaaccacaacaatggtctaaaatgtcagtgaagaaggcccctccacccacacgacccaaacggaatgatagcacccgcctcactcaagctgagatttctgagcagccaacaatggccacagttgtgccacaagtgcccacctctcccaaatccagccttagtgtccagcctggattcctggctgacctcaacaggacactgcaacgaaagtccatcactcggcacggctcactctcctcccgcatgtccagagcagaaccaacagccaccatggatgatatggcattgcctccaccaccccctgaactgctgtctgatcaacagaaggctggttacggaggcagtcatatatcaggctatgcaacgttgcggagaggaccccctcctgctccccccaaaagagaccagaacaccaagctctccagagactggtagccaccataggactttattttcatgatatctgtaatcactgctacaatcagctcacctgatcatctgtgaattcaggtgttcagagcctcctggtatgatgttattcaggtagtgtccagctatatgtgtatgtgtgtgtgtacacgtgcatgtacacacagctgtacagtgtgtgtatatatgtatacatatatgtatgtgtatgtgtatatagagagagagctgagagttattctatttattccttttctctcctaatctgaaaatgggtgttctgtattttgggtggaagaggcatagaaggggatgtgtgttgtctcttaagatttctatatcatgtggattggaccaaaaacttctaatcacttatttagaaggtatttataagtgtctgtccatgtgtagcctattcgtgcatgttgtgtattatataactaaggaatagatgtagaatgtgctatttctggttgagaaaaatcaccagaatgtttggtgtatctataaggcttttgtgtttgtttttccccagttggctgaagttagaattgcttgactgacacttcattgctatacatgaaggggcactttaaatcaggaaaatctctcagcttcatagaacgggtaactagtgcaggatggggaaatgttcacagacatcatctgtatgtggttgtgcatagaaagtaaatacatggcgtaattaactcagctgttctagctgcagtactgctgcagtgatccacccacatttaggatgtgctgacagataagctctttgcctacaatacatggataattagtgctataattctggatagttcctttttagtactgttttatgaagctttatcaacttggcttcatgatcctcactttgattgattttaagaggatggataacacagttatctctgtaatgttctgtcccagtatgtctttgggtcaccagttaccttcttaaaatatgtgctttaggtaggtgttattacatatctgtagacaattggtatatgaaatatacacatcctgtgccccaatatggtgcattatgaaaaacaaaatcattttctaaaatgcattttttgagcattgctctatagaagggaagggtgatgagagaacagaactggcccctgtacaggtgtcattaatctggttgtatatgggttataatatgtaatacaaaaagctcattaagtatgggactacatggagagggaagacagtttcatttatagctactggggctaccaggacccttgctgactgcagcctggttgtgattagttcaggttactaggtgttctgatggagtgggacagtccaagtccagtaactgacattacgttttatgcgtgtgcagtttggtataacgtggagtcagtgctctaacgacacactatacttctatatgcttttttctgtgaattttccttggtacatgagagaaataagtactctcatcaacttatgataaattggactattaggaataaaacaatctcagagcagctcctaaacaagagaataaaaatgggccatcccagcacttataaggggagcacatcttgtaatgaaagtctgtgcctattgttaatgattaccaatgcaaactgcagaaatcagttgacattgtcccacaaggaaaaagtgatgccagtaaagtgggggaagagatggtaaataattctagaatgagcaaaagtgcttaattagtacagtatactcaaggtcttgcataacccacactccacgaaaaccgcatcgtaaacagagagtgaacagcacctctccattgctacatctccagaatattgttcggttatgttcatgtggttatggagcaataagaatatataccattaatttttaggtctttcaaattgttcaccaagttttgtgtttgatatttatgaagtgatctttaacacatctgcattgttaatttaagcatgcacagaaatttgggtaatgtttgagtagattgccaagcgctactgtgattcatgaatgaatttctcatagtcttctgcctgcagttttatagtttgaggggcacccatatttgtgggttagagttagtaagaatatgaatccagttatcaaagtattcatccctgaggttttgagttttattgtggtggtgattttctcatgagaaggtagacaacacttcagtttttcttgagggggaaaaaaatgtacccgctaaccttttttcacccatgatttgagccctaaaacaacagcctttatgttttcagtgcaggatttcttggaatttcttgcttgtatcaatcctgatgatagccatcctgaacagatgcttctggtctgttttcctggaatagcagacatccttttgaacactaatgatgccaggaagagagtaaggctagaggaggagactgtcattttaaccccagtccagtggcttgtccgacaacaggccatttccctttacattcctccacagacagaaatggctattaaaaatgttttaacctcatgtatgaactgaatttaaaaaaccactaaagtgatactttatacttctgttttactccctagtgggttttctttaatttggatttttgttgggatgtagcttttcctagactgtatttctgtagctctttttctctggtgtattcatggaaagcatctactgccgcacgacactagtactgtgccttctttcactgccctctgctctgcagctctcacccagcttggctgcttcaagtctgtgcagttgacttggctgtactgaaaagtgaacagcatggattaactcatcctgctgctgagggcagtgcaaacaggtgcttattagaggtagtgacttgcttaattagtgacactcctaatttctactatggataatttcaaagtagaatcactctatgcttagagttttggcaccaatgctgtagggcagcagaatctattctcagtaaaataacttatggtttattagatattctgtattggattttaccagcttgacttttactgctcagatgctttctttcccccccttagacgctgtaattctcttgggaagagtaactattcttaaggtttttacagatacccaccttagttgtaaattggatagtttatatttctgggactttttaaatgaaaatgtggaatgttaagttacaaaagacttttcatcagaaaatttcaaacaaagtaaacatggcgttttatagtcctctaaaatctaggtgctcccacccaccaaaggcatatcctgcaaagggctgtgaactatcttggtgaactgtcttgggtcccctttccatgtatgttttcttgtcactgaaaacaaacaacgctgagtttatcaagaaaatttaaattgggggatcataataattccaaccaagtgacaactctgacatcaaggttattaggagctgtacatccaattcaagttttatttgctgctattctgggagaataaacttgtatatggagaataaactaataaacttgtatcgaggaaatccataaagttataaattagcctgaaaaatatttcaggtaatggtgtggattggcctgctttgactctcagccaccaacagaaatctttgtcacctttgttcctcagctaaaagtaattttgttataaacacaaagtgactttaaacaggtaaaaaacccattcctatttttgtacattaccaaaagtttttcatatacctacagagctaactaattacaactgatttaatccactcaagtttagaccagttaaacccataggatcctgtatggttatcaatgtgatgccttgcttttcataaaataggtataattgggtcatacacttgacgagagggtgactgtttctaggggaagaaaaccctttagattgcaggtaactttcacttttttttttttaaatatacactttacatttgtataaattatgcagggtactcctaaccctgtagaaatgtatgacctctcacaaagttgagatttgatccaaagagaaatgcaagtataaaagaattagatacttattatcttttaaggtttttttttttttttggtagagatgggggtctcactgtgttgcccaggctggtctcaaactcctggccacaagtgatcttcctgcctcagcctcccaaaatgctgagattacaggcatgagccactgtacccagcctttccttataaaattcaaagagaaaatttctacacctttatccctcaaataaaacaagtgctcagttcttaccgtgcccttgcaaggtctatatgtaaaagaaatctgaaatttagctgtagaataaaacttgataaataaaaagaaaaaacatacatttctccagttggtttgctctttgcttgttgaagtaataaaccgttttaaagagaaaatacttgctgtaaacccccagtgccttcaactcttttggcagaatatttttaaagaaatccagcaagcaaactttgaggtgctaatgaaagtaaaggaaggtggtatttctagttttggcagaaatgaaaagtgtctcacaagagacatcactacccacgtggggtctggctgctttctaccaaagacatttagagaagaagtgaattgagtcagggtgatggtgaacactacatattttatagatggttaagttgagaattaattatgtttatcatggatggctactaataccaagctcatgattgttgcagcctcaacgtcttaggcagtaaaacttgtctgcagcactaaagggggagaaacccttatattttgcaaactgtccattcgttaaatttattgtaacctaataccaaaaactgccgtttttcatattatttccccacctcctactttttttttttttttttgctacttgtaaaataaccccttctagaaaataagcattaactggaatgtttcaaacaattttgcttcattttactatcagccactagtgaactcttacagagatgtacatttaagataaaattagcttgtgctaagtgttttaaaaacattgtttactgttaaaggggaattgcacattatatttaactgggattgctccctccctcagttctttaaaaaacaagagtcaaggctcacaccaacttgtaggctgtgggagctttgccataggtagatacaatgtagaagtatacttttttaaagcatgaagaagacaaggaacttcattataatgtaccaggtagaggacattattattcaaaggattatgcacagctcagtgaagatgaagttacaatttttctcgcagctttgttgctattattttcttctgcataaatgtatgctcatttcattatgtgccttgctccctgattgtgcaaagctatatatatatatatatatatatagatagatagatagatagatatatgagagagatatattcagtactactgaggatgtttttctgaggatgtttttgttctgctggattaagttattttccaagttactcttgccagttatgtcagtaaactattgtaatggcttagcacactagtcgtacagtcagtgtaaatgtttttcatttacatgttttcattatatcagcttatcaaatccttaataaaaaaaattcatagatttcattta

SEQ ID NO: 24038 - DNA, 1754 bp, Homo Sapiens
attcaagatgattggaagtatgttgccatggtgattgatcgtatttttctgtgggttttcaccctggtgtgcattctagggacagcaggattgtttctgcaacccctgatggccagggaagatgcataagcactaagctgtgtgcctgcctgggagacttccttgtgtcagggcaggaggaggctgcttcctagtaagaacgtactttctgttatcaagctaccagctttgtttttggcatttcgaggtttacttattttccacttatcttggaatcatgcaaaaaaaaaatgtcaagagtatttattaccgataaatgaacatttaactagcctttttggtatggtaaagagatgtcaaaatgtgattctatgtgattagtatgctatgctatggaatatacatgtaaaaatgtttccttttagttgttgaaacaaaactggatagaaaaatgctgttcagaaatatgaaaagtcattcagttatcactacagatctcccagtaatttttcttatttagcccataatctctttgaaggtttatactaattcagcaatcccccatcgttacccatttcttaccatgcatttctcgttctttactgggtctaaagggctatgcctccatttcagagagcttcaactacttctcttgcatacttctaaattatactatgagaaatcatgcctagttattcattgttaatataactgtcttagtacaccataaactgggtggattataaacaacagaaacttctcagttttggaggttgggaggtccaaggtcaaggcaccagcaaatttggtgtctggtgagggtcctcttcctcaaagggggggtgccttctagctgtgtcctcacatgactgaagggactagctatctctgtggggtctattttataagggcactaaccccattcatgagagcagagcccccatggcctaatcacctttccaaggccccaccttctatctaagacaatcacgctgggaataggtttcaacatatgaattgggggaggacacatttggaccacagcatgaacctttagaacagggtttctcagccttagcactacggacattttgggctggataaatatgtgttggtacagaatgggggtatcctgtgcattgtaggatctttagcagtaccctagcctcaactcactagatgccaatgacataccttgcttcttcaccagttatgataaccaagaatgtctccattgttaaatgtccccttaggagcaaaattgcccctggttgagaaacattgctttagacaaattgttaagagtatcatgtactacacttctgaaacttaacgtgatcatcaccactgacagatgattcacagagagagactgtttgaatcttgtctcactagtttttcctgtgcaaaaataaaatggacagaattgcagcccgctgtgactcatgtttcaataagtcaaaagaaagatgtcgataaaaatttatatataaaaatcataagtaacagtaatggtagtataagagggatcagggatgtatacgaactaaggtaggtagctggcaggcaatctaaattcatcacaccaggctttcactcattaaatggcattaaacacctgcctacgattaaatgcaaattagatagggtctcctccgccttccaaagagcattggcttgaacttagataggttacttattataaataaatgaggtgtttgtgatctcaacaaaaaaaaaaaaaaaaaaaaaaa

SEQ ID NO: 24039 - DNA, 14634 bp, Homo Sapiens
ggaggaaacgccgcgcagcgccgggctggggcgggcggcccgggacaccgacagatttttctgtgaccatgaaagagagaaataaagaatgatccatgatttctaaacaccttttcctgaggatatagtcatgttggaaggccttgtagcctgggttctcaatacctatttgggaaaatatgtcaataacctgaacactgaccagctctcagttgcacttctcaaaggtgctgttgaattagaaaacttgccattaaagaaagatgccttgaaagaattggaattaccatttgaagtcaaagctggcttcattgggaaagtaacccttcagattcccttttatcgcccccatgtggacccttgggtgatctccatctccagccttcacttaattggagccccagagaaaatacaggatttcaatgatgaaaaggagaagctgttggaaagggaacgtaagaaagcactacttcaagccctggaggagaaatggaagaatgaccgccagcagaaaggggagtcctattggtattcagttaccgcctccgtagttacaaggattgtggagaatattgaattaaaaattcaagatgtccatttacgctttgaagatggtgtcaccaatccctcccatccttttgcttttggcatctgcattaagaatgtgtccatgcaaaatgctgtgaatgagcctgtacagaaactaatgcggaaaaagcaattagacgtagcagaatttagcatctattgggatgtcgattgcactttactgggggatttgcctcagatggagttacaggaggccatggccaggagcatggagagtcgcagccatcactacgtcctggagcctgtgtttgcatctgctcttttgaagagaaactgctccaagaagcccctgcggtctcggcacagtccccgtattgattgtgatattcagctggagaccattcccttgaaactctctcagctgcaataccggcaaatcatggaattcctcaaggagctggaacgaaaggagaggcaggtgaagttccgaaggtggaaacccaaggtggcgatatctaagaactgccgagaatggtggtattttgctttgaatgctaacttgtatgagatcagagagcagaggaaacgttgcacctgggactttatgttgcaccgcgctcgtgatgctgtatcttacactgacaaatatttcaacaagttaaaaggaggcctgctgtccacagatgacaaggaggaaatgtgtcggattgaagaggaacagagctttgaggaattgaagattttgcgtgaactggttcatgatcgatttcacaaacaggaagaactagcagagagtctgcgggagcctcagtttgattctccaggagcctgtccgggagccccagaacccggtggaggcagtgggatgctgcagtatctccagtcctggtttcctggatggggtggctggtacgggcagcagaccccagaagggaatgtggttgagggactgtcagcagagcaacaggagcagtggattcctgaagagatcctgggcactgaggagttttttgaccccactgcagatgcctcgtgtatgaacacgtatacaaagcgagatcatgtctttgccaaactgaatttgcagttgcagcgaggtacagtgactctgttacacaaggagcaaggaactcctcaaatgaatgaaagtgctttcatgcagctcgagttttcagatgtaaaacttctagcagagtctcttcctcgaagaaattcctcgttgctttcagtccggttgggtggactgtttcttcgagacctggctacagaaggaactatgtttcctcttctagtcttccctaatccacaaaaagaagttggcagagtctcacaatcttttggtctacaaactacatctgcagacagaagtgatcattacccagctgcagatccagatggccccgtttttgagatgctgtatgagagaaatccggcgcacagccactttgagaggcggctcaatgtcagcacaaggcccttgaacatcatatacaatccgcaggccattaaaaaagtagcagactttttctacaagggaaaggttcatacctcaggttttggttatcagtctgaacttgagctgagagtggctgaagctgcccgaagacaatataacaagctgaagatgcagaccaaggcagaaatccggcaaactcttgatcgtttgctagtgggtgatttcattgaggagagtaaacgatggaccgtgcggctggatatttctgcccctcaggtgatatttcctgatgatttcaaattcaagaatcctgtgttagttgtcgtggatctaggaagaatgcttttgacgaacacccaagataactccaggaggaaaagtagggatgggtcagcatctgaagagacccagtttagtgatgatgaatataagacccccctggccacacctcctaacaccccacctcccgagtcaagcagcagcaacggagagaaaacacctcccttttctggagttgagttcagtgaagaacagcttcaagcacatttaatgagcacaaagatgtatgagaggtactcgctgtcatttatggacctccagatcatggttggacgagtgaaagacaattggaagcatgtccaggatattgacgtgggaccaacacatgtggtagagaagttcaacgttcacctacagttagagcgtcgattgatttatacttcagatcccaaatatccaggagccgtgctctcaggcaacttaccagacttaaaaatccacattaatgaagataaaatatctgcactaaagaattgctttgctctcctcaccaccccagaaatgaaaacttctgacactcagattaaagaaaagatttttccccaggaggagcagcggggaagtttgcaagactccgtaatgaatttaacccagagcattgtgttgttggagcagcatacccgcgaggttctggtggagtcgcagctcctcctggcggaatttaaagtgaactgtatgcagcttggtgttgagagcaatggccggtacatttctgtgctcaaggtgtttggtaccaatgctcactttgtgaagaggccttatgatgctgaagtctccctaactgttcatggtttgctcctggtggataccatgcagacatatggtgctgattttgaccttttgatggcttcacataagaacttgagctttgatattccaacgggaagccttcgggatagcagggcccagtctcctgtctctggaccgaatgtggcccacttaactgatggagctacactgaacgaccgatcagctactagtgtttcacttgacaaaattcttaccaaagagcaagagtcccttattaagttggaatatcagtttgtgagttcagagtgcccatcgatgaatttagacagtactcttcaggtgatttccctacaggtgaataatttagatattatcctcaatccagagacgattgtggagctaattggttttcttcaaaaatcctttcccaaggaaaaagatgatttaagtcctcaacctttaatgactgattttgaaagaagcttcagagaacaaggaacttaccagtctacatatgaacaaaacactgaggttgcagtggaaatccataggctgaacttactgcttcttcggacagtgggcatggcaaatagagagaaatatggcagaaaaattgcaactgcaagtataggtggcaccaaagttaatgtctcaatgggtagcacgtttgacatgaatggttctcttggctgtttacagcttatggatttgacacaagataacgttaaaaaccagtatgttgtcagcattgggaattctgtaggctatgaaaatatcatcagtgatattggctactttgaatctgtgtttgtcagaatggaagatgcagccctcactgaagctttgagtttcacgtttgttgagagatctaaacaggagtgttttctcaacctgaagatggcttctttacattataaccactctgctaagtttttgaaggagttgacgttatccatggatgaactggaagaaaattttcgaggtatgctgaaaagcgcagccaccaaagtcaccacagtactagctaccaagactgccgagtatagcgagatggtatcgctctttgaaactccaaggaagactcgggaaccctttatcttagaggaaaatgaaatatatgggtttgacctagcttcgtctcatttggacactgtaaagctaatcttgaacataaacattgaatcaccagttgtttctatccctcggaagccggggagtcctgagttgttggtgggacacttgggacagatattcatccagaattttgtggcgggagatgatgaatccagaagtgaccgtctgcaggtggaaatcaaggacattaaactgtattctttgaattgcacccagttggcaggtagagaagctgttgggtctgaaggaagccggatgttttgcccaccttccgggtctggcagtgccaacagtcaggaggaagctcatttcacacgacatgatttctttgaatctttgcatagaggtcaagcttttcacatcctgaacaacaccaccattcagtttaaactggagaagatccctatagagagagaatctgaattgactttttctcttagcccagatgacctgggaacttctagcatcatgaagattgaaggaaaatttgtcaatccagttcaggtggtgttagcaaagcatgtatatgagcaggttttacaaaccctggacaatctcgtgtacagtgaagatctgaataagtatccagccagtgctacctcctccccttgccctgattctcctctgcctcccctcagtacctgtggagaatcttctgttgaaaggaaggagaatggattgttcagccactccagcctttctaacacctctcagaagtcattgtcagtgaaggaagtcaaatcctttactcagattcaagccaccttttgtatatcagagcttcaggttcagctaagtggagatctgactttgggggcccaaggtcttgtgagcttaaagtttcaggactttgaggtggaattcagtaaagaccatccccagactttatctattcagattgccctgcattctctgctgatggaggacttattggagaagaatccagattctaaatataagaacctgatggtgtctcgaggagcccctaagccatctagtttagcacaaaaagaatacctttctcagtcttgcccctcagtgtccaatgtggaatatcctgatatgcctcggtctctcccttcccacatggaagaagctcctaatgtcttccagttgtatcaaaggcccacctctgcgtcccggaaaaagcaaaaggaagtccaagacaaggactatcccttgaccccacctccttctccaacagtggatgagcccaagatacttgttggaaagagtaaatttgatgattccttagtccacatcaacatattcttggtagataagaaacatccagaattctcttccagttacaatcgagttaaccggagcattgatgttgattttaattgcttggatgtgctgatcacactgcaaacctgggttgtgatattagacttttttggaatcggctccactgcagacaaccacgcaatgaggctgcctcctgagggcattctgcacaacgtgaagttggagccacatgcctccatggagtctggacttcaggatccagtgaacaccaaactggatctcaaggttcattcactttctctagtgctgaataagaccaccagtgagcttgccaaagcaaatgtgtccaaattagtagcacacctggaaatgattgagggagacctggccttacagggcagcattgggagtctgtctctaagtgacctcacatgccatggagagttctacagagaacggttcactaccagtggtgaagaagcactcatcttccagacttttaaatacggacggcctgaccctctgctccggagagaacacgacattcgcgtgagcctccggatggcctctgtgcagtatgtgcatactcagcgtttccaggcagaggtggtggccttcattcagcatttcactcagctgcaggatgtcttagggcgccagcgagctgctattgaggggcagacggtgagagatcaagcccagcgctgttcacgggttctcctggatattgaggctggtgctcccgttctcttgatcccagaaagttccagatcaaataatctgattgtagcaaatttggggaagttgaaagtcaaaaataagtttctgtttgctggttttcctggcaccttttccctacaagataaggaatctgtgccttcagcttccccaacgggtattcccaaacacagtctgaggaaaacgacaagcacggaggagcccaggggaacccattcccaggggcagttcacgatgcctcttgctggaatgagcctaggaagcctgaagagtgagtttgtgcccagtacctccaccaagcagcaagggccgcaacccacactgtctgttggccaagagtccagtagtccagaagaccatgtctgcctgctggattgcgttgtcgtggatctccaggacatggacatctttgctgcagagagacatccgagagaatactcgaaggcaccagaggatagtagtggagatctgatcttcccttcctattttgtgcgacagacaggaggaagcctcttaaccgagccttgtaggctgaaattgcaggtggaaaggaatttggacaaagaaataagtcatactgtgccagacatatctatccatggcaatctctcctcagtccactgctctctggatctgtataaatacaagctgatccgcggcttattagagaacaacctgggagaacccatagaggaatttatgcggccttatgatttacaagatccaagaattcatactgtcctgagtggagaagtgtacacctgtatgtgcttcctcattgatatggtgaatgtaagtctggagcttaaagatccaaaaagaaaagaaggtgctgggtccctagccagatttgacttcaagaaatgcaaactgctctatgaaagtttttccaaccaaaccaagtccattaacttggtttcccattccatgatggcttttgacacccgttatgctgggcagaagaccagccctggcatgacgaatgtgttcagctgtatctttcagcccgctaagaacagcagcaccacccaagggtccattcagattgaactacatttcagatctaccaaggattcctcctgctttacagtagttctcaacaatctccgtgtgtttctcatatttgactggctactgttagtccatgattttctccacactcccagtgatattaagaaacaaaatcatgttactccttctcgccaccgtaactctagcagcgaatctgctatagttcccaaaactgtgaagagtggagtagttaccaagcggtcttcccttcctgtgtccaatgaaaggcacctggaggtcaaggtcaatgtaacaggtacggagtttgtggtcattgaagatgtgtcctgcttcgacaccaatgccattattctgaaaggcaccacagtgctcacctataagccccggtttgttgatcgccccttttcaggaagtttgtttggcattgaggtgttttcatgccgactagggaatgagcatgatacagctctttcaattgtggatcccgtacaaattcaaatggagttggtggggaattcttcttatcaaaatagttcaggattgatggatgcattcaatagtgaagatttcccacctgtcctggagattcagttacaagccctggatatcagactctcctataatgatgttcagctgtttcttgccattgcaaaatccatcccagagcaagctaatgctgcagtgccagactcagtggccctggagtcagactccgttggcacttaccttccaggtgcatctcgcgttggagaggaaatcagagaagggacaagacacaccttagatcctgtcttggagttacagctggctaggctgcaggagctgggattcagcatggatgattgtcgcaaagctcttttggcgtgtcaaggccaattgaaaaaggcagcaagttggttgtttaagaatgcggaacctctgaagtctctttccttggcctccaccagccgagatagcccaggggctgtggcagcgccattgatctctggcgtggagatcaaagctgagagtgtgtgcatctgtttcatcgatgactgcatggattgtgatgttcctctcgctgaactcaccttttcccgtctgaattttcttcagcgtgtaagaactagccctgaaggctatgcccacttcaccctttctggagattattataaccgtgctctttcaggctgggagccatttattgagccttggccatgctctgtatcctggcaacagcaggcagctggtcgtctccatcctcctcgactgaagctagaagccaaggccaaacctcgtttggatatcaatatcacttctgtgctaattgaccagtatgtaagtaccaaggaatcgtggatggcagattactgtaaagatgacaaggacatagagtcagctaaatcagaagactggatgggctcttcggtggatcctccatgttttggacaaagcctcccccttgtctaccttagaactaggagtacagccagtctgactaacctagagcaccagatctatgctagagcagaggtgaaaacccccaagcgccggcagccctttgtcccctttgctctgaggaaccacacggggtgcactttgtggtttgccaccctgaccaccacacccaccagagctgcactctctcacagtgggagtccaggggtagttccagaagggaacggaacatttctcgatgatactcacaatgttagtgaatggcgagaagtccttacaggtgaagagattccctttgaatttgaagcaagaggaaagttaagacacagacacacccatgacctccggattcatcaactgcaagtgagagtaaatggctgggagcaagtgagcccagtgtctgtggacaaagtcgggaccttttttcgatatgcagcaccagataaaaattcatcttcctctacgattggcagcccaagcagcagaacaaatattatacatccccaggtttatttctcttcactcccaccagtgcgggtggtctttgcagtgactatggaaggcagtgcacggaaagtcatcactgtccggtcagccctcattgtgaggaacagacttgagacaccaatggaactaagactggatagcccatcagctccagacaagccagtggtgcttcctgctatcatgccaggggattcgtttgctgtgcctttacacctcacttcttggcggctacaggcccggcccaaaggattgggtgtatttttctgtaaggctcccattcattggaccaatgtagtgaagactgcagaaattagtagcagtaaacgagagtgccactctatggacacagaaaaaagccgatttttcaggttttgtgtggctataaagaaagagaattatccagattatatgccctcaaacatattttctgacagtgcaaaacagattttcagacagcctgggcataccatatatctcctgccaactgtggtaatctgcaacttgctaccctgtgaacttgatttttatgttaaaggaatgccaattaatgggacgctgaaacctggcaaggaggcagctctccatacagctgatacatcccagaacattgagctgggggtatcactggagaatttccccctctgtaaagaattgctcattccacctggaacccaaaactatatggtgagaatgcgactctatgacgtcaaccgtcggcagctgaacctcaccatccggattgtgtgtcgagcagaaggatccttaaagatcttcatttctgctccatattggctgattaacaaaacagggttgccactgatcttcagacaggacaatgccaagacagatgctgcaggccagtttgaggagcatgagctggcccgtagcctgagtcctctcttattctgctatgctgacaaagagcagccaaacctctgcacgatgagaatcggaagggggattcatccagaaggcatgccgggctggtgtcagggcttctccctggatggtggtagtggtgtccgagctttgaaagtcatccagcaaggaaaccgcccagggctgatctataacattggtattgatgtcaagaaaggccgaggtcgatacattgatacctgcatggtcatctttgccccccgttacctgttagataataaatcatctcacaagcttgcatttgcacagagggaatttgccaggggacagggaacagccaatcccgaaggttacatttccacccttcctggttccagtgtggtgttccactggcctcggaatgactatgatcagctattgtgtgtcagactgatggacgttcccaattgtatttggtctggaggctttgaagtcaacaagaataattccttccatatcaacatgagggataccttgggaaaatgcttcttcctacgagtggaaattactctccgaggagctacgtataggatctcatttagtgacacagatcagttacctcctcctttccgaattgacaacttttctaaggtcccggttgtctttactcagcatggcgtagctgaacccaggctccggactgaagtgaagcccatgacttcattggattatgcctgggacgaacccaccttgccaccttttatcactctgactgttaaaggggcagggtcctctgagatcaactgcaacatgaatgatttccaggataatcggcagctttattatgaaaatttcatttacattgctgctacatatacattctctggcttgcaggagggaacaggcaggcctgtggcttccaacaaggccattacctgtgcggagctcgttttggatgtctcacccaagacacaaagagtcattttaaaaaagaaggaaccaggaaagcgttctcagctgtggaggatgacaggaacaggaatgctggcccatgagggctcctcagttcctcacaatcccaataagccctcagccgcccgctccaccgaggggtctgccatcttagatattgctggtctcgctgcagtgactgacaacagatacgagccactgatgctgagaaagcctgaccgcaggcgaagcacaactcagacgtggagtttccgagaaggaaaactgacctgtgggttacatgggttggtcgtccaggccaaaggaggactttctggtttgtttgatggagctgaagttgttcttggtcctgacacttccatggagcttttggggccagttccacctgaacaacaatttattaatcaaaaaatgagacctggttctggaatgttatccatcagagtcatcccagatggaccaactagagcactccagataacagatttctgccaccggaaaagcagccgttcatatgaagtggatgaacttcctgtcaccgaacaagagctgcagaaattaaagaatccagatacagagcaggaattggaagtgcttgtgaggttagaaggtggaattgggttgtccttaattaataaagtcccagaagaactggtctttgcaagtcttacaggaatcaatgtgcactatacacagctggcaaccagtcacatgcttgaactcagcatacaggatgtacaggtggacaatcagctcattggtaccacgcagcccttcatgctctatgtgactcccctgagcaatgagaatgaggtcatcgagaccggcccagctgtgcaagtcaacgcagtgaagttccccagtaagagtgcactgaccaacatctacaagcatctgatgatcacagctcagagattcacagtgcaaattgaggagaaactgctcctcaagctgctaagtttctttggctacgatcaagcagaatcagaggtggaaaaatatgatgaaaacctccatgaaaagacagctgagcaaggtggaacaccaattcgatactactttgaaaatctcaaaatcagcattcctcagatcaagctaagtgtgttcacctccaacaagctcccattggatcttaaggccctaaaaagcaccttggggtttcctttgatacggtttgaagacgctgtgattaatctagatccattcactcgggtacatccctatgagaccaaggagttcatcatcaatgatatcctcaaacatttccaggaggaactcctcagccaggcagctcgaatcctgggatcagtggattttcttggcaatcctatggggcttttgaatgatgtttctgaaggggttactggactgataaaatatggaaatgtcgggggcctcatcagaaatgttacacacggagtatcaaactctgctgccaagtttgctggaacattatcagatggcttagggaagacgatggacaatcggcatcagtcagagcgggagtacatcaggtaccatgcagccacaagtggtgaacaccttgtagccggcatccatggcctggctcatggtatcattggtggactgaccagtgttataacttcgacagtggaaggtgtgaaaacagaagggggtgtcagcggtttcatatctggccttggaaaagggcttgttggcactgtaaccaagccagtggcaggcgccctggattttgcatcagaaacagcccaggcggtgagagacacagccacactcagcggccccaggactcaagcacagagggttcggaaaccgcgttgctgcacggggccccaggggctgcttccccgatattctgagagccaggcggaaggacaggagcagctcttcaaactcacagacaacatacaggacgaattcttcatcgctgtggagaacattgacagctactgcgtgctcatctcctccaaagctgtttacttcctgaaaagtggagactacgtggatcgagaagccattttcctagaagtcaaatacgatgacctctaccactgccttgtctccaaagaccatgggaaggtgtatgtgcaggtgaccaagaaagccgtgagcacgagcagtggagtgtccatccccggcccctcccaccagaagcccatggtccatgtgaaatctgaggtccttgctgtcaagttgtcacaagaaataaactacgcaaagagcctctactatgaacagcagcttatgttaagactcagcgaaaaccgagagcagctggagctggactcctgaagccccgctgctgagatgggcgctcccgacacagcgcagacccaccaggaggaaagaggcccagctctcagctgacgatggaggcagaaccggagtcgggtttggggaagttgtcaaggaatgagggaaagtaaatcctcatgaggaaaagtacaaatggaaatcgtattaatttgtgaggcagggagttattttagattatgggaaataatttttaaaggtattggttaaataacgtttaaaaacatgtactgagatgaatctaatttttagattgccctgtattttgttaacatgtatatatgtacaacagtgtgtttgtaaatatataggaacgtttctgaacagggtctgtgctatgtgtaaaggtttgttaactgtaaagtaatataaagttatattggatcttctattgcactaattctagatgtctaattcaggatactgtctatagaaaggcattcttaaaagttaaagaatgttacgtcttagttttggagactaaagtattcccagtaaagtgggttgaggtgagggctgtggtcctgaaagggacgcctttgacatcgtggctgtccagttgggctgtgagctgtggcacccaggactggcgctggcccttcagaaggatctaggagaggggcttgggagcccacttttaatttctcacccccattttacaaagagtgcttagattcttacaaattatgatgtaagttatccatttggctttttcctaactagtcttaccaaacttagggggaaacctgtgctccattaccacatgggtgcaagtcagcattgtaagttttctcaggttattattattagagaggttggaaacattggtaaactctgttgattgagaaggaaaaaaaaagtcccattgaactgttgcaacaaatcagaaatccacataaaagtgctctcctgcctgggcagcaacaaccaagaacaaagccccgggactgttttctttttaataaagccacaggcaggcatcgtagctccacagcccgaggggacacaggatggaaaccccaggatgagaagggagcagggagagttccagaaagggggatgaaataggagtattaaaaagctgcgttggtaagtttttcatggaaccaagatttgacaaaggcatctcttatccttggttttaaattcctgctgggagcaaggcctggtatgagcgccctgggtcttgtttttggtgtttcgcttttctgtaaggattaagcagatagggagaagggaaaaggggcctcactttagaatgaatgagtcaccttgtgatttttaaatttttattttaataaagctaatcaatttct

SEQ ID NO: 24040 - DNA, 1149 bp, Homo Sapiens
ctcacctgctcctctacctgctccaccctcaatccaccagaaccatgggctgctgtggctgctccagaggctgtggctccggctgtgggggctgtggctccagctgtgggggttgtggctctggctgtgggggctgtggctccggccgtgggggctgtggctctggctgtgggggctgcagctccagctgtgggggatgtggctccagatgttatgtgcctgtctgctgctgcaagcccgtgtgctcctgggtgccagcctgttcctgcaccagctgtggctcctgtgggggctccaaggggggctgtggctcctgtgggggctccaaggggggctgtggctcctgtgggggttccaaggggggctgtggttcttgtggctgctcccagtccagctgttgtaagccctgttgctgctcctcaggctgtggatcatcctgctgccagtccagctgctgcaagccctgctgctgccagtccagctgctgtgtccccgtgtgctgccagtccagctgctgcaagccctgttgctgccagtccaactgttgtgtccctgtgtgctgccagtgtaagatctgaggctctggacccagaccttcaggtttctcctgtttggtgaaagcatttcttatggttccctgagtcagttcgtcccacacatcctccctgaggcacctgcacctgctctagctcaccatccatgcacacacctccttccatggctcagctctcctctgggccctgccttcagcctcctcactccagaaacgtgtgtttccctgatgcgggaggtgtcctcgcctggacgcaggcacccagccgactgccacgatgttccctgcacttgggtgtggaccatcttcttcttctccctgggctgactgagatgcaaggtctgaccccacaaggccaggccgacgtttctgagtgatcactaagaaccagcttctcaaccaccatcaggaccctggatcctcctgggccgctgcctgttctcctgtggcccaagtgtgaccaggaaggtctctttccttcctgttgtctccatctgtttaaaaaaaaataacaaaataatgaatgaatttccttgcaataaagcctctcatgtctgtaaatcaaaaaaaaaaaaaaaaaaaaaaaaaaaaaaaaa

SEQ ID NO: 24041 - DNA, 4843 bp, Homo Sapiens
gtctcccggctccgtagtaagcatggcggcggcggcgttcgtggtccctcgggtgaaacagaaagcgggagctacgcggagagggagcgaagagcggggctgaggcggcggcgtcactgccaggaaacaaccccaacagtcagcgcgccggcggccgcggcggccctgagagctgactctgcagctgaggtagagagacaacgatcaggaaccctaagaagaggcgccagaggagccgccttctgcctcagaacggcgtgactcggagaattggagcgttattcagtatattaatgtcttattgataatggcagaacatccaccactactggatacaactcagatcttaagtagtgatatttctcttttgtctgcccctattgtaagtgcagatggaacacaacaggttattctggtacaagttaacccaggagaagcatttacaataagaagagaagatggacagtttcagtgcattacaggtcctgctcaggttccaatgatgtccccaaatggttctgtgcctcctatctatgtgcctcctggatatgccccacaggttattgaagacaatggtgttcgaagagttgtcgtggtccctcaggcaccagagtttcaccctggtagtcacacagttctccaccgttctccacatcctcctctacctggtttcattcctgtcccaactatgatgccgcctccaccacgtcatatgtactcacccgtgactggagctggagacatgacaacacagtatatgccacagtatcagtcttcacaagtctatggagatgtagatgctcactctacacatggaaggtccaactttagagatgaacgatctagtaaaacatatgaacgtttgcagaaaaaattgaaggatcgccaaggaacacagaaagataaaatgagcagtccaccatcatcaccccagaaatgcccttctcccattaatgaacataatggacttataaaaggacaaattgctggtggtataaacacaggatcagcaaaaatcaagtctgggaaggggaaaggtggtacacaagttgatacagaaattgaagaaaaagatgaagaaactaaagcatttgaagcacttctttccaacattgtcaaaccagtggcctccgacatccaggcaaggacagtagtacttacctggtcaccaccttccagcctcattaatggtgaaacagatgaaagtagtgtaccagagctctatggttatgaagttctgatctcaagtactggaaaagatgggaaatacaaaagtgtatatgtaggagaagaaacaaatatcactttaaatgatctcaagccagccatggattaccatgcaaaagtccaggcagaatataattctataaagggaactccttcagaggctgaaatctttaccaccttgagctgtgaacctgatatacctaatccaccaaggatagccaatcggaccaaaaattcactcactttgcaatggaaggcacctagtgacaatggttctaaaatccaaaactttgtattagaatgggatgaaggaaaaggaaatggagaattttgtcagtgttacatgggctcacagaaacaatttaaaattactaaactttcaccagcaatgggctgtaaattcagactatcggccagaaatgactatggtacaagtggttttagtgaagaagtcttatattacacctcaggctgtgctccttctatgccagcaagtcctgtattaaccaaggctggaattacttggttatccttacaatggagtaagccctcaggaacaccatcagatgaaggaatttcttacattttagagatggaggaagaaacttcaggatatggttttaagcctaaatatgatggagaagatcttgcttacacagtgaaaaatctcagacgtagtactaagtataaatttaaggttattgcttacaactcagaaggtaaaagtaatccaagtgaagtagtagaatttactacttgccctgataaaccaggcatacctgtaaagccttcagtgaaaggaaagatacattcacacagttttaaaataacctgggatccaccaaaagacaatggcggagcaaccatcaataaatatgtagtggagatggcagaaggttctaacggaaacaaatgggaaatgatatacagtggtgctaccagggaacatctttgtgatcgactgaatccaggctgtttctatcgtttacgagtttactgcatcagtgatggaggacagagtgcggtctctgaatctttacttgtgcagactccagctgtgcctcctggcccatgcctccctcccagattacagggtagacccaaagcaaaagaaatacagttacgatggggaccccctctggttgatggtggatcacccatttcctgttacagtgtggaaatgtctcctatagaaaaagatgaacctagagaagtttaccaaggttctgaagtagaatgtacagtgagcagccttcttcctggaaagacatacagcttcagactacgtgcagctaacaaaatggggtttggaccattttcagaaaaatgtgatattactacagcccctgggccaccagatcagtgcaagccccctcaagtgacatgtagatctgcaacttgtgcacaagtgaattgggaggttcctttgagtaatggaacagatgtcactgaatatcgactggagtggggaggagttgaaggaagtatgcagatatgttactgtgggcctggtctcagttatgaaataaaaggactttcaccagcaactacctattattgcagggtccaggctctgagtgttgtgggtgcaggccctttcagtgaagtagtagcctgtgtgactccaccatcagttcctggcattgtgacctgtcttcaagaaataagcgatgatgagatagaaaatccccattattcaccttctacatgccttgcaataagctgggaaaagccttgtgatcatggttcggaaatccttgcctacagcatagactttggagataaacaatccctaacagtgggaaaggttacaagctatattatcaacaatttgcaaccagatacaacatacagaatacgaattcaagccttgaatagccttggagctggtcctttcagccatatgataaaattaaaaactaagcctctccctcctgatccacctcgtctggaatgtgttgcctttagccaccagaaccttaagctgaaatggggagaaggaactccaaagacattgtcaaccgattctattcagtaccaccttcagatggaggataagaatggacggtttgtatccctatacagaggaccatgtcatacatacaaagtacaaagacttaatgagtcaacatcctataaattctgtattcaagcttgtaatgaagctggggaaggtcccctctcccaagaatatattttcactactccaaaatctgtcccagctgccttgaaagcccccaaaatagagaaagtaaatgatcacatttgtgaaattacatgggagtgtttacagccaatgaaaggtgatccagttatttacagtcttcaagttatgttgggaaaagattcagaattcaaacagatttacaagggtcccgactcttccttccggtattccagccttcagctgaactgtgaatatcgcttccgtgtatgtgccattcgccagtgccaagactctctgggacaccaggacctcgtaggtccctacagcaccacagtgctcttcatctctcagaggactgaaccaccagccagcaccaacagagacactgtggaaagcacaaggacccgacgggcactgagtgacgagcagtgtgctgccgtcatccttgtgctgtttgctttcttttccattttgattgcctttatcattcagtactttgtaatcaagtgaaaatataactttattttttaactctattacattttattttgtcatgtactaaaattatttctgtattgcttttataaaaaacagtggcatttagcactggcattgagactatagcacatcatttttgccattttcagtgcttatattgttaggtagaggctggcactttattagaatgcaagccacaaaaatatcaattttgttttttttgttagggtgggtcttctttttttctttccctctctctttttttaacaaatgccttcttatagaaaaactttctaagaggcaacaatttagaatggatattttgacgaatcggcatgagtgtaacagtgataacctgatctgtttgttttaaagattattaccaagtgaaaaattcagaatgaatagaatttacactaacatgctatataaaatgttaaagtctgatgctgtgaaagcaatctagtgctatatttctacctcctcatttgtcttaattatttggtaagtgggattatgatgagtaactggaggggcttagaaacaaaaactggatgaaagagtatgcatgaagaaaagcttctttgataaatgtggagttcttcattataaatatatattcatgaattcacagataagtacttaaagaacagacagtttacttggcctaaaaatattttgatgtttactcaaaaagtacctcttcaggtcttgagaacatggaaaagaattgagtgcttttaaatactttttagaaagtaatcataaaagtaaattgaatttcaaacctatttggcttctgttttgtgaacctttgaactatatgtatgtgtataagggtatacacatacatatatggcatataacaagtgtacacatatacacataatcaagtgtagaagtatatattacatacatacactcactctgtctggtataggctaatttgaa

SEQ ID NO: 24042 - DNA, 2183 bp, Homo Sapiens
gatgctgtctctaaggatgaacttcaaagggataaagtggtagaagatgatgaagatgactttcctacaacgcgttctgatggtgacttcttgcatagtaccaacggcaataaagaaaagttatttccacatgtgacaccaaaaggaattaatggtatagactttaaaggggaagcgataacttttaaagcaactactgctggaatccttgcaacactttctcattgtattgaactaatggttaaacgtgaggacagctggcagaagagactggataaggaaactgagaagaaaagaagaacagaggaagcatataaaaatgcaatgacagaacttaagaaaaaatcccactttggaggaccagattatgaagaaggccctaacagtctgattaatgaagaagagttctttgatgctgttgaagctgctcttgacagacaagataaaatagaagaacagtcacagagtgaaaaggtgagattacattggcctacatccttgccctctggagatgccttttcttctgtggggacacatagatttgtccaaaaggttgaagagatggtgcagaaccacatgacttactcattacaggatgtaggcggagatgccaattggcagttggttgtagaagaaggagaaatgaaggtatacagaagagaagtagaagaaaatgggattgttctggatcctttaaaagctacccatgcagttaaaggcgtcacaggacatgaagtctgcaattatttctggaatgttgacgttcgcaatgactgggaaacaactatagaaaactttcatgtggtggaaacattagctgataatgcaatcatcatttatcaaacacacaagagggtgtggcctgcttctcagcgagacgtattatatctttctgtcattcgaaagataccagccttgactgaaaatgaccctgaaacttggatagtttgtaatttttctgtggatcatgacagtactcctctaaacaaccgatgtgtccgtgccaaaataaatgttgctatgatttgtcaaaccttggtaagcccaccagagggaaaccaggaaattagcagggacaacattctatgcaagattacatatgtagctaatgtgaaccctggaggatgggcaccagcctcagtgttaagggcagtggcaaagcgagagtatcctaaatttctaaaacgttttacttcttacgtccaagaaaaaactgcaggaaagcctattttgttctagtattaacagtgactgaagcaaggctgtgtgacattccatgttggagaaaaaaagaaaaaaaaaagctgaatgctctaagctggaacgtaggatctatagccttgtctgtggcccaagaccttggccttgtgtacaaaaatgacaaaatattgcaatagcaaagctgaacatctaacactagctatctcttgctagatctccttgctcagcatataactataaatacatgtaaaattacatgtatatggctatatttttatttgcttgctcctagaagagaaaaaaaaatcaactttgaatcacaactaggaattgatgctttaatttttggatactttttcagaatttttaatttactatggtccggcctaagatcctctgttgtatcaggttttgtgcacaaaagaaaagcacaaaagttgaatgcacatggggcatgtgctttctgtgcaccaaatatctggatgaggttcttttttcaggcctacagtcaaatctgtgtccagaattttttgacttttttgctttgtataatcatagaattcattgctgctgatttctataatgattcatgttgtcatgtgtctcttaataactgagggctgtcagtaacctgtgattttgccttttctatagtcttactcccatgaagaaccttggttctgatggagaaagtgaaaagctttatttcttcccctagatatctttatatttctattatattttttagttgtgtactgtgtactagagatttttttcagtttgttatgaacacaatttggtaagccctaaattggttctgcctgtctccaaacagaaacatctgtacaaatcttgttggtatagactactttctggaaaatggtcaagataagttcatgttttcttgaaatttctaagatagtatatggtatcacttgtttaaagcaaaaaaaaaaaaaaaa

SEQ ID NO: 24043 - DNA, 1952 bp, Homo Sapiens
aaaatttaaatctcgggcttcaaatgcccaggccaaacccagctctttttttttgcagatgcagaagagagtatcgggtcactatgtgacatctgcagctgccaagagtgtccatgctgcccctaatcctgctccaaaagaactgacaaataaagaggcagaaagggatatgctgccttctccggagcagactctttctcccttaagtaaaatgcctcactctgttccacaaccccttgttgaaaaaactgatgatgatgtcatcggtcaggctcctgctgaagcctcccctcctcccatagctccaaaacctgtgacaattcctgctagtcaggtatccacacaaaatctgaagactttgaaaacttttggtgccccacgaccatactcaagttctggtccttcaccgtttgctcttgctgtagtgaaaaggtcacagtctttcagtaaagagcgcaccgagtcacctagtgccagtgcattggtccaacctccagccaacacagaggaagggaagactcattctgtaaataaatttgtggacatcccacagcttggtgtgtctgataaggaaaataactctgcacataatgaacagaattcccaaataccaactccaactgatggcccatcattcactgttatgagacaaagttctttaacattccaaagctctgacccagaacagatgcgacagagtttgctgactgcaatccgttcgggagaggctgctgccaaattgaaaagggttaccattccatcaaatacaatatctgtgaatggaaggtcaagactcagccattccatgtcccctgatgcccaggacggccattaaatgttaccctgccacaccactgcacttcacttccacttcagaccaacttcatactaatggaacattttggcaaatgtatattcagatgtacactaatatattatctattaaaatattagaatttgtgttgtggcttttaatgccagaagaaaagttaccagaatttataatttatagtaattttttgatcttttttttgccttaagagttgaatatgctgctttagaactttaaaacaaggtgtaaatgattttcattttttacaaatgaaaaataattcctttgtattgatttcacttaccagcacattctctacaatggtgacttagacaaaagtataagattcatagactttatatttgtatgacatacaactaggacaaacatagatatgacatttgctgcctcagtgtagcaattggaaatatttataagttatatgaaagcctgttttgggctgaaagaatgatttagaaaactagtgataccaaataagtatattcagttcaataattattttcaatgatgaatcacttagtgtgaaagacttgccttgtgtattctttatgtaattacaaatcactgtcaattttatgggaagctcatagtattttaatattttattaacatggaactcttgtttttttaatctttagaacttaaattctacaagaattttaaatattttctgtatataattatgacattgtcacacagaaattacacattttatgtgccagaagccttaaacatctttctgtgaaaatgctgatatattgtgacagttatttcacatttgatatgtagagaggaataggggttagtttatgtttatattgaaaaactttaaagactatttggaagttccagaaattctggttttaattcaagtaaaatgataaaatagtcattatatagttcagatgctaatattctaagtaataatatatatttacattgaagctaaaactgttaagcaaaacaatgcccatttgtcggcttacaactcttccggagtctagagcctgttggtgttctgtccctactttaagaatttaattgctcacttattctgaaagctttgttcaaacaagatgatattaaatttgttttcact

SEQ ID NO: 24044 - DNA, 2206 bp, Homo Sapiens
atattgtctactgaaagctgccgctgaagctgccgccgttgcctccgccgccaagagtgagcgagcggacccgcgatggagaccatggcgagcccagggaaagacaattatcgaatgaagagctataagaacaatgctctaaaccctgaagaaatgagacgaagaagagaggaagagggcattcagctccggaagcagaagcgagagcaacaactttttaaacggagaaatgtggagctgattaatgaagaagctgccatgttcgatagtcttctcatggactcttatgtgagctctaccactggggagagtgtgatcacaagagagatggtggagatgctcttttctgatgattctgacctgcagttagcaaccacacagaaattccggaaactgctctccaaagagcctagtcctccaatagatgaagttatcaacactccaagagtggtggatcggttcgtggagtttctgaagaggaatgagaattgtacattacagtttgaagctgcctgggctctaacgaatattgcctctggaacctctcagcggaccaaaattgtcattgaagcaggggctgtccccatttttatagagctgcttaattcagactttgaggatgttcaggaacaggcagtctgggcactgggaaacatagctggagatagctctgtttgccgagattacgtcttgaactgttccatccttaatcctttgttaacactccttaccaagtccacacgactgacgatggcacggaatgcagtctgggccctgtcaaatctctgccgagggaaaaacccacccccagagtttgcaaaggtctctccttgtttgcctgtactgtctcgcctactcttcagcagcgactcggacttgctggcagatgcttgctgggccctttcttatctgtctgatggccccaatgagaagatccaggcagtcatagactccggagtctgccggagattggtagagctgctgatgcacaatgattacaaagtggcttctcctgccctgagagccgtgggtaacatcgtcactggggatgacatccagacccaggtcattcttaactgttcagccctaccttgccttctccacttgttgagcagtcccaaggagtcaatccggaaggaagcttgctggactatttcaaatattactgctggcaacagggctcaaatacaggctgttatagatgcaaatatcttccctgtgttgatcgaaatccttcagaaagcagagtttcgtacaaggaaagaggcagcctgggccatcaccaatgccacatcaggaggaacccctgagcagatcaggtacctggtctcactgggctgcatcaaacccctatgtgacttgctgactgtaatggattcgaagattgtgcaagtggccctcaatggactggagaacatcctgcggcttggagagcaagagggcaagcgcagtggctcaggggtcaatccttattgtggcctcatagaggaagcctatggcttggataaaattgagtttctccagagccacgagaaccaggagatctaccagaaggccttcgacctcattgagcactactttggtgtagaagacgatgatagcagcctggctccccaagtcgatgaaacgcaacagcagttcatcttccagcagcctgaggcccccatggagggcttccagctataatatctgcctccagggaggggaggggatgggaagcaccaccagccagcggaagagcagccctctggtgggcgggaaaccagtgtccccaccatcagccaccacacacctctgctgccctggagactgtgctcttgacctgctccgcccccttccctggagggagcaccctctggacagacagaaccatctgaggctcacctttgggttttgtgacaagaaggggacgtgttgggtttttcttccttacactatattttggctgcacacatgtctttaacccaggagcccaggggtagacaaaggaggactaaggtaatcaatttgcacctttttttatttttattttttttctttttttcttcagtggtgacttccttccctttatcttttttcattcttcccggtcctctgccctgatctgtgtaactcttatcttgggtacttgagcagacggtatattccagaggtgggaggtgggaggggaagggagaaatccaaaacaaagtgttcttgctctgac

SEQ ID NO: 24045 - DNA, 2303 bp, Homo Sapiens
gaccaaatccagttactagagcccaagcaaatgagaacaggtaagattccagtctccccctcttacaggcatctctgactatgagtgattctcttggagcccaaccatgacaagagacagaactccccaccacaaagactgcactgcatatctcataaaggagagcacactatggacagcctcctcctctccttcccagccccctccttatgtgggctgcagatgagcattgatagtagtaggactggctctgctacatcatcatagactctgaagggaggtgtgtgatattgattgctgaaaggtccctagaggctctcttcatactattcaacattctgttacagtcattaaaaaataatgtgtacagagatgtcctgatacacatgtccttcattttctgacagaccttggttgaatatggagcaaatgtcaccatgcagaaccacgctggggaaaagccctcccagagcgccgagcggcaggggcacaccctgtgctccaggtacctggtggtggtggagacctgcatgtcgctggcctctcaagtggtgaagttaaccaagcagctaaaggaacaaacagtagaacgtgtcacgctgcagaaccaactccaacaatttctagaagcccagaaatcagagggcaagtcactcccttcttcacccagttcaccatcctcacctgcctccagaaagtcccagtggaaatctccagatgcagatgatgattctgtagccaaaagcaagccaggagtccaagaggggattcaggttcttggaagcctgtcagcctccagccgggctagacccaaagcaaaagatgaacattctgataaaatcttacgccagttattgggaaaggaaatctcagaaaatgtctgcacccaggaaaaactgtccttggaattccaggatgctcaggcttcctctagaaattctaaaaagatcccactggagaagagggaactgaagttagccaggctgagacagctgatgcagaggtcactgagtgagtctgacacagactccaacaactctgaggaccccaagactaccccagtgaggaaggctgaccgaccaaggccgcagcccattgtagaaagcgtagagagtatggacagcgcagaaagcctgcacctgatgattaagaaacacaccttggcatcagggggacgcaggtttcctttcagcatcaaggcctccaaatccctggatggccacagcccatctcccacctcagagagcagcgaaccagacttagaatcccagtatccaggctcagggagtattcctccaaaccagccctctggtgaccctcagcagcccagccctgacagtactgctgcccagaaagttgccacaagtcccaagagtgccctcaagtctccatcttccaagcgtaggacatctcagaacttaaaactgagagttacctttgaggagcctgtggtgcagatggagcagcctagccttgaactgaatggagaaaaagacaaagataagggcaggactctccagcggacctccacaagtaacgaatcgggggatcaactgaaaaggccttttggagcctttcgatctatcatggagacactaagtggcaaccaaaacaataataataactaccaggcagccaaccagctgaaaacctctacattgcccttgacctcacttgggaggaagacagatgccaagggaaaccctgccagctccgctagcaaaggaaagaataaggcagcataatgacatcaatagaaaaatgaagaaatcctacagcataaagcacattgctgagccagagtcaaaagaactcttcttgtaaatcactttttaaattttctctcactgatgccctttggaaattattggaaatttctggactatcctctttggaaagagaaccatgaaaacaatgcctcaccagcagaagaacagaatatcaggatgccttaaatttatagtagtagactgtaaaagattcattttggggtgatatctgtatatataacttgtttttttaaaagatgccgtttaaaagcatgattgggaaaatgtatgttttttaagagtagattgattcaccctacccacaggacattcaccaagccactgataccattttatatttcatcaattgcatgagtatttgctaatgttgattgaacctccctttccccataatgtgggcagatttggctcagctccttcatgagatcaggtcagtggtattgtttctgtcaagagtgttttttctgtcatttctactttttgtataaaggaaataaaacaatgttaacagcc

SEQ ID NO: 24046 - DNA, 3472 bp, Homo Sapiens
gacaaagaacaagctgcctggcctcatcacatccatggagaccatcggtgccaaagcgctggaggacttcgcagacaacatcaagaatgacccggacaaggagtacaacatgccgaaggacggcaccgtacacgagctcaccagcaatgccatcctcttcctgcagcagcttttggacttccaggagacggcaggcgccatgctggcctcccaagagaccagctcttcggccaccagctacagctctgagttcagcaagcggctgctaagcacctatatctgtaaagtgctgggcaacctgcagttgaacttgctgagcaagtccaaggtgtacgaggacccagctctgagcgccatcttcctgcacaacaactacaattacatcctcaagtccctggagaagtctgaactgatccagctggtggcagtgacacagaagactgctgagcgctcctaccgggagcacattgagcagcagatccagacctaccagcgcagctggttaaaggtgactgattacatcgcagagaagaatctacctgtgttccagccgggagtcaagctccgggacaaggagcggcagattatcaaggagcgttttaagggcttcaatgatggcctcgaagaactgtgcaaaatccagaaggcctgggctattccagacacagagcagagggacaggattcgccaggcccagaagaccattgtcaaggagacctacggggcctttctacagaagtttggcagcgtgcccttcaccaagaacccggagaagtacatcaagtacggggtggagcaggtgggcgacatgatcgatcgccttttcgacacctctgcctgagcctgctgctagccctgcctggttccaccagactggcgtgtcattggacagataaaccagtgttagcttgcctctgggctgggtgagcttgaagtcctctgggacagagacctgtctccacgcctccgggagctgtgtccctgagccccctagtcctggctcctgctttttccccacagcccgtgttcccagccgaaccagcactctcccggaagcctggggtccctccacaccttggcttttatgaccctgatggcttctgaaacaggaaaagagagaaggaagacagaggcctgtgcccactgctgctccatgtgtaccaagagcagcagggcagaagggccctccctccagcctaggtcagaggtggggacagagaactcccctacagcccagagatgtggcagggctcagagaagcagccagagctcctggaggaaaggcagtcgggactgaccccctctcttaaaacacattcccgcccgcccacaggcctgaggtctgggacctttccctcccaggagtcccctaggtggctgggggaggcaggctcactggccattttccctagagtccagcacactgcaggaggcgttcggaggaggagttccgccccaccctctacagcctccctcaggcccctgtctctggtccccagcctcagtgcctcttggcccagggccaggcagtcgtggttgcagaaggagcaattaggctgcctgcctgtgggctgggagacagggacaatggggaaaagttaaggagcaaaatgggggttggaagcaaaaaataggaccccacctatttaggacgagattgaagactgacccttgaggcacacttgcactggagatgggtttatttcacgctctgtgcttgtgtgctagcggagggagagcttagggtggcttaatccagaggccctgtcatggcccgcccccagccatgggaaagcaaacttcatcctaaggtgtgcagcccaggccctgcccctttacagtctaggccgcctgccatggggtgcagcctctccaggggctgcgtcagacttgcacgctgcccacatccagattcctgcaaagacgaattgggtgcacagcaccccaaccacatacacgaggaagaagatgcggtcagcagtctcaggccagcttctctgtgacccctttactcctctggagggctctgtggggagagatacagggaaaggagctgttcttcaaggtcccctcaacatgagcggaagagcgaaccccaggggtcatcagcctgtatcgcttcctttcttagattctcagctgatgaaaatttgggtctggcccatttcaggccatcttcagttgaagaaacaccctcttaggctgtgcaaggcatgggttatcaggggattgaggtcacctgggacttcagggaggctcagcttgctccctgccccagacctgtttcttctaagggaggaggacatggtggagaccagggacaggagagccagcagggtggatgcaaggggcctctacccacacctggacctccgtgccctcaccccagccctaggtgtgcacctaggcctcattccttaccccccagcccctgcccaccttcagcaggatgaggccctgggttgccgtgctctcgctgttcccctctcggggctgggctggggccgctcttggccccaaggttgccccgggccagcagcccagccagcagcacagtctctatggtgctgaggaagagcagcagcagcaggatggtgaagtagtaaactgggggaggcagggcacagggagatgctcaggggccagtccctgtgtctctggtgcccagcgagctgagcaccagtgggtgaccggggagaaacagggcagactgggtaagggagcagggcttactgagcagtgggttgcaggaggaggagctgggcagggcctgcaccagggaggagtggaggacgaggtaactcagcagcaatgtcaccttgtagcctatgcgctcaatggcccggaggggcagcaaccccccgcacacgtcagccaacagcagtgcctctgcaggcaccaagagagcgatgatggacttgagcgccgtgttcttcagcctcagctggaaggggaaaagtcagggccttcccggcgggggggaaggaggtgggcatcgggggcatggggcctggcctctggccgtgcatcctcactcccacccgcctccagcagccctctgtcggcctcctcgcgacttgactcaccgtcacctggaagcagggcaccagctgctggggtgggacttgggtcttcagatcataaactacgtattccctcttgacactcacaatctcgttcaccacgtgggcctggaactctaactccatcgctgaggggtgggaatgagaactatgaaccaggaaggagagatcccagctgccaagtctgggggtagcagactggagcccaggggtgatggagacttttgatggcttttggcagggacagacttggacacaaaaccgatccatagaagggcttcccaaaccttgttttgcaacatcccaaattgtctccagttgaaggaaggcctttatcagattcatagatgagctttcattgtaaaaataaatgtactttgcaccacttc

SEQ ID NO: 24047 - DNA, 2245 bp, Homo Sapiens
ttttcaagagcttgggatgttcttcttgaccatatacagtcagcagcactcagcaaaaacaatgaagtatctctggctgctctgaaaagcttccaggaaattttacagattgtgtcccctgtcagagactcagataagcctgagacaccacctgtagttaatgtacctgtgcctgttcttatagggcccatatcaggcatgagcaggccatttgtaagaacagattccattggagaaaaactagggagatatagtagctctgagccacccattgttactgatgagcttgaagatttgaatctatggtgggctgcgtggaatacctggtatagaattggatctgaaagtactaagcctcctattacttttgataaactaacttttattcctagccagccttttcttacagctttaattcagatatttccagctctctaccaacacataaaaactggtttcaatatggatgacttgcaaaagttgggagtcatattgcacagtgctatttcagtcccaataagttcagatgcatccccttttattcttccatcttataccgaagcagttttgacaagtttacaggaagctgtacttacagctttagatgttctccaaaaggccatttgtgtaggaccagaaaacatgcagataatgtatccagctatatttgaccagttgttggcatttgtagagttttcctgtaaacctccacagtatggacagctggaaacaaagcacgttgcaaatgcaaaatataatcaggcggaatgggtagccttgaattatgtgccgtttgctgaaaggtctttagaagtagttgtggatttataccaaaaaacagcgtgtcacaaagcagtggtgaatgagaaagtgctccagaatattattaagactcttagggttcctctcagtttgaagtattcctgcccttctgaaagcacatggaaactagcagtatcctctctcctcagagttctttctattgggctacctgttgcccggcagcatgcttcttctggaaaatttggcagtatgtggccagaactagccaatacttttgaagattttctctttactaaaagcatacctccagataatctctctattcaagagtttcaaagaaatgaaaatattgatgtcgaggtagttcaacttatcagcaatgagatactaccttatgccaattttattcctaaggaatttgttggtcaaataatgacaatgcttaacaagggctcaatacattctcagtcatcttcatttacagaagcagagattgatattcgtttgagagaggaattttctaaaatgtgttttgaaacattactccagttttccttcagtaataaagtcacaacacctcaagaaggctacatctcacgaatggcactctcagtgcttttaaagaggtcccaagatgtactacatcgctatatagaggatgaaagattaagtggtaaatgccctcttccaaggcaacaagtaacagaaattatatttgttttaaaagcagtcagtactcttattgattcacttaagaaaactcagcctgagaatgttgatggaaatacctgggcacaagtaattgccttatacccaactttagtagaatgcatcacctgttcttcttcagaagtctgttctgcacttaaagaggcactagttccttttaaggatttcatgcagccaccagcatccagagttcaaaatggagaatcttgaccggctacaatatatttgaaagcaggaagatagtctaaaaaatgtttgctcctaattgagtcttctgtgagaaggacatttcttactgcagataattcttggcagctgttgttggcctcctttaaattctacttacctgagttcagtaattcatattacaggcttgcatatcaacaaaggctcctgaatgaacagcagtgtaaggctttaataaattaaactgatgggagggataattaacactacagtatacatgctaccatatctccagttggtgatttaaagtgagcttatgtacagtttgtggtgtatgtgttaatgatgtactttttaaaaagaaagaagagatatttcaattcagtcagatttattagtctggtgtttttgcaccctttttcaagtacaaaatcgtactagaattttatgcaagatggtactgtaacattccatattatctataaccagcctttgttaacaaagggaactgatatacttgtgtgtataataaatggtacagttctgt

SEQ ID NO: 24048 - DNA, 2165 bp, Homo Sapiens
caaatgagaaagattcaaattgtttgttattttctgtattttcagtcaaaaaatcagttatatagtgattttaaagcagattaatggaaaaaaattcatgtaacaattacctgaaaatttataacctattcctaatcaaacccaattatatcagaatacctttctgaatttgagatttttgctctacattttataatgaataaggctattttttgaaggtatttcattttgaattctgtcattaacctcaaaagctttctactgctttgcggtgaaggcaaaatattcgataactcaacttaggccccactgttccccaacttcatggaggccagaagactttactttgttccataatgaaatataaacacagaacaaagttgtaaaagtagcatggatatgttgaaactttggacaagcttcttgtcctttggaatatgggatttatattcatctcctcaatatcccatgtatgcacagaaacttcagttctatttctatagacacaggaacctagtgactattgaacgtaattgtaataaaatgctgctcattgagccaaagagaagaaatgatttattaacatggggacaccaagaaaaacaaagtatgcttttattccctttgtcaagctcagttttagggttttttcttttttttatagtgacaatccatagatatagacattcctaaaagaaaaataaataattcagtagatatatgtcactgttacctgaatatggaatgaatttgatgttttttattttgttgagacagggtcttgctctgtcacccagactggagtgcagtggcatgatcacacctcactgcagccttggcctctcaggctcgtgatcctcctgcctcaacctcgcaagtagcttgggactacaggcgtgtgccaccagtcctggctaattttttgtagatataaggtctcatgatattgcccaggctgaatttgatgttatttcaagttgattttcatgtgtttgggagcttgtcttgttctcaactactacgcaggtagacagtcttcccccagagactcattagattgcaatatagaggcactttctcatttccctattgttcctaatacagaattgtagagctggagagtaccttcagttttctaaatctattctcaaacaggatatcactaacctctttagaatcattcctcagtatacatcaatttattgagaactgcctaatactcaagaaattaaatcctgagttcagtaggctgtgttccaagcaggaattattttcacttaccaaaatatctcctattacctcaaggtatccttgttgaggaatgctgaaaactaaattttaagtatcaagtctagaccatagagtgctttggtgggagtattttgattacctcctacccatcagaagcaggcagctaatattgtgaactgagtatttttgtcaaaagtcacagggaagagactacagaagaatgagaagggtcaaaaggacctagtgtggcttactacatggatcttgtctcttggaggtctgtcgtagaagaagaaacaaatagaggtgatgaagacacagaacaggctcagtcagcatcctcacccagagatggcaacatctattaagaccaatgcaataccttttcatcttcagcaaatgttgtttcatctgtttttgatccttggcattgtcaaaaacttaactgcaggtccagtgtatatttttccttatttttcccttttagctatctgctaaagtgagtaaatgccacagctgtacttttccaaagaaaaagaactattgacaacttatagcctgtcatgcaggtcatgtttcaaatcaaggctgaaattttcaacagctgtgggaaaaactaaaacacagaaatactgtacagtattagtgtttttttaaagaaattgttagtgcattattgagtatactaaatatctgtgattaaataaattagttctaacttttgattttgggagcccaaaataaagggagtgttgttttcatggttatgccttgtttgtggagtcaagtgttgatatacttgaggcatgttatgtgtcttctaattaatatttttatcaccttgaatttgtgtctcttccgagcattaaagatactatggatcttaaattccttattaaaaaaatgcaagtgtg

SEQ ID NO: 24049 - DNA, 2966 bp, Homo Sapiens
tagaaaatgccactcctcgggggaagtccagaatggcaagatgtccaccaacggtgtgtccaacggtgtgtccaatggcctgcaccttcatagcaatggcttccggctgccggagagtaggggacatgtcagcccccaagtagagctaccaccatacctggagcgtgtgaaacagcaagccaatgaggcttttgcctgccagcagtggacccaagccattcagctttacagcaaggctgtgcagagggcccctcacaatgccatgctttatggaaaccgagcagcagcctacatgaagcgcaagtgggatggtgaccactatgatgccctgagggactgcctcaaggccatctccctaaacccatgccacctgaaggcacactttcgcctggcccgctgcctctttgagctcaagtatgtggctgaagccctggagtgcctggacgacttcaaagggaaatttccggagcaggcccacagcagcgcttgtgatgcattgggccgcgacatcacagctgccctcttctctaaaaatgatggtgaggagaagaagggacctggtggcggcgccccagtccgcctccgcagcacgagccgcaaggactccatctcagaggatgaaatggtgctgcgggagcgaagctacgactatcagttccgctactgcggccactgcaacaccaccacggatatcaaagaggccaatttctttggcagcaacgctcagtatatcgtcagtggctctgacgatggctccttcttcatctgggaaaaggagaccaccaacctggtccgtgtgctccaaggggatgagtccattgtcaactgcctgcagccacaccccagctactgcttcctggccaccagtggcatcgatcctgttgtgcggctctggaacccccgaccagagagtgaagacctcacaggccgagtcgtggaagatatggagggtgcttcacaggccaaccagcggcgcatgaatgcagacccgttggaggtgatgctgctcaacatgggctaccggatcacgggcctgagcagtgggggtgccggggcctctgatgatgaggacagctctgagggccaggtgcagtgccggcccagctagaccctccagccctggtccccagcccctgctactggctggaccctctgccctgggcaggaggtcaggggattctgttttggtttgtcttccccaccacccttttttttcatttcccctgttttgtttgttagtttggcgttaggggtggaggtttctacaacttgctggctttcggactctgggctgattgtcccctgactatccccagccctgaaaaaaagagcaggaggggacacccctccatatgcccccccccatctcctgctttcatgtccctggagggctctggcctgcctcaaaaccccttctgcctcaggtggggaggaacaagctgaactgtcttcagggactgtcctgccctttagctggcagcagcaggaggagtgggattcccaattggtaagggctcgccttggcctgttgccactcttgctccctagcctgcaaggctagctcccctgtggtcttcaggaaaggttttgaaaaaggatgggtcccaccctccctccagagccaccagtgttagagcggagcccaaaggaaggatgggagccctggagtgggcaagaccaggccacctgctgaggtcgctgtggagcaccctcgctcctctcctggctactagctctggccctgcacctactctcactggccacctctggaggctctgcctttcccaagggccctggcagagggtggggcactgcaccttaccccacccatccatgccagcacttctgcactacggccattctcctcttgggcgctcctcagcctcactgtgacctttctgccagagctcccagccaggcctactctgctgaggtggcgcttcctgctaagggcccttctctgccctttctgccctccttcccaacccacatgctgagccgccacaaagaccaaagaagtgatggcttttctctgtcccctgctgctctgaggggagaggggtgggtctcctgagccactcagatgggaaagtcccttactcggcccctccctccccagcagccccaagctttacactggatgcagcgctcaacccaccactcaccaggcctctcctcccctctgcccccggctcttagctccagctgctccaggtagttggttcatccttccccctctctccctccctgcttccccttcagtgcttacttggctccagccctccagctgcagcccctggggaaaagcagcctcccttctcctctccctccactccctcgctccctccctcagcccctgtctctgccaggtgcctcctctcagtcaggcttcagagcagccctggagacaggagggccatgttaaaagctttttcacagttttaagaagacaagtggagggtgaggatagtggtggggggtctggcaccatctcattgctttaatcccagcaacacaggtggcagcttctcccccttccttcccaccccagtccctcttcccacccctctcttctagcttggtaatgaagtatatttattggtgaaggaaacagctgctgctgcttctcctgctgctgggacctgctcccctgtctcttctccgtgacctttctctagccagggagaagggagagcaggagtattggggctgggccctggggcccaaggaccagctgggtcccctttgctttcttgtgttccagccacctgccatttcctccctgcctcccaccctccctccctgccccctgtcctgcttcccaccccctgcctgcccagcctgggccctgcagtgtggagagacacataagccttactgtcctctgggggcaggagccgagcctttttgttgctccgctcccaggagagtgagggtgacgcaattgattaaaaccattttgttct

SEQ ID NO: 24050 - DNA, 3546 bp, Homo Sapiens
acacttcagccacagaagggaggggttttccggcatcagggttggcaactgagtcagatggagggaatggctccagccaaaacaactcgggcagcattcgccatgagcttcagtgtgacctgagacgcttctttctggagtatgaccggcttcaggagctggatcagagcctgagtggggaagctccccagacccaacaggcccaggaaatgctcaacaataacattgaatctgagaggccaggcccttcccaccagcccaccccacacagcagtgagaacaactccaacctgtcccgtggccacctgaatcgctgtcgtgcttgccacaatctcctgaccttcaacaacgataccctgcgctgggaaagaaccacacctaactactcctctggcgaggctagttcctcttggcaggtccccagctcctttgagagtgtgccatcaagtggcagccagttgccacctctcgagcggactgagggccaaacgcccagctccagcaggctggagttgagcagctctgctagtccgcaggaggagaggactgtgggggtggcctttaaccaggagacaggccactgggaaagaatttacacccagtccagcagatctggaactgtgtcacaggaggccttacatcaggatatgcctgaggagagctctgaggaggattcactcaggaggaggctgctggaatcttccctcatttcattatcccgttatgatggagcaggatccagagagcacccaatttacccagacccagcgagattatctcctgctgcatactacgcccagaggatgatccagtatctctcacggagagacagtattcgccagcgctccatgcgctaccaacagaaccgtctccgttcttccacctcctcctcttcctcagacaaccagggtccatcagtagagggaaccgacttggaatttgaggactttgaggacaatggtgacagatccaggcaccgagctccacgcaatgcccggatgtctgcaccttcgcttggacgctttgtcccaaggcgtttcttgctgcctgagtacttgccttatgctgggatttttcatgaacgtggacagcctggcttggctactcactcttctgttaacagggtcctggcaggggcagtgatcggtgatggacagtctgctgtggccagtaacattgccaatactacctaccggctccagtggtgggacttcactgagtttgacctccctgaaatcagtaatgcttccgtgaatgtgctggtgcagaactgcaagatctacaatgatgccagctgtgacatttctgcagatggccagctcctggcagctttcatccccagcagccagaggggctttcctgatgaaggcatcctggcagtgtactccctggccccccataacctgggcgaaatgctctacaccaagcgatttggtcccaatgccatttcggtgagcctgtccccaatgggcagatatgtaatggtgggcttggcctcacgaaggatcctgctgcacccctccacagagcacatggtggcccaggtcttcaggctgcaactggcccatggtggagagacctccatgaggagagttttcaacgtcctttatcccatgcctgccgaccagcggagacatgtcagtatcaactctgcccgttggctgcctgagccagggcttggcttggcctatggtactaacaaaggagacctggtgatctgccgaccagaggccttaaactctggtgttgagtactactgggaccagctgaacgagacggtcttcactgtccattccaacagcaggagcagcgagcggcctggaaccagcagagccacatggaggacagacagagacatggggctgatgaatgccattgggcttcagccccggaaccctgccacctcagtgacatctcagggcacccagactctggcccttcagctgcagaatgccgaaacacagactgagagggaggtgccggagccagggacagccgcctcaggtcctggtgaaggtgagggttcagagtatggtgccagtggagaagatgcgctcagcaggatccagaggctgatggcggagggcggcatgacagccgtggtgcagcgggagcagagcaccaccatggcctccatgggcggcttcggcaacaacatcatcgtcagccaccgcattcaccgcagctctcagacgggcactgaacctggtgccgcccacacctcctcaccccagccctccacctctcggggactgctcccagaggccgggcaactggcagagcgaggcctaagcccccggacagcttcctgggaccagcctggtacccctgggcgggagccaacccagccaaccctgccctcttcctcccctgtccccattcctgtttcccttcccagcgctgagggaccaaccctccactgcgagttgaccaataacaaccaccttctggatggtggcagcagcaggggggacgctgcaggccctaggggagaaccacggaacaggtagagacaaacgttgcactggtgcctcccctcgaaccgccaagcagaaaccggacctcacagctgactgggaactggacatgtggaagagctgctggctgcatcagggaacaggaggaggaagagggtcagggtggagaggaagatcagtcagtgggcacaagacagtcaaatgggcaaggcctgcctcggggaactagaaccttccaggatctggagcccgggagagccacactgtgggcttaatgtgaatagaggaacaagtgggtatctctgccaggcaccccactttctcctagtaacatgggctcaggggactcagccctggacagagagcctccagagagtgaacagtcttccagatctgggccaatcatcctggacagaggcccgcgaggcagctttgccctgtccacctgttgggtgggcagagccaccaggaacccagacaccacctccaactctgagccttccagagcttcagcctctcttcgtcgtcttaccccactgaaaccaacagggatcgggccaggctcccagattcttgaggacagggacttcggcatttactaatgggggactactgtggggtaagggggcgcctgcttgcctgatacaggatggggtcaagggacagtgggcaggtcctcactcaggagtggggggtgtaggctggccagcccccagggcttgtccaccagtcttctccccgcaaggccctcagagcagcgcctgtgggtgtcagtattacctgagcctaggccaaagctagcccaaggctggggaaggggaggagactccaggtcagaatgtgaggtctcagtctgtgatttaaggtgttgcatgtggactcttaactgtacgtgtagtttctagtggagaaatcaaggctctgatcattttgtttttagtatgaaaatgtgatttcctttctgtttgtaactcatcatagaaacattgtggtgggaggagaggggatagtctacagctaatgagggaaacaccaaagatcacatcattaaaatgatgacatgcccctc

SEQ ID NO: 24051 - DNA, 1489 bp, Homo Sapiens
aagacaaatgaaaaactgtatacagtatgtgatgtggctctctgtgttataaatagtaaaagtgctttgtgcaatgcagattcaccaaaggacccagtcctcccaatgaaattttttacacaacctgaaaaggacttctgtaacgataagagttatatttcagaagagacaagagtacttctgttaacaggaaagccaaagcctgctggagtactaggtgcagtaaataagcctttatcagcaacgggaaggaaaccctatgttagaagcactggcactgagactggaagcaatattaatgtaaattcagagctgaacccttcaaccggaaatcgatcaagggaacagagttcagaggcagcagaaactggagttagtgaaaatgaagagaaccctgtgaggattatttcagtcacacctgtaaagaatattgacccagtaaagaataaggaaattaattctgatcaggctacccagggcaacatcagcagtgaccgaggaaagaaaagaacagtaacagcagctggtgcagagaatatccaacaaaaaacagatgagaaagtagatgaatcgggacctcccgccccttccaaacccaggagaggacgtcgacccaagtctgaatctcagggcaatgctaccaaaaatgatgatctaaataaacctattaacaagggaaggaagagagctgcagtgggtcaggagagccctgggggtttggaagcaggtaatgccaaagcacccaaactgcaagatttagccaaaaaggcagcaccagcagaaagacaaattgacttacaaaggtaaaaatgcatttgcaaagggagaaaatgaaggccaaacagaagcaggctccagcttctgcaaaaacttggattcacaaatgtccctgaacagaaaatgaagctcacttcagaacacacactctctgccttgaaaactaaagagactattacttccttttcacatgaccacaagtcctctgatggaaatgtacagcagaaactcttgagagagaggctaaaagcaactctgttctcccccttcccctagacttttcttacgaaaagtcaataattaagcaaattgcttaacacttggttccagttcctgcctatctggagtttaaatgcgtaatacaccattaatttccacgctgcagtttttattttaaagaaagtaacaagatgtctttacactgacactgaaaattcatccattttagagccaggaattcccatgttacacaggaaaaaatagaagtctactgaattaattttttaaaagaaaagagatcagattaaatatttctttgtttttccttttggaaacttttatgtataattctttctgcctgcctacttttctgcaaaaatgagatgtacagatttcggttccctgctatgaaaagtgatgtggtagcaattttataaatgttgctttctgatttttatcagagtgagaaaattaaaattattgatttgcaagt

SEQ ID NO: 24052 - DNA, 5039 bp, Homo Sapiens
aaacgattgaagttgaagaacaacaggaaggcaatgatgcagaggcccagaggcgtgagattgagctgcttcgccgtgagggagaattgccactggaagagctgctccgttcccttccccctcagctgttggaagggccttccagcccctctcaaaccccctcatctcatgatagtgacacccgagatgggcctgaagaaggtgctgaagaagagccccctcaggtgttggagataaagcccccaccctctgctgtcacacagcgcaacaaacagccttggcatccagatgaagatgatgaagagtttactgccaacgaagaggaagcggaggatgaagaggatactatagcagctgaggaacagttggaaggggaggtggatcatgccatggagctgagcgagttggctcgagaaggtgagctttccatggaggagctattgcagcagtatgcaggagcctatgccccaggctctgggagcagtgaagatgaggatgaagatgaggttgatgctaatagctctgactgtgaaccagaggggcccgtggaagcggaagagcctcctcaggaggatagtagcagtcagtcagactctgtggaggaccggagtgaggatgaggaagatgaacattcagaggaggtagaaacaagtggaagttcagcatcagaggaatctgagtctgaagagtctgaggatacccaatcacagagccaagcagatgaagaggaggaagatgatgattttggggtggagtacttgcttgccagggatgaagagcagagtgaggcagatgcaggcagtgggcctcctactccagggcccactactctaggtccgaagaaagaaattactgacattgctgcagcagctgaaagtctccagcccaagggttacacgctggccacgacccaggtaaagacgcccattcccctgcttctgcggggccagctccgggagtaccagcacattgggctagactggctggttaccatgtatgagaagaagcttaatggcattcttgctgatgagatggggcttgggaagaccatccagaccatctctctgcttgcccacttggcttgtgagaaaggtaactggggtccccatttaatcattgttcccaccagcgtgatgttgaactgggagatggagttgaaacgttggtgccccagctttaaatcctcacttactatggagcccagaaagagaggaagctcaagcggcagggctggaccaagcccaatgcctttcatgtgtgtatcacatcttacaagctggtgctgcaggaccaccaggccttccgtcgcaagaactggcgctatctcattctggatgaggcgcagaatatcaagaacttcaagtcacagcgctggcagtcactcctcaacttcaacagccagagacgcctgctcctgacaggaactcccttgcagaacagcctcatggagctgtggtccttgatgcactttttgatgccccatgtcttccagtctcatcgcgagttcaaggagtggttctctaatcccctaactggcatgattgagggcagccaagagtataatgaaggtctagtcaaacgcctccacaaggttttgaggccttttttactgcgccgagttaaggtggatgttgagaagcagatgcccaaaaagtacgagcatgttatccgctgcaggctctccaagcgtcaacgctgtctctatgatgacttcatggcacagaccacaactaaggagacactagccacaggccatttcatgagcgtcatcaacattttgatgcagctgagaaaagtttgcaatcatccaaatctgttcgaccctcgaccggttacctcccctttcatcaccccaggcatctgcttcagcaccgcctctctggtgctaagggccacggatgtccatcccctccagcggatagacatgggtcgatttgaccttattggcctggaaggtcgtgtctctcgatatgaggcagacacatttctgccccggcaccgcctctctcgccgggtactgttagaagtggctactgctcctgaccccccaccccggcccaagccagtcaagatgaaggtcaacaggatgctgcagccagtacctaagcaagaaggccggacagtggtggtggtgaacaacccacgggcgcccctgggccctgtcccagttcgacctcctccaggtcctgagctctcagcccagcccacccctggcccagtcccccaagtgctgccagcatcactgatggtttcagcctcacctgccgggcccccgcttattcctgcatctcggcctcctggccctgtcctcttgcctccactgcagcccaacagtggttctctcccccaggtgttgccatcccccctgggggtcctgagtgggacctcacggcctcccacgccaaccttgtccctaaagccaacaccacctgccccagttcgcctgagcccagccccacctccaggctcctctagcctgttgaagcccctgacagtgccaccaggctacaccttccctcctgctgctgtcaccaccacttctaccaccgcggcaactgctaccaccacagcagtgcctccgactcctgcaccacagcgcctcattctatctcccgatatgcaggctcgcctgccctcaggcgaagtggtcagcatcgggcagttagcctcactggcacaacgtccagtggctaatgcagggggaagcaaacctctcaccttccaaatccagggcaacaagctgactttgactggtgcccaggtgcgccagcttgctgtggggcagccccgcccgctgcaaaggaatgtggtgcacctcgtgtcagcaggggggcagcaccatctcatcagccagcctgcccatgtggccctcatccaggccgtggccccgacccctggccctacccctgtctctgtgctgccttcttcgacccccagcaccacccctgcccctactggcctcagccttccgcttgctgctaaccaggtgccaccaaccatggtgaataatacaggcgtggtgaagattgtagtgagacaagcccctcgggatggactgactcctgttcctccattggccccagcaccccggcctccgagctctgggcttccagctgtgttgaatccacgccccacgttaacccctggccggctacccacacctactctgggtactgctcgagcccccatgcccacacccactctggtgaggcctcttctcaagctggtccacagtccttcacctgaagtcagtgcttcagcccccggagctgcccccttgaccatctcttctcctctccacgtgccatcctcactccctgggccagcctcttctccaatgccaattcccaactcctctccccttgctagtcctgtgtcctctacagtctcagttccattgtcatcttcactccccatctctgtccccaccacacttcctgccccagcctcggctccactcaccatccccatctcagcccccttgactgtttctgcttcgggcccagctctgttgaccagtgtgactccaccattggcacctgttgtcccagcggctcctggacctccatccttggcaccatctggtgcttccccgtcagcatcagccttgactctaggtttggccacagctccatccctgtcttcatctcagacacctggtcaccctctgttgttggctcccacctcttcacatgttccagggttgaactcaaccgtggccccagcatgctcacctgtcctggtgccagcttcggctctggccagcccttttccgtcagcaccaaatccagctccagctcaggcttcccttctggctccagcatcttctgcatctcaggctctagccacccctctggctcctatggcggctccacagacagcaattctggctccttctccagctcctcctctggctcctcttccggtcctggcaccatcgccaggtgctgctcctgtcctggcttcatcacagactccggttccagttatggctccatcgtctactccaggaacctctttagcctcagcttcaccggtaccagctccaacccctgtgttggctccatcatcaactcaaactatgctaccagccccggttccgtcacctctcccgagcccggcttctacgcagacactggccctagccccagctttagcacccactcttggaggctcatctccatctcagacactctctttgggaacggggaacccccagggaccctttccaactcagacattgtcattaactccagcatcatccctggtaccaactccagcccagacactgtctttggcaccaggaccaccactgggtccaactcagacgctgtctctggctccagcaccccctctggctccagcttctccagtgggcccagccccagctcacacgctgactttggctccagcatcgtcatctgcttcactcctggccccagcttcagtgcagacactgaccttgagccctgccccagttcctaccctgggcccggccgcagctcagaccttggcgctggccccagcctccacacagtccccagcttcccaggcatcttcccttgtggtttcggcatctggtgccgctcccttgcctgtcaccatggtatcccggctgcctgtttccaaggatgagcctgacacactgacattgcgctctggtccccccagccctccctccactgctacctcgtttggtggcccccggcctcgacgccagccccccccaccacctcgttcccctttttatctggtaagttttacttcctcaagagggaacaggaagttgagtttctttggagtgttggtagggtggatggaacagtgatgtcacatttaacctggtgaattacaaagcttaatgttatggaccaagtacttgagtgacatttggacaagtcccttctcttccctgggcgtgtacctcatgatccgcctgcctcagcctcctgaagtgttaggattacaggggtgagccaccacgcccggcctcttttcccgttttttaacccgcacggtaataaatgggcagtaaaagg

SEQ ID NO: 24053 - DNA, 4436 bp, Homo Sapiens
gggaggcgacgggctgcggcctgcggaacctgaggcagctggggagggccgggcgcgccggccggatagcgagccgcgctggcggcggcggtggccgcgatgatggagatccagatggacgagggcggcggcgtggtggtgtaccaggacgactactgctccggctcggtgatgtcggagcgggtgtcgggcctggcgggctccatctaccgcgagttcgagcgcctcatccactgctacgacgaggaggtggtcaaggagctcatgccgctggtggtgaacgtgctggagaacctagactcggtgctcagcgagaaccaggagcacgaggtggagctggagctgctgcgcgaggacaacgagcagctgctcacccagtacgagcgtgagaaggcgctgcgcaggcaggcggaggagaaattcattgagtttgaagatgctctggaacaagagaagaaagagctgcaaatccaggtggagcactacgagttccagacgcgccagctggagctgaaggccaagaactatgccgatcagatttcccggttggaggagcgggagtcggagatgaagaaggagtacaatgccctgcaccagcggcacacagagatgatacagacctacgtggagcacattgagaggtccaagatgcagcaggtcggaggaaacagccagaccgagagcagcctgccggggcggaggaaggagcgccccacctccctgaacgtgttccccctggctgacggcacggtacgtgcacagatcgggggcaagctcgtgcctgcgggggaccactggcacctgagtgacctcggccagctgcagtccagctccagctaccaggttttgtagccgtgccgtggagtgagaggctcctccctgttgctggtgttccccgttcactggggcgggagcctcgtctgcaggcagcccttcacggctctctgggccactcgccctctcccttcgtgtgtggcaggatggagaaacccagccagggtgtcaggggctcaggctgcccagcaggccctgtgtggctgtggctgttccacgcggcctcgtgtcggcacctgctagtccaggctagacctccctgcccttggatagaccgctctgtagccaggggtgtacagtgcctgtcagggttgagcttagtgatcctctctcaaaccacacccccacataaagcctcatgctcacccgggctccagccagacacatcctgcccctgagagccacgcctctactctcggaggaacgtcagtgtctagagtgtggggtttgccctccgttggcagaaaggtgaggagaaagctcctcttctctgggcccctccctgcctgtccctggtaacgcctcctgggtcctgagtttgagaaagcagagcctcgccccagcaggtactcacagccagagtgcgggggccccagcaggttctcacagccagccggtgagtgcacctcagagcacaggggcccagagccaggccactccttcagggccccaggtcgcttgctgccagttttggcctgtgagctcactggcctcagtgccaggtaaggacagccaccttcctgggaagaagaggtgaccccgggtctggtggatttcccacaggggccgtcagaggatgtccacagaggcagagcccttggggcctgtgggctgggttgggctggtggatgtggggcctgggacttctccagaagcttacttcctgctgcatgctttgccgactgtccttccacctctaagtgtccatcgtgcctgtgggggctgctgcaggctcctgctccgtcagcccacctgctgctgcgctgctctgggagcgagctccctcatggcatctggaacgctctcctgtcctccctgtgctcagggctggagagagggtggcggggctgcgggctccccgggccttctgggcccagccctgccacctgggcccacctcctctcactgtctctggctcacgcttcccgggcctggagctgggacctgcccataggcatctgaagacacgtcagcctcagccggggggagcccttgcttgacgctctctggcctccgggctgcctctcgcgcccgctctgggcccgctcttcttctcatgatgtctttcctttcacctcctgcgttgtctgacatcgtcgctctcttcataaattgtagcgttttatgttttcgttcataggagtgttttatttgatttttctttattttaaattattacatttaagttctttttattttatgctctaggttttgaagtttttctaatttcttaatttttttgttgttttttgttttgttttgtttttgtttttatgtactgtattttcagtgttttaaccaaacagttgtggctactcatggtgaggaatgaccgctaagagtttgggttctttcagtgcatttggaggtcactgctacacgttgatgtttaggaggttgagaggtttgcctttaggtaagttgtggccagggggagtgtcccatgggtaagtggtggccctgtagggtgacggagagctaggggaggcgcaatcagactgcagaattccccgcagccaccatgagggtcaggagcaggccggggacccagcgtggaggaaggtggcccagaagcgtttgtctgatgtgcacagctacaccctgcctggccacatggggttccctgttttctctctgccgggtggtggcagagtcggtgagacaccaggtgcctgtgacacattgggtagacaggttctttgagaacgtcagcacagacttcttgcatgagcggtactcgcttcctccagcgtggggagtgacatgaagagcaagggttttcctttcaaactgggcatagctgcagagccacaggccgtctcagacatttctacaaagccactccgggaggcgggctgcgcccgtgtgagggctctccctcggcactgctcatcttttggggctggacatgcatggcctgggccgctgggacgcggtgggtgtggagcagcatccctggcttccacccacgaaagccaggagcacccccttcatttgtgaccacaaaaatgtctctggactttgcaagcatcccctcggggcagtcagcccaactgagaatagctactatagaggaaggtgtgtcattttgagattccttctagagaaacttaggagcctggtagatgaagcagaaatgtgtcctctgagtgagtggccgtgtccggtactgagaggccccgtgccctgagtctggcggtgaccagagaggctgggcagaggcagaggtcagcactggccatgacttctggaagtcccgtctgccctggtcacttaaaggccagtataagtcagctgtggagagggctggataccccctcgacagctcctccctgggtgagatccttagcattagagtcccccacggtgcgccctctgagagaccacgggaacccacccagcggctgcctgggacaggcacaggagccacctgggtgcctctgaggccttgcactttcccacacctcaaggagggccgggggccacgggcaagctctgccatagcgggtgatcaggtcagctaagacgagaacgtttggggctctttttctccagctggttcagtatctttgttaggaaagaccattggaaagaatgtttgtttcgcattccgcattagtcacatagaatgcgctcctccctagcgagcttcctgaggtagacggctggttgcggtttctcgtaatccgggctgcccccaccctccagaatgtcttggtggcgtccctttctgtgagcagggattgtggtttctttgcgcttgctcatgttcaggggtgagctctggtccagtcaagccacagggtcagcaccttctggtcactccctggccctgacctgagcccggggaggaacgtggggcaggcgcgggtgggcccagcctcgagctcttcagcacagtgatggtgacggggcagcggtggcggcacagccagcccttcttgggtccccagtcagagccctctgccctacctgggctggacttgtttctgaacagccacaagctacagggggctgccgctgtgtccctggcgaggcactggcccattacaagcaatcgtctggggagggcaccagtggaaagccccgttccaagccatttcaggagggtggccctgcttccgaggagccggagtcagtggccggataagcagagccactcgggagtggtgaggcccggaagggttagcccggtgggcggcagaggagctctggcccgcagggtgtcgggcgaggcaaagtgcaaagcattggtgcgcggggcctcaggcagccacggcggagccgcaggccagggacctgcagtgactcgctctccctcctccctgtgtttggccttagtgtccacaggatgaaatgtccgagtcaggccagtcctcggc

SEQ ID NO: 24054 - DNA, 4404 bp, Homo Sapiens
gcgtgataaaggggcagaaatacgagaaacgaattgagcgcttaacgatccggaaagaggaagatggagacgctggaaaggaagaggacgccaggacgcgcatcatcagacgcgcagctctggaatttgaggacggcatgtacgccaatctgggcataggcatccccctgctggccagcaacttcatcagtcccagcatgactgtccatcttcacagtgagaacgggatcctgggcctgggcccgtttcccacggaagatgaggtggatgccgacctcatcaatgcaggcaagcagacggtcacggtgcttcccgggggctgcttcttcgccagcgacgactccttcgccatgatccgagggggacacatccaactaaccatgcttggagccatgcaggtttccaaatacggcgacctggcgaactggatgatccctggcaagaaggtgaaaggcatgggcggtgccatggacttggtgtccagtcagaagaccagagtggtggtcaccatgcagcactgcacaaaggacaacacccccaagatcatggagaaatgcaccatgccgctgaccgggaagcggtgcgtggaccgcatcatcaccgagaaggccgtgtttgacgtgcacaggaagaaagggctgacgctgagggagctctgggagggcctgacggtggacgacatcaaaaagagcacggggtgtgcctttgctgtgtccccgaacctcaggcccatgcagcaggtggcaccctgacgggacctggatctgggcggggtggtgcgctcctcagggcggatgccaccgggttccccaggggaatacatgtccccagctctgggaggggtttgctactggcctcctactttcctccctaggtggacagtgctcctctagagagctgcgactttaattaaaaacaacaggaaaacagatcagttcctcactgtgtttctcgagcactgcaaggcgcaggtctgcagtggtgaggaatggatgtccgctttgctctgtgatgtttacacagagcgtgcacagctcagcgcattcacagcaagatttgattcaagcgcctccctcgtacttgaaccatgaaatggagataaaaactgacgagggagaaaatcacttaacccagagtacacctgaagggacattttactactgcagtgagaaataggcgagcaaagatgtgagtttgtgattggaagacatgctatcttcatgagcttgttttttctttttccttctctttcttttttctttttttttgaggcagggtctggctctgtcactcaggctggaatgcaatggaatgcagtgatctcactgcaacctctgcctcctgggctcaagcaatcctaactcagcctcctgagtagctgggactacaggcgcacatcacaatgcctgcttatttttttttattttttaaatttatttatagaaatggagtttcaccatgttgccccaggctggtcttgaacacttgagctcaagcgatccacttgcctcagcctcccaaagtgctgggattacagacatgagccactgagttgggccaattaaccttagcttactgtaatttttttttcttttttagacagaatctcactctgttatctaggctagagtacagtggtccagtctcagctcactgcaacccctgcttcctgggttcaagcaattctcatgtctcagcctctcaagtagctgggattacaggcatgtgccaccatgcctagctaatttttgtatatatatttttaacaagtagagatagggtttctccatattggccaggctggtctcaaactctgggcctcaggtgatccacctgccttggcctcccaaagtacaggcttgagctattgcacccggccttcttgaacgtttttatccgttatctggtatttcttctggggcctttgttgttaaattttgtttccctgaagcctcccctcctcctcccacatctctcctcctgggacctatgagatgttaagcttctagatgtccgtagaaggaaagcaggaccatctccaagggaagggaccgggtgatgggagagactgagaggggagaggctgccggtcctgaaatccaccaggaagcttcctctatctgtgtgtggccaaaggctacagcctaggacaggaggagttctagaaccctaaccaagggactagatgagttttctcagcttcatttgaattgttcctgcatcattcacaccagacacttaggccctcctctctgggatggaggcccaaactggccacttgtgtgatggtccgttgtaacccaagaggctgcgaggcatttcctcctgaatctatagtctcaaaaactaaaattaagattgtgtgtgtgtgtgtgtgcgcatgcacgcgtgcacacgtgctgttgacagccaagcctggcctggtgcatgcactgcataagtgtagctctgggggttcccaggccattgggggcatgtggtcagagtagtaagttctcactggtcaaggacagactttccaggggcccattggagcctcaccctgcaggaaaggccagatcctgggaaggagagcagggcagggagagttggcgctcatggagggcacagactgggggtgtggaaaaggggccagggactatggctggggttgggggcttgaaatgaaatgtcatctagtgggcagtggggtgccttttggggctcctggagaggggcacctgatttgccctgggcgtcagtttcccaggagcagtgtggaaaaggctgaggtatctagaagcggacaagtgaccctctgggcctccaactccacctttctggaaggggcctgcccacagctgggcagcctgagagccccccaccttgactgcttggccttccctgcagccagctggagccagggagtcctgcctaagaatgggtgggtaagaagcagagctgatggagaagggaggctctgggctctggaaggagagggctggggatgggggagcttctccaggcctgccagatgcagggctctgaacccagacccactgttagtccccttcaccaccccccatcttgcccagccacatccagctgggccctgcagtttgctggaaaagtatatgacaatcctggctccgacccaccttgctctgggaccttggacagttgctgctctctctgggccttagtttctgcttctgtaaaatgggaacctgggattagctgcttccaaggttccctagtcaggctcgcctggcctgtgagacctacagaggggttcccagcacccaagccaggcctggctcagaggggctctgtgagggtctgtggtgtaactgatctaatgcgacattctatcctgtgtctgggagaccccccataagacccttgaacacagctgcacagaagcaaatagtgaggaaagcctgcaggactgatggcctctcaggccccatggcaggcagggctccccagggagtcacaggacagagctgcaagtggagccaggagggctgccctgggccccaggctgtccccatgggtcagccagtctgcagagtgacactccagtgcccgggctggtgaccaccaccaccccactcaggctgctctgttctctctccgttgtgacctcacttgtcttttcctctgtgccccagctctgttccttgtatttctgctgcttccccataaccttgactcaccgtgactcaagccctgcccagtggattctctctgggcctccttcccatgttagcatctgcagctcacagcctccctgtctcagcagctcttgtccatgctcgtgagagggagggagcctctcctgccagtgcatttgtttgtggcggatgatgtcacaggtcaaaggttggtctctggattcactggttgttcagtcaagtggccaagggacaccagggctgaggcacagctgcttaagggctgacctttgagtgggactgagggtggggcaggcagtgtccttgacctgtagggtgtactggagaactacgtaggaataaatacatctgtgtgtgtgatgtctgtctgagcgtatgtgcatctgtgtgtttatgcaaacatatgcatgtgtgtacatacgtgtgtacatctgtgcttataacatggaggtgaaatgtactttcgtgtaaactgaacaactggcactgtttaaagagacatgaaaatgagctggtaatcatgcttctgccattcagtatcaggaaatttcacccatgcacggagtgaagaggctccattgcactcccatctttatcatgaaagccgggaaataacctacatgtctatgatgagccaatatcaagtcaattacggtatactgctccaagggattttataaatttgaaatgtttattgtggagacttatttaaacaaccagaaaaagt

SEQ ID NO: 24055 - DNA, 4394 bp, Homo Sapiens
gtcgccgtggctgccggtcctcgagttgggggctgccgcggacactgctaggcagacggcgagtaccgagcgcgggtggccgcggtgtccgtgggccacgctcagctgcggtcagaggcgacatgagtgccgcggggctgctggccccggccccggcccaggctggagcgccgccggcccccgagtactaccccgaggaggatgaagagctggagagcgccgaggacgacgagcgcagctgtcggggccgcgagtcggacgaagacactgaggatgctagtgaaactgacctggcaaagcatgatgaagaagactatgtagaaatgaaggaacagatgtatcaggacaaactggcttctctcaagaggcagttgcaacaactgcaagaaggtacattacaggaatatcagaagagaatgaaaaaactagatcagcagtacaaagagaggatacggaatgcagaactcttcctccagctggaaactgaacaagtggaacgaaattacattaaagaaaagaaggcagcagtgaaagaatttgaagacaagaaggttgagctgaaagagaacctgattgctgagctagaagaaaagaagaaaatgattgaaaatgaaaagctgacaatggaactgactggagattctatggaggtgaaacctatcatgaccagaaagttgcggaggcgaccaaatgatcccgtccccatcccagacaagaggaggaaacctgctccagcccagctaaactatttgttaacagatgaacagatcatggaggatctgagaacattaaataagcttaagtcacccaagagaccagcatctccatcctctcctgagcacttgcctgcaacacccgcggaatctccagcccagaggttcgaagctcggatagaagatggcaaactgtactatgacaaaagatggtaccacaagagccaggccatctatctggagtcaaaggacaaccagaaactgagctgcgtgatcagttctgtaggagccaatgagatctgggtgaggaagacaagtgacagcaccaagatgaggatctacctgggccagcttcagcgcgggctcttcgtgatccgccggcgctcagctgcttgactttctacagtgctcttctcttgaccctttttctggagtgggttttatttttgttttgtttcgttttctccttaatagaaaaatgttaacttactgggaatagctactcagccttggaaatggagagcactgcagtgaattctttagggcacttttgtggccggatgcttccaactttgtcagtcttttctgcctcaacttcttccagacatcagtcaccatgagactgttttactttcaggcgtattggggggtttgatttactttccttttatttctttattttttgcttatacttgtttttgaaaacctcctctgagtttgaagggacagctatttttattgattatctttaagtctctctaccatggagaagagcaggaagggatacactctccagtgcattttcatgttttgaatctgattagtggatcacgtagctactttccctgtcgcgtccaattcactatttgcccagaagcttggggcagaggtcctagcaggagatgatgaattctcgtggctctcggccttctcagagaaataaatgctttgtgtaacatctgtgcacaccatccattccgctcgctgagcgatggaaaagcttgcctggaagactatgtgcactgaagtaaatggggttgggggaggggacatttcatatttataatgtgctgaaggtaccatattttaaatgttatttaatgcaggtgatttattcaaacatttgttctagcttaagctggaataagcagtggtcatttcagaagttttcatttgtaattccttcctctcccttgttcccaagtaggtagtagtaagtatgtgccacaggctgattatctgggtaatcttttacgggtgggaggtgagattgatagtgcaataatcagtgatctatagaccctcatgcacgattcaagtttcactcttgtggctgatgccattattgcacattggccattccaaacctgtggagaactttgttgtcaggccctgagcgctcacagcttcatttggcccaggttgaagacaaggaaagctctgctgtggctgcctctggactgacaccctccctaatgagtcctgatgaaacagcctttcctacatccttccctcactcccatgattggagaaatgattcattgggtgatgagtgttggggttttctatactcatgttgccatcttgagatgttcaaaaaatttggggttagagcaactgttagtgtctctatgagcaatcagtagaacttacacatcctaggaaatctttctttgtaagtaattcttttggtctcaagtgattctcttcatgttgtctcttgatgtacatacccccaagcaagttggggggactgtgatgacaattaaatcaccttctctgaagttctggctctgcagagaccaaaccttactgacttgtacagacttgtacaagtaaagacttatacagatagatttttgttttaacttacaatccgttttttcctcttttttttttttttttctggtgttggagtcttatttagaaaacaggataaatgacgctgttatcaaaagttgcctggggttctgtatttcttctctgccctccaatccccgactgctatgatgtttactacagtgaacccagcccatggtaaacacaggcttcacctgttcttgtttgttagccttgactgtgaggcaggacttccctcgcttgaactgttacacatacgatgtgtgtgtcacatcacatattgtgcagctgttggttttcatgtagtgccctgcgatggaaattagatatatttcatgtatttttccattgaaggtggagtttttcaatgatcatgtgttttgtcctcctaaacagtataccaaagtttgtttttatagttgaggattgtattgataaccactggggttccgcattgaagcaggaacaaattgcctctttttctggccttctctgtgggacctctgcttttgtgaagcaactatttatttgaagaccagggtatgggcacttttgccttctctcctctctgacttttgagggtattgagggcgcccttagtcatagtctcgactccgccattgccttctcctcggcgtcctcacaactcttaattgggcctagtgaaaatgggggcaggtgagaagtccattttgagaatcagcatagtaaattacatttctaatcccagaggacttaatattttcttttgtcaccccagaggtgaaaaatcagcagttgaagcctgacaggcctcagtggtgaccaggaacagaagcagccttcctgttagtagatgggggtacttctgtggtgggcagaagccttactaaaggggaagacagactttgaagtttctagacgagaaggaggctagcttctagcctgggtggccattattccaaaaggtcattgtttctcactagaccccagggcaccagatgaatttccaagtttaaactctttcctgcaggtgattactttgaaaaaggttggtccagaccattttgatcaagaacctgtatatgtgttgtgttagaggcatctgcctcaagtctatgtacagtgtttgctgcgggtgtgttccaatattcattttacctctgcttgggggttttgtgtgttcccctccccccatgccctgcctacccccttttccctgaaccacgtccttttgaataatttccagatggatttctgtagccataccaaagccagggtgttttcattcatgcggatactagtatttatagatgtctgactacctaacttaatttttgtttttgaacttctaattggggccagtgtaaggtcgatcccagaggctgatctgcaaatcaagctacatgtatttgtgtataagaccctgtgttcaggactgggtgacttttctaagaaatatggggtttagaatggggttgactgtattttttaacctaattctggagagaagattgtattttttacagttttttgggtttggcttccttctcacatttctttagctttgaatttttactaaataaatttcctcctgattaattttttttttctcatctgggaatttgaaatctcggtgcttactgttacaccaatttgtccaaagagttgaaatcactttaatgccagaacatggtaaatttgcagccatttcaagcaggtgatggtctttttttataacatcgttaacaggtaccattaaatattctgagaggtgaatgtaaaatataaaaggtataggtttttttttttttttaaagaaaacaataaactttcaaagag

SEQ ID NO: 24056 - DNA, 4149 bp, Homo Sapiens
acccggcggaggcggcggacgagcgcttcccggcctgcatccgcgacgccgtgtcgcgggtgctcaagggctacgactggagtctggtgcccatgccggtgcgcggcggcggcggcggcgcgctcaaagccaagccgcatgtgaagcggcccatgaacgcattcatggtgtgggcgcaggcggcgcgccgcaagctggccgaccagtacccgcacctgcacaacgccgagctcagcaagacgctgggcaagctgtggcggtgagtgccggcgccccgggggcggggttcgggaccttggccgcccctggtctcggactgcgagcgggggcctggagggcgcagagctcgcggaggtggtggccacacgcaggctccgggctctgcaccccgggcgggtgtcagggcgggtcccagtggaaaaacatcctctggccagccggggtccggcgccagctatgggagtcgggatccgcggagggcagcgcctggggtgtgcaccctcgtggcgggtgcgctctggagccagttctcctggcggggaacaccctgcggagggccatggctggcaccccgacgtgccctccagccgttgcgagtggccccagccccgggaggcacgcccggcacgacagcaagttgcatgcggctctctggaggtgctccctccttagaaagggctcagctcctctagctcctggaccacccatggggagggagtgcggcaggcggatgggtgggcagcaggtttgcctgcgagtaccctccccgcagtttctccctctcctggacaccctcggtccgaagcagggagggcaggagtggagatgacggggtgcgccgtgtgcacgccttggcgtggtggggccggtcagttttccagaaattaggactgcagagtgaagaacttgttgctcaggacaggccgcccccaccgagtgtcctctggttgggtttcaaatggttctcttggtttggggctctggttcccgtatcctgctcctcacctggaagaagggagcttggagcttgcgtatttgcacctcctgccttctgtctggatctagggcgcagccacggggcgctgtggacggcaggcccctgctcccccaagtcctgccgcacaggcggttggaggtgagcctcgggaagagtcccaaggagtgtgtcctgtggctcagtgaggacgggcgcctgggccctgccagggcttctgggtgtctgggaatggagggacagcagcccagctgcccgccgaaggccggcaccgttcccgggaagcctcgcttttgtccaccgccggctgggtcctgcccgcctcccccgcctcccttagaaagccccagagggagggaacagcaggcccggaatagggggaaatagaaggaggaagatgggaggcgtggggcttgttcttctttggctgtcgtaagcataccaaccttcccaaacaggcgccggccggttctcccagaggagtgtactgcctggtgccacgggaggctccggagcgcacggcaggcgggtttccctggtcagagcctcctggccccggcctctgctgccggttccccctgtggtgtgtgcctgcgccgagggcacagtgggcgccctggccatccctgcctctgccctgtgctgcagcttgctgagcgagagcgagaagcggcccttcgtggaggaggcagagcgccttcgcgtgcagcacaagaaggaccaccccgactacaagtaccagccacggcgcaggaagagcgccaaagccggccacagcgactccgactcgggcgcggagctgggaccccaccctggcggcggtgccgtgtacaaggctgaagcagggcttggagatgggcaccaccatggcgaccacacagggcagacccacgggccgcccaccccgcccaccacccccaagacggagctgcagcaggcgggcgccaagccggagctgaagctggagggacgccggccggtggacagcgggcgccagaacatcgacttcagcaacgtggacatctcggagctcagcagcgaggtcatgggcaccatggacgccttcgacgtccacgagttcgaccagtacctgcccctgggcggccccgccccacccgagccgggccaggcctatgggggcgcctacttccacgccggggtgtcccccgtgtgggcccacaagagtgccccgtcggcctccgcgtcgcccaccgagacgggtcccccacggccgcacatcaagacggagcagccgagccccggccactacggcgaccagccccgaggctcgcccgactacggttcctgcagcggccagtccagcgccaccccggccgcccccgccggccccttcgccggctcacagggcgactatggcgacctgcaggcctccagctactatggtgcctaccctggctacgcacccggcctctaccagtacccctgcttccactcgccgcgccggccctacgcctcacccctgctcaacggcctggccctgccgcccgcccacagccccaccagtcactgggaccagccggtgtacaccaccctgaccaggccctgagggcccagccgcggggagggactcgcaggcgtcagggggcagccttgtcccggcccagtgtgtgtgaccagggcgggaggggccccagtggctgagctccaagtgcctgctgaagtctgcagggaaacacgcttgctgcccgtggccctcggcctccagatggccacacctctgccgacgacggaccagctccctctcccttctatctttctttttgaggtggtgggattattccacaaagaagggctgccgtttggtccctcttccgtgaggactggcggcaccagcaccttcgctttgcatctcggtagaggagaaacggcagcacagcccaaggaccaaaggagggggtggcaggggccttgcagggcgctgtgaggtccaggccggtcttggcgccgagagcccctgcactcaaggccacattccctcgacaacggctgcacgggctgtccgggatccggggtgtctgtccgcagactgggatgagtctactcgagcatctccgggacctgcctgtcagatctgaggtgtctccttgctggcagagtgcgctcacgcaagggctggctgtgatgaacacatctctcttttatttttatgtttttgataatttttatttttgaagcttaaatgtgtttcttctgaaagctgttaaagatgtatttatgttctgtgttattttatctttaattaggtaattcgggcaaagagtagaatttaagacaaaacggaagctgggaagcttcccttgagggcaggcaggaggtggagttgcagctgttggccggcatcacgttgctcgttgctcggcttatgggaggccgccctggagggcccggaggtcccaaggtccctgggaggactgggcccctcatgcctcgagcttggcaaccgaaaacccgagggaggagaagggacctgccttgtgacatctctgatcaggttggggtgccccagcacccagtaccagtttggggtttgggaggcaggactccgtccctgtccccgactgtgccacgtggtaggacacataggacacaggaattcctgggtccttgcccatgactgtgccatgtggtaggacacaggacacaggaattcctggaaagtggtggcttcagaagtgatcttggctcgcaggcaccagtgccacctaccaagctgtgaaactaaaccttctccactaaacgtcgttagggcctcagttctagacgagtcatacctgattcacctgcactgcttcccctgtgtgctgagcatagagcatacaatagcgcctacttcacggaaacttgtgcctttaaactttgtaaacttaaacacagccgagaagttgcttctttgtactttttctacttttcctacttttttgtagaaaaaaaagataatgcctctgcttctatttctctgggggtgggggtgggggccgggagccgtcgcagacccgtttcatgcagcgtctcccttggcaccgcgttcggaggacgcaccctcactcccctgctgccttcactcctttctgaccaagcaacgctaacttttgtacagatcgatttgataaaattaaacaaagtgctttttatgg

SEQ ID NO: 24057 - DNA, 4318 bp, Homo Sapiens
gacatcccggtctgcctcctggggaaccgcacgctgtcacggcgcagcttcgatgcctgcgtcaaggcctacggcatccacaacaactcagccacctccgcgctctggggcctcttctgcaacggctcccagcccagcgccgcctgtgacgagtacttcatccagaacaacgtcaccgaaatccagggcatcccgggcgcggccagtggtgtcttcctggagaacctgtggagtacgtacgcgcacgcgggggcgtttgtggagaagaaaggtgtgccctcggtgcccgtggcagaggagagccgtgccagcgcactgccctacgtgctcaccgacatcgcggcctccttcaccctgctggttggcatctacttcccctccgtgaccggtatcatggcgggttcaaaccggtccggggacctcaaggatgcacagaagtccatccccacggggaccatcctggccatagtgacgacgtctttcatctatctctcctgcattgtgctgtttggggcctgcattgaaggcgtggtcttacgagataagttcggggaggccctgcaggggaacctggtcatcggcatgctggcctggccctccccctgggtcatcgtcatcggctccttcttctccacctgcggtgccggcctgcagagcctcacgggggcaccgcgcctactgcaggccattgcccgtgacggcatcgtccccttcctgcaggtgtttggccacgggaaggccaacggggagcccacgtgggcgctgctgctgacagtcctcatctgcgagactggcatcctcatcgcctctctggacagcgtggccccgatcctctccatgttcttcctcatgtgctacctgttcgtgaacctggcctgcgccgtgcagaccctgctacgtacccccaactggcgtccacgcttcaagttctaccactggaccctgtcctttctgggtatgagcctgtgcctggcgctgatgttcatctgctcctggtactacgcgctgtccgccatgctcatcgctggctgcatctacaagtacatcgagtaccgcggggccgagaaggagtggggcgatggcatccgtggcctatccctgaacgccgcccgctacgccctgctgcgcgtggagcacggtcccccccacaccaagaactggaggccccaggtgctggtgatgctgaacctggacgcggagcaggccgtgaagcacccccgcctgctgtccttcacgtcgcagctgaaggccggcaagggcctgaccatcgtgggctcggtgctggaggggacgtacctggacaagcacatggaggctcagcgggccgaggagaacatacggtccctaatgagcacagagaagaccaagggcttctgccagctggtggtctcgtccagcctgcgggatggcatgtcccacctgatccagtcggccggcctgggcggcctgaagcacaacacggtgctcatggcctggcccgcatcctggaagcaggaggacaaccccttctcctggaagaactttgtagacaccgtccgcgacaccaccgccgcgcaccaggctctgctggtggccaagaacgtcgactcgtttccgcaaaaccaggagcgcttcggcgggggccacatcgacgtgtggtggatcgtgcacgacggcggcatgctcatgctgctgcccttcctgctgcgccagcacaaggtgtggaggaagtgccggatgcgtatcttcaccgtggcccaggtggacgacaacagcatccagatgaagaaggacctgcagatgttcttgtaccacttgcgcatcagcgccgaggtggaggtggtggagatggttgaaaacgacatatctgctttcacctacgagaggacactaatgatggagcagaggtcgcagatgctgaagcagatgcagctgtccaagaacgagcaggagcgagaggcccagctgatccacgacaggaacaccgcgtcccacaccgcggcggcagccaggacccaagcgccgcctacgccagacaaggtgcagatgacctggaccagggagaagctgatcgctgagaagtacaggagcagagacaccagcctatctggtttcaaagacctcttcagcatgaagccggaccagtccaacgtcaggcggatgcacacggctgtgaagctcaatggcgtcgtcctcaacaagtcccaggatgcgcagctggtcctgctcaacatgccaggtcctcccaaaaaccggcagggagacgagaactacatggagtttcttgaagtcctgaccgaggggctgaacagagtcctcctggtcaggggtggcggccgggaggtgatcaccatctactcctaatgcccaacagcatcacggcactctgggacaggcacggaggacggcgtgggcagcctgggcctgggcttggcccagggaaacagacggcagacacacctgtcccccagtgatgccacccaagctgcccatggggcttcctacggaagtttctaggcccgtcacctagggctctcctgttcagccttaacaggctcagcaaatcagggcgtggctggacgatttccttgcatctgagggcagacgctgctaccggagtgacctggacgtggccagatcttctcgcaggtcacaagaagccagtgagcccttgccttggtttctggaagttcttttccttggctggatttacccagtggttaggttgcatttctaccccatccagaacattcttggaagagcacccggagctgaagctgtccctgatgatgaaggtgaaacgtcagccctggccatggctccgctcagggccccggtcacctccgagtcactctgttccttgactgtctttgtgtttctgtacctcaaggcactgaagctggaggactctgtccatgcccgtgtcaccctcgtgtgggagcctctgggctcggcaggtccacatttcatgagctgaggcgtgggccagggccatctggaaagggaactcggcttttccagaacgtggtggatcatctgtcgggtgtgtggtgaacacgttcagttcatcagggcctacgctccgggaaggggcccccagctgtggctctgccatgccgggctgtgtttgcagctgtccgagtctccatccacctttagaaaaccagccacttcttttcataagcactgacagggcccagcccacagccacaggtgcgatcagtgcctcacgcaggcaaatgcactgaaacccaggggcacacgcgcgcagagtgaacagtgagttcccccgacagcccacgacagccaggactgccctccccaccccaccccaccccaggagcacggcacacagttcagcctctgagctggctcacacgtgccatccccaccccggtgctccagggaaggaggacacggacccgacgtgggaggtcctcaggcagcagtggcgcctggtgtcaggtctgtctggctgagtcccgggcgtcccctgccatggcctgtgccttgcatggaggcggcggtggcactgaagagatagctttcaagggcccaacactttgcacttcggctggctgtgagtttctgctttgtaggttgtggtcacatttgcaggctgcgggcagtggcaccgacttgggcctccctttctatgtggcatatttatttatttaaacaccccagggagttacgtggtaacaaggttgtccataaagaggttgcttctatatactagaggccccagatggccaggccttgggctacgtctggcttgcatggtctcccaagggaatcagccccatcaacaaagttcaaatcggggcagaggctgcacttgtgcccccagatgtttctgaggagccagactagggctggcattgctgtagagtgacggctgctgcccagagcgtgtcccagacatcacagcggggctcagcagttcccacagcctctgcctgccttggctaagcatgagttaagcagcaaaacgctcctccatgtctggatggggccggcaggtcctgtgtcccctgcacctggaggagagcaggctagaggcacagcggccacatggtgctggctctgaacgttggttggtggctggaaaacagccctgcttctgagggccgctcagttctgcacacgaaaccacctcctgagggctcagctctgcccccgccctgggctgcagcctctgcacgcaagcaccaggcatcctttgtgttgtcaactccgtgtaaccagtaactacagccatttacaattgactccgtttccttttgtaggtttccctgtctgtctgtgttagtagaaaaataaaatcctatgaaatctg

SEQ ID NO: 24058 - DNA, 1691 bp, Homo Sapiens
gtattttggcgtgctttgctgatggcatcctacccctggacctggacgccagtgagttactctcagacacgtttgaggtcctcagctcaaaggagatcaagcttttggcaatgagatctaaaccagacaaagacctccttatggaagaagatgacatggccttggcaaatgtagtcatgcaggaagctcagaagaagctcatctcacaagttcagaagaggaatttcatagaaaatattattccaattatcatctccctgaagactgtgctggagaaaaataagatcccagctttgcgggaactcatgcactatctcagggaggtgatgcaggattaccgagatgagctcaaggacttctttgcagttgacaaacagctggcatcagagcttgagtatgacatgaagaagtaccaggaacagctggtccaggagcaggagctagcaaaacatgcagatgtggccgggacggctggaggtgctgaggtggcacctgtggcacaggttgccctgtgtttagaaacagtgccagttcctgctggccaagaaaaccctgccatgtcacctgccgtgagccagccctgcacacccagggcaagtgctggccatgtagcagtatcatctcctacacctgaaacagggccattgcagaggttgctgcccaaagccaggcccatgtccctgagcaccattgcaatcctgaattctgtcaagaaagccgtggagtcaaagagcaggcatcggagtcggagcttaggagtgctgcctttcactttaaattctggaagcccagaaaaaacgtgcagtcaggtgtcttcatacagtttggagcaagagtcgaatggcgagattgagcacgtgaccaagcgggccatcagcacccccgagaagagcatcagtgatgtcacgtttggagcaggggtcagttacatcgggacaccacggactccgtcgtcagccaaagagaaaattgaaggccggagtcaaggaaatgacatcttatgtttatcactgcctgataaaccgcccccacagcctcagcagtggaatgtgcggtctcccgccaggaataaagacactccagcctgcagcaggaggtccctccgaaagacccctctgaaaacagccaactaaacagcgcctcccaccagtgtccaggcaggcaggagcccttgaggaagcagtctcgtgtcctccgtgtgaaggcagctggatcacttcccgcagtccttgggcagcgctttgctgtggaacacgagagctcctcctcaggggcctggcactcaccttctattctgtatgatgtatttggttaaacactgtcaaataatagagatgtgccagatttagattttcttaccctaatctgtttaatattgtaactttattccatttgaaagtgtcaagcccattcagataagctataatctggtctttaaggaacacaactttaaaactgcagctttcttttatataaatcaagcctctgttaacttgaattccttatagtacatattttcccatctgtaatgacgaaattttgattctaatattttttctattatttataagtgcaaattttttaaaaaagtgtacagctttctaaaagtaataaaggtttagcataaatacagccaaaaaaaaaaaaaaaaaaaaaaaaaaaaaaaaaaaaaaaaaaaaaaaaaaaaaaaa

SEQ ID NO: 24059 - DNA, 2016 bp, Homo Sapiens
acacagccaacagtgaactgggtggtgcccgtggcagacaagatgcgatttgatgagatattcctgaagaccgacctggacctggatggctacgtgagtggccaggaggtgaaggagatcttcatgcactcgggcctcacccagaaccttctagcacacatatgggccctggccgatacgaggcaaacggggaagttaagcaaagaccaattcgcgttagctatgtatttcattcagcagaaggtcagtaaaggcatcgaccctcctcaagtcctctcgccggacatggtcccgccttcggagagaggcacgcccggcccggacagttcaggctctctcggctccggggagtttactggcgtgaaggagcttgatgacatcagtcaagagattgcccagttacaaagagagaaatattcactggaacaagacattcgagaaaaggaagaggcaatcagacagaaaaccagcgaggtgcaggaattacaaaatgacctagaccgggaaacaagcagtttgcaggagctcgaggctcagaaacaggatgctcaagaccgcctggacgagatggaccagcagaaggccaagctccgagacatgctgagcgacgtccggcagaagtgccaggatgagactcagatgatctcatcactgaaaacgcaaatccaatctcaggaatctgacttaaagtcccaggaagacgatctgaaccgagccaagtcggagctgaaccgattgcagcaggaggaaacccagctggagcagagcattcaggctgggcgagtccagctggaaaccatcatcaagtccctgaagtcaacgcaagacgaaatcaaccaggcaaggagcaaactttcccagctgcatgaaagccgccaggaggcccacaggagcctggagcagtatgaccaggtgctcgatggagcccatggtgccagcctgaccgacctggccaacctgagcgaaggcgtctccctggcagagaggggcagttttggagccatggatgatcctttcaaaaataaagccttgttatttagcaacaacacgcaagagttgcatccggatcctttccagacagaagaccccttcaaatctgacccatttaaaggagctgaccccttcaaaggcgacccgttccagaatgacccctttgcagaacagcagacaacttcaacagatccatttggaggggaccctttcaaagaaagtgacccattccgtggctctgccactgacgacttcttcaagaaacagacaaagaatgacccatttacctcggatccattcacgaaaaacccttccttaccttcgaagctcgacccctttgaatccagtgatcccttttcatcctccagtgtctcctcaaaaggatcagatccctttggaaccttagatcccttcggaagtgggtccttcaatagtgctgaaggctttgccgacttcagccagatgtccaagcccccaccttctggccctttcacctcctccttgggaggggcaggattctcagatgacccctttaaaagtaaacaggacactcctgctctgcctccgaagaaacctgctcctccacggcctaaaccgcccagcggtaaaagtacacctgtaagccagcttggttccgcagactttcccgaggcccccgatccattccagccactcggggctgacagcggcgacccgttccaaagtaaaaaggggtttggggacccgtttagtggaaaagacccatttgtcccctcctctgcagctaaaccttctaaggcctctgcctcgggctttgcagacttcacctctgtaagttgagtcctccgcctccgggccaccccactcccttccgcttgcagcttccctgggatttttgtctccttttaaaggcaaacctcccagcttctttagcctcttggtacctcacactctctgtccctcgcgttatttattctacactgccacttctgtaagaaaaacagtttctcaataaaaaaaaaaagagccaaaaaaaaaaaaaaaaaa

SEQ ID NO: 24060 - DNA, 4379 bp, Homo Sapiens
cccaaagtgctgggatacagatgtgagccaccacgcccagccacacaacatgtcttaaagtggattacttaatcttttgtgccacaactttttagcctttttagaaatacaaacgaaaaaaccactctcataagaagggccttactaggatttgtatttgtatgtttcagtgacttttgggctgttcacatgatcccctcacactaaaactttctttgatgccttcttacttcattgtgcccagactatgatgatgaaataattctcattttccatatccaaatagttacatagttataaagctaatgtgtatactaaaaagggctcacttgagaaaatcgatgttccttcaggcctcatactttagctcttctttctagctttcttcagtactttatcagatccctagttactgttctattcttaactcttctgctttatatcctgtgtgctattgtttttccgtcttgaatctttagtctttccctctcccaatccttcctttcaaccccactgtgctattctgcctgttcatcctaaaaagctttatctctgctctgcttccctcatggactatttgtcaaaatttatactctatcccataacttttaaattctgcctctataattcctttgcagtatctctaatataacttagtgacagttacaaagtataatttcctctgtatctttttttacgctcagtttgttgcagttcaccctgttgactgtgtccaactctttgtaactcttttctgcggagtggtatttcactcatagccttttcacctctcattgcttttttatcagtctctgcttcctctatgtatatccttaaatataaaagacagtctggcttaatggctgccttcttcagagtcagatttgctgtatttccaccacatagctattgtttaaccgtgcccaagttattttcctttttgaattttcgtttcagataggaaaagtggagatactttagacttattcctcaggagagtatatttgcattaatcctttcaactattatccctgtgaatttacatctgcatcttggattcttttctgaacacctaatacatgtctgtccttataccagacatttctacttttatgttgcaggcactcctcaaattgaaaatgtcagaaaatgaactcacatttccaaattttcctgtctactgtttaccttgtttcactttactttctctagaactagaaactcttggctgcaacttcaaagttacctttaactattggttttcttctgtgcctccacatccaataacttgccagttctctaccattctgtctcatggtcatttttatttttatggagacagtgtctgtgttgcgagactggtcttgaactcctggcctcaagcaattttcctgccttggcctcccaaagtgctgagattatgggcctaccaaatctctcaacttccttcatagtcctgtgctttaatgcactagaccatatactgttacccaaacataccatgcacttctatgcctctagtcctagctcatgttctttttttttctagcttaaaatacccctttataaattttaaacaaaattggtgtatatagttcttgctttttaaaatttcagcccataaacattttgtgattaactatccttctcatcttttaatacggtccctttcatgaagctttcctcaatctttcccagtgctcattcattgataattactcccttgtctgctctctttggtatattacttgcatcttcttttagtacttctgtgtgccttgcatttcatttagctatttgtggtttattttcaccattctacaactcttattttaatgtggtcgtagatgggaaatgtcttagagagttttgtttctctgaagggaagttgttagatctatgtcatatgttaaagtaaatggcattttagaattaagaaggggtgtatttcctcctgtgctagattgcataattcttgagtacgaggaccatgtttttttgtttttgtttttcaattccccatgtcttgtcttcattcttccctacgtcgtttttttttccttttcccactcttcatacattcatctaaccagtcacagactttctcagtagcaaaaagataattcagatgagatcaggcacgatcagggttgtatggccatagacaaaaagaatggaaattagcaacttttgaacagaattacagtgaaaatgctgcatatttaaacttgtggattagaacaaaaacatagcatagagaatatataggttttaatgattacattagaaaattaggctggaaatgaatgagttaagcatttatccagaaactctaaaaaaaagagagagaattgagaattttagtgggaacaaatttggtgcgcctcagtcagttggaaggtgtaaatgtggaacgttacaaacagattgtttttgactggcatattggagcaagttgtaaactgtagggatgctttggctcaagaatatctcatggagtgtattattcaggttttccctgatgaatttcacctccagactttgaatccttttcttcgggcctgtgctgagttacaccagaatgtaaatgtgaagaacataatcattgctttaattgatagattagctttatttgctcaccgtgaagatggacctggaatcccagcggatattaaactttttgatatattttcacagcaggtggctacagtgatacagtctagacaagacatgccttcagaggatgttgtatctttacaagtctctctgattaatcttgccatgaaatgttaccctgatcgtgtggactatgttgataaagttctagaaacaacagtggagatattcaataagctcaaccttgaacatattgctaccagtagtgcagtttcaaaggaactcaccagacttttgaaaataccagttgacacttacaacaatattttaacagtcttgaaattaaaacattttcacccactctttgagtactttgactacgagtccagaaagagcatgagttgttatgtgcttagtaatgttctggattataacacagaaattgtctctcaagaccaggtggattccataatgaatttggtatccacgttgattcaagatcagccagatcaacctgtagaagaccctgatccagaagattttgctgatgagcagagccttgtgggccgcttcattcatctgctgcgctctgaggaccctgaccagcagtacttgattttgaacacagcacgaaaacattttggagctggtggaaatcagcggattcgcttcacactgccacctttggtatttgcagcttaccagctggcttttcgatataaagagaattctaaagtggatgacaaatgggaaaagaaatgccagaagattttttcatttgcccaccagactatcagtgctttgatcaaagcagagctggcagaattgcccttaaggctttttcttcaaggagcactagctgctggggaaattggttttgaaaatcatgagacagtcgcatatgaattcatgtcccaggcattttctctgtatgaagatgaaatcagcgattccaaagcacagctagctgccatcaccttgatcattggcacttttgaaaggatgaagtgcttcagtgaagagaatcatgaacctctgaggactcagtgtgcccttgctgcatccaaacttctaaagaaacctgatcagggccgagctgtgagcacctgtgcacatctcttctggtctggcagaaacacggacaaaaatggggaggagcttcacggaggcaagagggtgatggagtgcctaaaaaaagctctaaaaatagcaaatcagtgcatggacccctctctacaagtgcagctttttatagaaattctgaacagatatatctatttttatgaaaaggaaaatgatgcggtaacaattcaggttttaaaccagcttatccaaaagattcgagaagacctcccgaatcttgaatccagtgaagaaacagagcagattaacaaacattttcataacacactggagcatttgcgcttgcggcgggaatcaccagaatccgaggggccaatttatgaaggtctcatcctttaaaaaggaaatagctcaccatactcctttccatgtacatccagtgagggttttattacgctaggtttcccttccatagattgtgcctttcagaaatgctgaggtaggtttcccatttcttacctgtgatgtgttttacccagcacctccggacactcaccttcaggaccttaataaaattattcacttggtaagtgttcaagtctttctgatcaccccaagtagcatgactgatctgcaatttaaaattcctgtgatctgtaaaaaaaaaaaaaaaaaaaaaa

SEQ ID NO: 24061 - DNA, 2425 bp, Homo Sapiens
ctgagtctgaaataaaagatgcagagctatcatctcttaaaaggaggggctgtagctgtagctcaacagttaggccccacttgaagggagaggcagaattgtactcacccagattggaaaatgaaagccagatgggtagaggtgccctcagttagcacctgtcccatctcgggccctccaactcctcccagtcccactccagtgcagccagctggctccaaggtagaaacccatgagcactcagggagcagtgtgccttcagctgcagcagaagcagcccggaggataaaatgagaaccagctgcacacgggccctttaactcccaagccccacccctgggcttggcctgccttgccctgccgggaagtgatccccaaggcagggtgagagttccccatctgaggcgtttgttgcagctacctgcacttctagatgtgagtacattgtgctagccccccaaaccccaaatcaggggcagatctttgtatcccttgaggctctctttagtcctgtcttgctttgaagggccttgcttctgctggggcagggaaaacatgtctgaatcagagtggggaaggaggatgggtggtggctttgcttttggaggtttcactttccaatagttgggagtcttctgggttttgaagtaaaggcagattaacaccaacaccggtcccccacccccctgcaactctcaggcctctctctgacttcagggtcccacctgggaaatcaggtggggaaccttacagggtcattcagaccccatcttagccctagatcggtgcttgctctactcacctgcactgtcctggggacctgggctctggcctgtcaccttgagctccaagaatgtgacctgtacccattcaggccccttaactctgacagatgagggtttcttactcctccatgcagggctgggccagctgttggtctcagtcgatcattcaggaagtcattagcagagtgatttccagaaggcgtagaatttagtgaccaaggttctttcctttttgggaggagaaagtgaaaactaggatgctcagctggacccaccagcctgagattctggggattttagagctgtcccttggggagccaagcacttgggggtggaggtgatagcgaggctgatggcccctgtgttctcagctctctgcctgggtagcccctgggtgatgggggagaggccagctgtcacgtggggtatcaggtggctctgccagaaactcccttggcacacagagcactgggtcggccctcgggtgtggctgtttgggcaggacagccctctgtatgtagccttgagcaggtaggggggccaccttgagtgggtggcccagagacagcctcagggctccaaggtaacggggtgctcaggttatcttgggtgctgccctcccaggttctgggggagcagaggctgggcgctggcccaacttacaggaaacactcacctttgaactgccattggcaccatctgggcagtacacagccccacccaggtcctctagttcttgttctcggcttagaatctttgtgtttctgcctgagaagccactgcctcctagtttgtggtctctacagttatagccaggttggacttccggctccgtcctttgataactgtgtgctcttgggcaaatttcttaacttgcaggttcttgtgaggataacatgagttaattgagggcacttaacactacctggcacagattaagctcatctgaagtgggagctgttacttaggggcgtttgcctagaacacagggtccagaggctctctcccggaaacttagacccagtgagtcagaagtgaggcctgcaaaaagcagcaggagtggggttaagaattccagcctagggctggatgcggtggctcaggcctgtaatcccagtactttgggaggcccgaatgggaggatggcttgaggccaggagttccagaccagcctgagcaacatagcgagaccctgtctctgtttgcgtgtgtgtggttggggttttgtttttttttttttttaaagaattatagctcagtcctatgattaggcaagttgagaaaatattgatgaagatcaggggtgctgaagcctggttcctggggtcgcttctgatctaggcggttcttgcctctggtgactggtgttaattggcaggagtgggaggagggaggacaagtggaagtctaggctggctgagctgttctgtctcgaaaagttcctaaaactgtgctgctttaaaaaaaaaaaaagtaatttatgagacacattctcaatttccattaatcatctcctaaagggggtaaaccaggaagccgctgggtgaaaacaggctgttggcaattcctgagtcatgtgacccattctctaaagactagaatatttaacttaaatcagtgagaaaaaaaaaaaaaaaaaa

SEQ ID NO: 24062 - DNA, 2361 bp, Homo Sapiens
cacttcgtagggcctaccggcatctgatataaacaatctgcatattgggattgtcagggaatgttcttaaagatcagattagtggcacctgctgagatactgatgcacagcatggtttctgaaccagtagtttccctgcagttgagcagggagcagcagcagcacttgcacaaatacatatacactcttaacacttcttacctactggcttcctctagcttttgtggcagcttcaggtatatttagcactgaacgaacatctcaagaaggtataggcctttgtttgtaagtcctgctgtcctagcatcctataatcctggacttctccagtactttctggctggattggtatctgaggctagtaggaagggcttgttcctgctgggtagctctaaacaatgtattcatgggtaggaacagcagcctattctgccagccttatttctaaccattttagacatttgttagtacatggtattttaaaagtaaaacttaatgtcttccttttttttctccactgtctttttcatagatcgagacatgtaagcagcatcatggaggtaagtttttgaccttgagaaaatgtttttgtttcactgtcctgaggactatttatagacagctctaacatgataaccctcactatgtggagaacattgacagagtaacattttagcagggaaagaagaatcctacagggtcatgttcccttctcctgtggagtggcatgaagaaggtgtatggccccaggtatggccatattactgaccctctacagagagggcaaaggaactgccagtatggtattgcaggataaaggcaggtggttacccacattacctgcaaggctttgatctttcttctgccatttccacattggacatctctgctgaggagagaaaatgaaccactcttttcctttgtataatgttgttttattcttcagacagaagagaggagttatacagctctgcagacatcccattcctgtatggggactgtgtttgcctcttagaggttcccaggccactagaggagataaagggaaacagattgttataacttgatataatgatactataatagatgtaactacaaggagctccagaagcaagagagagggaggaacttggacttctctgcatctttagttggagtccaaaggctcttcaatgaaattctactgcccagggtacattgatgctgaaaccccattcaaatctcctgttatattctagaacagggaattgatttgggagagcatcaggaaggtggatgatctgcccagtcacactgttagtaaattgtagagccaggacctgaactctaatatagtcatgtgttacttaatgacggggacatgttctgagaaatgcttacacaaacctaggtgttgtagcctactacacgcataggctacatggtatagcctattgctcctagactacaaacctgtacagcctgttactgtactgaatactgtgggcagttgtaacacaatggtaagtatttgtgtatctaaacatagaagttgcagtaaaaatatgctattttaatcttatgagaccactgtcatatatacagtccatcattgaccaaaacatcatatcagcatttttttcttctaagattttgggagcaccaaagggatacactaacaggatatactctttataatgggtttggagaactgtctgcagctacttcttttaaaaaggtgatctacacagtagaaattagacaagtttggtaatgagatctgcaatccaaataaaataaattcattgctaacctttttcttttcttttcaggtttgaagatgccgcatttggattggatgaattccaaattctgcttgcttgctttttaatattgatatgcttatacacttacactttatgcacaaaatgtagggttataataatgttaacatggacatgatcttctttataattctactttgagtgctgtctccatgtttgatgtatctgagcaggttgctccacaggtagctctaggagggctggcaacttagaggtggggagcagagaattctcttatccaacatcaacatcttggtcagatttgaactcttcaatctcttgcactcaaagcttgttaagatagttaagcgtgcataagttaacttccaatttacatactctgcttagaatttgggggaaaatttagaaatataattgacaggattattggaaatttgttataatgaatgaaacattttgtcatataagattcatatttacttcttatacatttgataaagtaaggcatggttgtggttaatctggtttatttttgttccacaagttaaataaatcataaaacttgaaaaaaaaaaaa

SEQ ID NO: 24063 - DNA, 1942 bp, Homo Sapiens
gtaaaatctacgcttctaaataaatgttatgatatctcagcatactataccatacttataacatgtatgcttataacagcatactataccatatagtatagttcccaagaaaagggaatgtttcttcccccctaaaaaaaggaaaattcccattatctaatatataaaacgaacttttttgatgatttaaagtgactgtgtgttgtgaactgagtagacaaggcaggaaggagtagtgatgttcctgagttcttgctgaattctgacaacgtgccaacactttgatttctctgtcaaaatgggtgggatttgatatctaaaaaagtataccattacatatctaaaagtatattgttacatggaatatggaagccactgatttaattctggaatgtccgtcaacatgacagccacctaaactcctctgaggcattgtaaacggttaggaaaattgacctttctacacactaaatctggcttcagtggctctcctgagctctaagggagttgggcaggggcagcctgagctccggctgtgagcatagctcaactgatgtgtagttagaatgttcatggaaggcccaggcttgctacttcccattcctttattttaaatgatgtagtgagccaggcgtggtggctcatgcctgtaatccccgcactttgggaggccgaggtgggtggatcacttgagcccaggagttcaagaccagcctgggcaacatggtgaaaccctgtctctacaaaaaaaacaaaaattagccaggcatgatggtgtgtgcctgtagtttcaggggaggctgaggtgggagaattgcttgagcccaggaggtgggggctgcagtgagctgtgattgcaccactgcactctagcctgggtgacagtgcctacataaataaataaaaagaaagaaagaaatgatgtagtgaaaatatagttacatagcacttatacctagactacttaaagtgacctagtaattaaacttatatagctcatcaaccagcaaagattcctagtgcaccacactcgttatagagcagggaagcatcgctgccaccctcagggattcctcttgcatatctctgtgttctgtcctccacacacccatctctttagtcatctattgattttattcaattttcctggcagtttccccagtgtattttacctgaaaggtatgagaggaaaaaggaaaagcacaactcaaaatggttgactattccattctttgttttcttcaaaaagtgtaaagtcataaagatgccatagaaccactaaattcattgtcctttgtcacctctcagccaataatagtcattgatatactctccataccacaaatttaaagttttttgtgaactgtacatgcaatagccaagtttattttaactttagtcattactggatcccagagattttctttctcttttttggcatatagattatttatgtcacttcagtatgcccagtccacagatgagatcttctgagggactgcttctggagccggccctcttgtgtgattgaattagtcagtgatggttctcaggactagattagattgttactcttaaaataattacttaaaaaaaaaaaaaaaacttccataacttgaaaattttgtggccaggtgtggtggctcacgcctgtagtcccagcactttgggaggccgaggtgggcggatcgcttgaggtcaggagttcgagagcagcctggccaacatggtgaaaccctgtctctactaaaaatacaaaaattagccgggcatggtggcgcacgcctgtggtttcagctactcgggaggctgaggcaggagaattcgcttgagcctgggaggtggaggctgcagtgggccaagatggtacccactgcacttcagcctgggcaacagagcaagactctgtctcaaaaaaaaaaaaaaaaaaaaaagaaaggag

SEQ ID NO: 24064 - DNA, 2602 bp, Homo Sapiens
atttccgcctctttgttttaaactccggacgggcttttttctcctcctcttgggggggacccagagggagcggcgccccctcccccctccggcgcggaccccgcgtgcgccttgctcgcccgcagccccgagaccgcaggcgtcacaatgtagcagggaccccaggcgtcgtgctcagaaaatggaaaaagagccagggccggaaggagggtgcagaagcgagtccgcgtgcggagccaggaggcagcgtcgcgtgggagtgctggcctgaagcctccatgccccggcagagggacggacacgcggacgtctagcggagaagccaaagatgttgaccaggaagatcaagctgtgggacatcaacgcccacatcacctgccgcctgtgcagcgggtacctcatcgacgccaccacggtgaccgagtgtctgcacacctctcaagcccgacaaaagcaggaaccaggaccaggggcagagacgatcttgaagataagtcagaaaagtcatttcacgctaaaggtcctgtgggtggtgtcagagcagatgaggcctcgcttaggagagcgaaacacaggagagaccccacattcctcccacggagcagcaaggccagtagccgctgtgacagtgctcactgctggtagtttccaaatctccagaggatttccttagatccttcaaaggggaaccttccagtgtgttcttcacacctgatgagtctgtgctttggtgttagaggactcacacctggggctggacctgagtgtttttctaagtgtggctaccgctgacgggcaggtgccatccatcaggctgaggctcggctcttatgctaacctgaggccccatggctggcggccctgctggtgtggacgaccgctgtgtgcgtctcttgatggctggggagcattttgtttaaacaggatctttaaaatgaagtgtacgcttataatacaagtgatgcttgtgtatttctcactttaggaaataaaatatttgccaatttgatagaattttgactttaacgttaatcgtatttttagatattggttagcatattttatgttaggttattttcatttgattttatctagttgtacgtagaagatactgtcatcttttaggacaaagtattgtaaaattatctgttttagcccatgttctgatgacccacagctctgtcacctttgagcatcatctccccattctaagtttttttcccacttaattcctaaccctgcctctttgaggaagcccattgacggggcaattaaaaccttctcattgctcctgagaccagaacggcaagatgtttcctttcagaagctgagagccacaaggaggacagcagtgagcatctgcacagaaacgagctcagagacgcccgtgttcagtggagcacgccgatggggtgggcgccctggctctagacgctctcctaacacacctgtgctttgatgacagtctgcaggagctgcctggtgaagtacctggaggagaacaacacctgccccacctgcaggattgtgatccaccagagccaccccctgcagtacatcggtcatgacagaaccatgcaagatattgtttacaaattggtaccaggcctccaagaagcggaaatgagaaagcagagggagttctatcacaaattgggcatggaggtgccgggagacatcaagggggagacctgctctgcaaaacagcacttagattcccatcggaatggtgaaaccaaagcagacgacagttcaaacaaagaggccgcggaggagaagccggaggaggacaacgactaccaccgcagcgacgagcaggtgagcatctgcctggagtgtaacagcagcaaactgcgcgggctgaagcggaagtggatccgctgctcagcccaggcgaccgtcttgcatctgaagaagttcatcgccaaaaaacccaacctttcatcctttaacgagctggacattttatgcaacgaggagatcctgggcaaggaccacacactcaagttcgtggttgtcactaggtggagattcaaggcgccgctcctgctgcactacagacccaagatggacttgctgtgaatggtgccacacagcgcccacagactgggccctcgcacccttgggtgctcccggccgccgcgcttaagaacattgcctctgggtgtcatgtggaccagacttctgaatagagaatatttataacttttgtatgagagagaattcacactcaacaagacactaccagcaccacgtttacagaggatgaaaacacttcacagtctcccagagccgatcgtcctctcccccgccccaccccgtgcttcagccttgcagggagagtgatgctccaggcaacacggttctgagtcaccttctgacacgagctccctctgcttgctttccaggtcttgaaaatctgaattcacttcagtttagtttatgaattttaggtttcatgataagcctcaattgtagttggacttttattgaatccttcctaagttattgaaaaaatgtcttttcatggtgaatgacaatatttatgttgcctttagcttcttgaagatttagaagttatataaaaaattaatttaaaagc

SEQ ID NO: 24065 - DNA, 2667 bp, Homo Sapiens
ggtgcagactttccgagacctggtttggttgtgtcctcagtgtactgaagctgtatgtcaggccctgcccggctgtgaagagaacattcaagatagtgaggtagactgtaattctcctttacttctaggtagggggagaatgcttgaaaccctgccctttgaaatggaatctaattattctctctaccctgtgtttgaagtgggcactcttcgaattgattgccaccttagattctcttttggatatagatggcatataaattataaaaacaagatttatccgacgggttttattacaaaactctgataccattgttctcttgaacagttctgttttgttttgttttgctttgcttgagatagagttgcccaggctggagtgcagtggcgtgatctcggcccactgcaacctctacctcccaaactcaagtgattctcttgcctcagcctcctgagtagagtagctgtgattacaggtgtgcaccaccacgcccagctaatttttgtatttttagtagagagggttttgctatgttgtctaggctggtctagaattcctagcctcaagtgatcacccacctcagcatcccagagagctaggattacaggcataagccactgtgccccgcttctcttgaacagttttgagtcagagatttagaccatggagtttttagctagaatgaaaattataatcatttgtgaaatttttacaaagatttggacgtaatcacaggtctactgacttaaatattcaggggtgttggacctagacagataactttttttttttttttttttttgaaacagagtctagctctgttgcccaggctggagtgcagtaatgccatcttagctcactgcaacttccgcctcctggtttcaagcaattctcctgcctcaggctcccgagtagctggaactacaggtgtgcaccaccacgcctggctaatttttgtatttttaatagagacgggtttcaccatattggccaggctggtctcgaactcctgacctcaggtgatccaccctcctcggcctcccagagtgctgggattacagacgtaagccaccgtgcccggctgacagatacatttttaagaagcttcacagatgactctgatgtgcactctaggttagtaaccatttttgtgaaaaatttagagaaattctttgagcagcttccactgaaacactaaaacccaatagggccaaaggccccaaacctgaggaaaccttatttattgcttaatccaacataggctatgaaagttttgagtttcctcttgtgtattagaatttcattcctatttgttgtagagagtatagtacggggaatcagtaaattaaatgaagtaaactaaagattacaccttttctgctggcactaagcgaaaagcaaaaccagtggctgtctattatctcctgtgttttagacagtcaagtgttgagcacttgctcttattcctttattctctaggggaagcaagcacttatttggctacttggtgtccatggggaaagaattcctaatgctccttatgtgttagaggactttgttgagaatgtgaagtcggaaacatttccagctgttaagatggagctgctcactgcttcgctgcgccttttcctctcccgacctgctgagtgccaggacatgctaggacgtttgttgtattactgcatagaggaagaaaaagatatggctgtacgggaccgaggtctcttctattatcgcctcctcttagttggcattgatgaagttaagcggattctgtgtagccctaaatctgaccctactcttggacttttggaggatccggcagaaagacctgtgaatagctgggcctcagacttcaacacactggtgccagtgtatggcaaagcccactgggcaactatctctaaatgccagggggcagagcgttgtgacccagagcttcctaaaacttcatcctttgccgcatcaggtaaaaacagtccttaccttaaatcttgtcatgataaatctttaccttttcaatgattggtggaaagtagagtatcttagcactaaacctcagactgttgcctgaatttgaagcatttgtgagcaagaaagaggttcgtcactggttatttcagccatttgtccaaaaataaaagtcacattgtgtacatttgggaatttggataaaaaacttagctcctacagattaagaacatctttcacacaagttttctgtctcttttaggacccttgattcctgaagagaacaaggagagggtacaagaactccctgattctggagccctcatgctagtccccaatcgccagcttactgctgattattttgagaaaacttggcttagccttaaagttgctcatcagcaagtgttgccttggcggggagaattccatcctgacaccctccagatggctcttcaagtagtgaacatccagaccatcgcaatgagtagggctgggtctcggccatggaaagcatacctcagtgctcaggatgatactggctgtctgttcttaacagaactgctattggagcctggaaactcagaaatgcagatctctgtgaaacaaaatgaagcaagaacggagacgctgaatagttttatttctgtattagaaactgtgattggaacaattgaagaaataaaatcataacagag

SEQ ID NO: 24066 - DNA, 4366 bp, Homo Sapiens
ctggcctcctcccgctaccccccattcccttctgactacctggccctgcagctgcccgagcccagtcccctgaggcccaagcgggagaaacggccccgcctgccccggaaactcaaggtaccctgacgtgggggtgctagggaggggcaggacggcaggaggacagtcacctgagggaggctgaaggcgggggcctgtcagagaaccatgaacagttaatttggggacccagtcagcacttagcactgaggggtggatcacagaagtctcggcttacaggcttgtatggagacaaatcagggcagaaccagccttggaggacccggtgtgcagatgccagggatcccgccctttcatggctgcagtgtagcggggccaggctcattttcccaggggggcgtgttgtgtgatgccaggtagccccagaccgggtcaggattatgggatctagagtcaagtcaagactgcctgttagaaaccacgtggccttgagcaggtctctgctaccctctaggcctcctaggcttggcacctatagggcgagtggtcctactcgatgtgaccagcaagcgcccctggagcgcctcctgttacacggcagtgcacaaagcagaccagtgcctgccctcacagagctcacagtctagcaagataggcagaaaacacaccagaaaagtaggtacttgtggagaagaacagagcgaggtccagagcatggggacgccagggggacgaggctgacacttagggcccagcagtctgggatgttcttgatcagagacttacaggaaatggcagcaagctgtgtggctcctgggcagtgtttctgtcgggcagagtctgtgtttgggagaaaagtaagcagggaattgggtcccggagcaggtcagagggggagctcatgaggtgccagtgtgcaggattcgctgtgaatgaagccttggagacagcagttccctggcggggcgcaggttgcaggtgtggagggggagtgatctaattgcatcttaacaaaattgcagacactggtggtcagagaacagactgagcggtggagtgagttgggacgggagtgaggaggccaccacggtaaaccaggccaagggcagagggtccagagggagctgcggacccatttcagagaatgagcatgggagttcctggaggacctggtgtgggctgtgcgggagagaggccaggatgcctccagggctttagtctgagcacgagtggagtctccctccctggagatgggagggctgtgggaccacaggcttggaggaaaactgagtctggccgcggatgtgtcagatgccatctggaaaggcagctagatagcggcccgtgaggggctgcgcatttggaagccgccaggctggcggtagatgcaagccttgggagagatggggatgggctgaggggcagagcggagtggggaccaactgggcggctcccagggttctggagccagaagcagaatgagaggccgcatttgcggtggtctggagtacaggatctggagctctaatcccaactctgccgttttctccgtgtgaccttggccctgtgaggcttcacctcttgagcctgagaagcagaggtgacagtactggccctggttcttagcaggggggtggcgggcagggtagggggtggcgcagcactggggggcactttgaggctttctggctgggtgctgagtcctgaagcagagtcatgtccgggagcaaagttgtagacattctggagagaaggtttgagagggtggcccaggtccatggctgtcgggggaggtggggagaagccaggaaaggcctcagcaaggagaacgtgtaagcccagggtgagtggatttggatattcctggctgaagccatagtgggaagggagacagggccacagggaaagcactgcctgggccagagcaggagtggtaagaaattggcaagaagaaccgggtggggtggggtcatggaaggcctggacagtggcctgaagtgggaatttgtctgttactgtcaggggagcgggagtccctgaagggccaggggagtgaggagatggaaggaagggagtccaagcagaggaaggatagctgtgaagacagaagcaggttggttctgtcaggcctgagttggacttggccagctttgaatcccagctcttccagtgctcaccatgcgacctcagcgttgtcatttcactctttaagccacagctctctttctccattcagtggcggcattgtgcggagaatgtgagtgaagggatgaaaatcgctcggcccgtgcctggcccctagtaagccacagagaaatgtgagccgctgccagtcaggctgagaggacgccactgaggaagtccaggccagggtgggacatgctgcgcacagtggggaaggagaggaggtggccagaggaggggatggtcctttccagtcatacacgcatgtctgcttgtgtgtgtacatgtgggggcctggtgcagggcgtgggggtgctgttcagagttggaccccccatcatccatcctgccagcctcctataccctgaggcctgacccaccctggcccccacaccaccccagcagcggagatgagggtaagtgagggctccttaggaagcagagaggaggccacagggccaaatgtgacactcagaagggccactggagaccacgcatggcgtttcctgccagcccactcagcatctagcccagggccagactggacactgccccgcaggacccagcaggcctaagcctcaggacctccatgtccacaccaggttcagcctcctctgctggcacgtgacttctccccgtttcccgccccccagtgtcctgaggctgggagggcattaacagaaaccacctgacacacagcaggtgcccagtttgtgcccacagacaaagcacggggactgcagaggagacccacagagctctctagggagggtttgtgaggacctggcagcgggggggagctgaagggttgagcagggcagaggccacttcccaccctcagaggacaaagcaggacttctgacaaatagagcaggatgcccagggggaggggctgcctgtcgtcccgcaggcggcactcccgccccgaggccccgagtggcacggtgacgcgctcaggtctgtgttttagagcgcgcgctctggctgccgtgcggaggagctggatctgggagaggctgcgggcagggagtccagttaggaggctgggaccgcagcccaggtgagctaagaggagggctgggcctaggccacagctgccgggaccccgaggaggggcccatccaagacataatacaagcttcttgggggcagataagccgctggggctcctggctcaggcagcctgcaataccctccaccgaaccagtgagtgccgcagaagagggagaggaggagtagggagaggaagctggtggcaggtggcacctccggggccggcaggcaggcaagcactccaggccgactccgcctctggcttaacccctgtctcagggcagcccaggcgcctccctggagagggcaggtgcccgggcctttccctcccggtttcctgtgagacacccccatcccctcatctcacctctatcaccacccccaggcacttgctggtttgaggctctcgaggggctgaggggggcaggccctgagtgcagcatgggttggcccagctgtgcccagggcctcttccccctccccagagctgccctggggggcaaagcctagtctcctgaggccccagtgcctccctgactagtccccctgtgtttcttccccctgctgcagatggcggtgggaccccccgactgccctgtgggagggccgctgaccttccctggccggggttctggggctggggtcgggacaaccctgacccccctcccaccccctaagatgcccccccccacgatcctgagcacggtccctcggcagatgttcagcgatgcaggtagcggggacgatgccttggatggagacgatgacctggtgatcgacatcccggagtgaccgtgacatcacgccatgcccaccacggccccgcccggcgccctccccgtgccagcacacacgagtccagcttcctcggaggtgtttattgatgcccagctgccatgctccggccactgacacaaccagaaaaggcgtaaacatgcacgggtgtcccccaggagggtggcaggggccctgccttcaaaccccggccccctccaggggacagttatttaaacgagtggccgggagcatctgccacctgctggggaggcagagaccctgcaatggccacctctttaaaagggcagctgtacagggctaggttttttcaatgaagtttctgtattaaagg

SEQ ID NO: 24067 - DNA, 4422 bp, Homo Sapiens
cccacgcgtccggagggcttctgctgacacgtccaactgtggccccaggtatgaaagctttgaggacccagcagggaccattgacaagttccactatggcacccactactccaatgcagcaggcgtgatgcactacctcatccgcgtggagcccttcacctccctgcacgtccagctgcaaagtggccggtgcggcccaggggctggtgggcagactagcgggcagataaggggaggaggctggtcctccccacatcctgggcccacccctggctcccttcttccctccagccacagcatctccctccctgtctccattctccccacctcaccttggccccgtgcccctcccccagctttgactgctccgaccggcagttccactcggtggcggcagcctggcaggcacgcctggagagccctgccgatgtgaaggagctcatcccggaattcttctactttcctgacttcctggagaaccagaacggtaggtgtgaggtgctcacactggagcgggcaggtgtagggatggagagcagatggtggagtggccaggggggcagtcgggatggacagggagacagctgacccagtcctctgtgccaggttttgacctgggctgtctccagctgaccaacgagaaggtaggcgatgtggtgctacccccgtgggccagctctcctgaggacttcatccagcagcaccgccaggctctggtgaggaaggaaccacaggcaaacggcaggcagccggggttctgaagatcatggggggtcagctgtccctgcactgattgctgcctccctactctcaggagtcggagtatgtgtctgcacacctacacgagtggatcgacctcatctttggctacaagcagcgggggccagccgccgaggaggccctcaatgtcttctattactgcacctatgagggtgggcagtgcgctggactccagtcagggccaggacaagatcaggtcgggtggatgcagagggcacgcagggagccctgactgctctgcctgccttcccaggggctgtagacctggaccatgtgacagatgagcgggaacggaaggctctggagggcattatcagcaactttgggcagactccctgtcagctgctgaaggtaaggccagcttagaggatagtggccagggatgcccatgccatggtgctgaccagccacttacccacaggagccacatccaactcggctctcagctgaggaagcagcccatcgccttgcacgcctggacactaactcacctagcatcttccagcacctggacgaactcaaggcattcttcgcagaggtgaaaggaagacaagacctcaactttatattctgtgaaatgggtttaaccccactgtccttaccaaccacgtggggcagatgggaatcctaatcaaggtcactgatttcaaggcaccttagaaaatgagctaaacatgggaagagtatgggggcaggaggggtgccttcttcatcagggccaggataaagtgtcgactcaacaagctctgaaagccttagggagatcaggagggagatctgtccttggaccccttccatcgccttcctagacaggaacattcctgaatgttgcccccaggcctgactttttttttaggtttccctctcttcctgcctttgggctagggggacaaggaataacagggtgagaggaccaagttgaaactaagtgtgatactctggaagcatcttccatgtctgtcccagcttctcacccactttctgagatgccctcctaaagtctctgcctgtttcttggagggaacctctgcatctgtgacacctactctatgacccctggggactgacagtaaaggaagggatgatgcttcagggagcagatagtgtaatctgatagtactcaggcatagctaggcctgcccttgcccctgcaggttgtcagtgatggtgtacccctggtgctagccctggtcccccaccggcagccccactccttcatcacccagggttccccagacctgttggtaagtgcattgtgcagagccccagctcagctccactcccccttgcctctgccagaaacccacctctgccccctcctgcctgcaggtgactgtgagtgccagtgggctgctgggcacccacagctggttgccctatgaccgcaacataagcaactacttcagcttcagcaaagaccccaccatgggcagccacaagtaggacagagggctgtgggtggggtgggctacaaatgccctgcacccggaattattcccctccctaatcagaatgtaggccagctgcaggggaaaggtctggccaggctccctgagggcctgggtctcttccatgtggcctggcctcacttgctatccccctcactgggtcaggacgcagcgactgctgagtggcccgtgggtgccaggcagtggtgtgagtggacaagcactggcagtggccccggatggaaagctgctattcagcggtggccactgggatggcagcctgcgggtgactgcactaccccgtggcaagctgttgagccagctcagctgccaccttggtatgaacagccttggagctggggagaatgaggcacacaggtatggggccgggttctgaggctggccagggcggatgtgactcctccgttctgcctgtaccctccccttcccatgcagatgtagtaacctgccttgcactggacacctgtggcatctacctcatctcaggctcccgggacaccacgtgcatggtgtggcggctcctgcatcaggtgtgcctcgtgggcagctctgtggggcccccgtagcccagacctgcagcccatccgtccctcagtggccttccagtcctgtcctcctctagtcttggacaaggccttcatttcctgagcctcaggggacagtcctaagccaaccctggtcctccacagggtggtctgtcagtaggcctggcaccaaagcctgtgcaggtcctgtatgggcatggggctgcagtgagctgtgtggccatcagcactgaacttgacatggctgtgtctggatctgaggtgtgtgtatgcatgtgccctggggagggtgagtttcctgggcaatccccctggagcccagactcctgcccaggaccctaagttgccttcctgcaggatggaactgtgatcatacacactgtacgccgcggacagtttgtagcggcactacggcctctgggtgccacattccctggacctattttccacctggcattggggtccgaaggccagattgtggtacagagctcagcgtgggaacgtcctggggcccaggtatggggaaggggtgcccagcaaagatggaggggcagttgggatcctgtccttgctgacactccctgcttcctccaggtcacctactccttgcacctgtattcagtcaatgggaagttgcgggcttcactgcccctggcagagcagcctacagccctgacggtgacagaggactttgtgttgctgggcaccgcccagtgcgccctgcacatcctccaactaaacacgtaagccccccatttatgggttcatggcccctgaaggtggtggtcattggtgtaggataaaggccctaggaacccacacaccatacatgtttgtgggcacatatttcaaggtttgttacctgtcccttcatcttcccatggggaggtcttgccctgggcctccgcttagccacagttgtgggagatttctttgtgtataagaatttcaatttaaccatccttaaaatgaggacagagagggtatatgggataagggatatctgctggtcgcaaagcccccttgcagtcgcaagttggtgtatatcccctctcccttccagactgctcccggccgcgcctcccttgcccatgaaggtggccatccgcagcgtggccgtgaccaaggagcgcagccacgtgctggtgggcctggaggatggcaagctcatcgtggtggtcgcggggcagccctctgaggtgaggatggggcgggggtggggaggcccctcgaacggggcggggcgtggcgcggcgatcccagctgatcctactcaacccttacgcccaccaggtgcgcagcagccagttcgcgcggaagctgtggcggtcctcgcggcgcatctcccaggtgtcctcgggagagacggaatacaaccctactgaggcgcgctgaacctggccagtccggctgctcgggccccgcccccggcaggcctggcccgggaggccccgcccagaagtcggcgggaacaccccggggtgggcagcccagggggtgagcggggcccaccctgcccagctcagggattggcgggcgatgttaccccctcagggattggcgggcggaagtcccgcccctcgccggctgaggggccgccctgagggccagcactggcgtctgcggcc

SEQ ID NO: 24068 - DNA, 4213 bp, Homo Sapiens
ggacgcgcaggagcgcgcggccctggccgtgggcagccccggtcccggcggcggcagcttcgcccgcgagccctccccgacccaccgcggtccgcgcccgggtggcctcgactacggcgcgggcgatggcccggggctcgcgttcggcggcccgggcccggccaaggaccggcggctggaggagcggcgccgctccactgtgttcctgtccgtgggggccatcgagggcagcgcccccggcgcggatctgccatccctacagccctcccgctccatcgacgagcgcctcctggggaccggccccaccgccggccgcgacctgctgctgccctccccggtgtctgccctgaagccgttggtcagcggcccgagcctggggccctcgggttccaccttcatccacccactcaccggcaaacccctggaccccagctcacccctggcccttgccctggctgcccgagagcgagctctggcctcccaggcgccctcccggtcccccacacccgtgcacagtcccgacgccgaccgccccggacccctgtttgtggatgtacaggcccgggacccagagcgagggtccctggcttccccggctttctccccacggagcccagcctggattcctgtgcctgctcgcagggaggcagagaaggtcccccgggaggagcggaagtcacccgaggacaagaagtccatgatcctcagcgtcctggacacatccctgcagcggccagctggcctcatcgttgtgcacgccaccagcaacgggcaggagcccagcaggctggggggggccgaagaggagcgcccgggcaccccggagttggccccggcccccatgcagtcagcggctgtggcagagcccctgcccagcccccgggcccagccccctggtggcaccccggcagacgccgggccaggccagggcagctcagaggaagagccagagctggtgtttgctgtgaacctgccacctgcccagctgtcgtccagcgatgaggagaccagggaggagctggcccgaattgggttggtgccaccccctgaagagtttgccaacggggtcctgctggccaccccactcgctggcccgggcccctcgcccaccacggtgcccagcccggcctcagggaagcccagcagtgagccaccccctgcccctgagtctgcagccgactctggggtggaggaggctgacacacgcagctccagcgacccccacctggagaccacaagcaccatctccacggtgtccagcatgtccaccttgagctcggagagcggggaactcactgacacccacacctccttcgctgacggacacacttttctactcgagaagccaccagtgcctcccaagcccaagctcaagtccccgctggggaaggggccggtgaccttcagggacccgctgctgaagcagtcctcggacagcgagctcatggcccagcagcaccacgccgcctctgccgggctggcctctgccgccgggcctgcccgccctcgctacctcttccagagaaggtccaagctatggggggaccccgtggagagccgggggctccctgggcctgaagacgacaaaccaactgtgatcagtgagctcagctcccgcctgcagcagctgaacaaggacacgcgttccctgggggaggaaccagttggtggcctgggcagcctgctggaccctgccaagaagtcgcccatcgcagcagctcggctcttcagcagcctcggtgagctgagctccatttcagcgcagcgcagccccgggggcccgggcggcggggcctcgtactcggtgaggcccagtggccgctaccccgtggcgagacgcgccccgagcccggtgaagcccgcgtcgctggagcgggtggaggggctgggggcgggcgcggggggcgcagggcggcccttcggcctcacgccccccaccatcctcaagtcgtccagcctctccatcccgcacgagcccaaggaggtgcgcttcgtggtgcgcagcgtgagcgcgcgcagtcgctccccctcgccgtcgccgctgccctcgcccgcgtccggccccggccccggcgcccccggcccacgccgacccttccagcagaagccgctgcagctctggagcaagttcgacgtgggcgactggctggagagcatccacctaggcgagcaccgcgaccgcttcgaggaccatgagatagaaggcgcgcacctacccgcgcttaccaaggacgacttcgtggagctgggcgtcacgcgcgtgggccaccgcatgaacatcgagcgcgcgctcaggcagctggacggcagctgacgccccacccccactcccgccccggccgtgccctgccggcagggccccccacccccaccccgggccgcgggctcggcctgccccttacgacggcgcccgggccaggaatgttgcatgaatcgtcctgtttgctgttgctcggagactcgccctgtacattgcttagtgccctcaccggccgcccagcccacccagcgcacagtcaggaagggcgtggaccagggaggctggggcgggaggtgccgggggtggggtgccctagcgtgaccacctccttcgcagctcctggtggccattctcccagagggggaacctagtccagcatgcgaggtcaggacccgccttggtgactcggggggaggggggagacattgggattctcgatgggggccaaggagcccccctgttttgcatattttaatccactctatatttggaacgagaaaaggaacaaatatctctgtccgtaatagtttcctctcccctcccttctacttccactggtcccactgcagctgcccagtcttccatctccggcccctcactgccactgccaccccacaacggggcaggggacgctccagctggtctggggttggccagggccctagtggcccgccctggggccccagctcggcccctcgcctcgctgagctctagtgtgccccaccgacccttcaggtgctgctcgtggtgggaggggcggcaggccgcgggtcctgctgtgcacccgcgggaccagccggcctgggagaccatcggccgggggggatgagggcagggccctgccgctccaccgcagccatcttcctcacagggtctctccccaaggagggggctagcttggtccccatgctcttgggcaactacagcagagaagcctccctgccttggaccccaaagtctcctgtcctgccctttatgtgtgtgggtgaaactgggtgcgtctgagcacgtgggagccgtgtgtgtgcctgattactgagtggccaccaggggccgctctggactagcgcggggccgtggaggcgtgcaccgtgtgcatgcgtggggtgtacctgtgagagcaccctgtctcctcttccaaagaaagtcagaggccatcctgcaccctgggtccagctgtttgcccagcctgtccttccagagcctcacccagcctgagcggggttccctggtgaatccctgctgcttggggaggccccaagggccccttggaggcagcgcccccaccttgggcttctgagggcatcatagggggacccctagagtcagttcaccacaggccctggggagagtcaaagacccccgagggtgcccagccccccacactgtgactcctcacactcagcgatgacctgtggggtggggggccctgggacgtttttaaacctagggtttggagtctggactaagctccatccacgtcactcacaagtttctgtttatatttctagctttttttaataaaataaaaaaaaaaaagaaaacagaagttttcacaacccaggggcctggcacgccggtctgtgcctgcccgccccgccctggcccaccggccccactccctgggcacagagtcacacccactcatccttccgccaacagtccaggtcacacagcagcagtcactgtaacagactgccacatacacactcggtctcacactcacctgtgggttttggttccgttcaatttgggtttttaactttacagggtcagttccgcttcacctccttttgtatggagttccatccagggggtttcaccccctgctccagtcctgaggcctcctgaccctgacgttgtgatacgccccacagagatctatgtttcttatattattattattgataataattattataatattattatgtaataaatttataagaaatg

SEQ ID NO: 24069 - DNA, 4346 bp, Homo Sapiens
atcagccactttgtgctcaccacctctggggaaggtgtgagaggagagaaggaagtggctgtttggctgctgacaacatgaagacttcctgcgatgagaacagaggcacaggtgccggccctgcagcccccagaacccggactggagggggccatggggcgccggaccctggccctgccctgggtgctgctgaccctgcgtgtcactgcagggaccccggaggtgtgagtacaagttcggatggaggccaccgagctctcgtccttcaccatccgttgtgggttcctggagtctggctccatctccctggtgactgtgagcagggggggccccgatggtgctggggggaccacgctggctgtgttgcacccggaacttggcatccagcaatgggcccctgctcgccaggcccgctgggaaacccagagcagcatctctctcatcctggaaggctctggggccagcagcccctgcgccaacaccaccttctgctgcaagtttgcgtccttccctgagggctcctgggaggcctgtgggagcctcccgcccagctcagacccaggtggggccggggtgaggggtccaggagggcagggaggggctcgggaactggccatccatctgattcttgcctctgtgcccagggctctctgtcccgccgactcctgcccccattctgcgggcagacctggccgggatcttgggggtctcaggagtccttctctttgactgtggctacctccttcatctgctgtgccgacagaagcaccgccctgcccctaggctccagccatcccacaccagctcctaggcactgagagcacgagcatgggcacccagccaggcctcccaggctgctctccacgtcccttatgccactatcaacaccagctgctgcccagctactttggacacagctcacccccgacagggggccgtcctggtgggcatcactccccacccacaccgcacactggccccagggccctgctgcctgggcctccacatccatccctgcacatggcagctttgtctctgttgagaatggactctacgcttaggctgggcagaggcctccctgcactggtcctggcctcactcttttccctgacccttggggcccagggccatggagggacccttaggagttcaatgagagagaccatgaggccactgggctttccccttcccaggcctcctgggtgccacccccttacgttattcttgggcctctaataagtgtcccacaggtgcctggccaggcccacctgctgcagatgtggtctgtgtgtgtgcatgtgtgggtgtgtgtgggcacaggtgtgagtgtgtgagcaacagtaccccattccagtcgtttcctgctgtgactaagtcagcaacacagttcctctgacatgggccttggctgtgcttctttgggggtgaagagattggggaggaagtctccacccctgggaggcagaagccaggcatagcgcgctggctaggactccagtaccgtgaagggaggcagtgagagcagacatctgtgcctcattcctgatctcaaggggaaagcaagaacaaggtgggtgccaaggaggggcaaggggctggggcaggcatagacgtggctggtgaggaaaggaggatagttgttgggggaaggtggggacatacaagcagcagttctcaaaatgggcagggtcctggccccctccctgcctctgctgaacactgcatcccatgcctctcccatggccacctgctgggctaacgggctggatttagactctgcccatgttggaatcatgccctcctccagggccggtgcctcccaaaacccccctctgagagagagccacagccccaggcttagccccaggccctgtcactgctgttgggggagggaggatgaaccatccgggaggcctcacaccattccagagcagaaatcctgacacaaaaggaatctcccatgggggttcagctgggtccagagcccggaaagtgacataaacacgcaccttgcatctaaggagaatgcacgtggcggtaccgggcctgaggcccctggggagtatgtaccctccagagctacccagaggctgttggctaaaagttctatgtggccccctccttgggcagcctggtaagcaggtgaccttctagctgggtcccatgggccacgggcaaggcaggaatggaacgaagagtcagtcctcagtggctgggtgttgtatcccatgcctataatcccagcactttgggaggctgaggtgggcagatcacttgaggccaggagtttgagaccagcctggccaacatggtgaaaccctgtctctactaaaaatataaaaattagctgggtgtggtggcacacacctgtaattcccagctacttggaaggctgaggcaggagaattacttgaacccaggaagcagaggttaccgtgagccaagatcacaccattgcactccagcctgggcaacacagcgagaatccatctcaaaaaaaaaaaaacaaaaagtcctcaggcagggtgggccaccctcttgaggccttgcccaaacagccagggggtcccttgtcctcttttcggcccacctttgcaggtgggaccagttcagtccaaagccccggtgcctcagtttccctgtgggttgaacaaggagaatgaggtgtatagggcctggctcagacggaggggtttcctgagcatggggagcctgtttcctcagacctgtgaagggaaggagggtggatcggcctgactggccctgggaagcacagaggagcctactgggaccagggaagagactgacaagagaagggaggcctgtccctgcctgcttctgtctcaagaagattgttatcacttcctctggtgaaatcctgccttcctgtccccacggcccctcagctgatgccaccttactctggagaggatgggcagagcctcctatggagggagccctgtgggtcaccaaagctccagtgaccacccccgggcaaagacctgcagatcccctgttagagacgggcccaggactttgtgcggggtgcccactgttgctctgagccttcacttcctcagggaggcttcctcaggatctcgaacctgcggaaggaggaccagtctgtgtacttctgccaagtccagctggacatacagatcagggaggctgtcgtggcagtccatcaaggggacccacctcaccatcacccagggtgagtccagctgccctggcaccaaggaaccttcctggttcagccataggctcaggtgtgtggagggaatgacctgaggggctgtatgagggaacaacctcctggggctcccctatgcctgagttcctgcaactcagaagttgaggcccagagatccaggtagagggggctccagtcctgggactgccctgcaagtcatgtggcctgggacagggcttctccaagctctgtcccctcctgtgtagggcagggaggtcagaggggaccctgcagatccagtctcatgtctgggggtcaaggggtggcctcgagagggaccagtctctgtgtaggggaccgtcagccccctcaccccttgagcaagactgtggtccctgcaccaagggagcaggcctggggtgggaagaggccagctgggctgtggtggtgcctggggactgcatgggagcccctgccagggagggagagggacagaggacaagctgggggctctggtgcttgggctgggggctgagcgcctgtgacctccactggcttcctccttctcctctctgaggactgaatctggggtgcagcagagcacagactcaggcccgcctttcctctccctgaaagagcctgcgctggccttggacagagaaagggatgagaagtgaggctgagtgcggtggggtctgcagggatccaggtgggaggggcccagccagccaaggtgaggcccagcccctcagcaggaagatgggcactggggcccttgggcagggctgacttgacacttttgtgtgacttgagccactgtgcccagcctgaacaccctttcctggtaaaacactccacaaaccaggaagagaaggaatgtactgcaacaaaataaaggccagtcatgcaaggcccatggctgaaagtctttcagtcattttagatgaaagactgaaatctttgcctccaagatcaggaacaagagaaggatgcccgctctcactacttctattcaacacaggatttgaagtcaggccgggcacagtggctcacgcctgtaatcccagcacttttggaggctgaggcgggcagattacttgagcctatgagtgtgagaccaccctggccaacatggcaaaaccccatctctact

SEQ ID NO: 24070 - DNA, 4870 bp, Homo Sapiens
gtttaaggagatcaacaacgcgcacgccatcctcacggacgccacaaaaaggaacatctacgacaagtacggctcgctgggtctctacgtggccgagcagtttggggaagagaacgtgaacacctacttcgtgctgtccagctggtgggccaaggccctgtttgtcttctgcggcctcctcacgtgctgctactgctgctgctgtctgtgctgctgcttcaactgctgctgcgggaagtgtaagcccaaggcgcctgaaggcgaggagacggagttctacgtgtcccccgaggatctggaggcgcagctgcagtctgacgagagggaggccacagacacgccgatcgtcatacagccggcatccgccaccgagaccacccagctcacagccgactcccaccccagctaccacactgacgggttcaactaaatccaggaggagctgtggtcagaggaggagccggcgcctggccacgccaaccttagaatcatgaactgtagtcacagagatgggaaggcagcctcctgcctgccctggccttgctggggcccctcctgcctccacgcccacccagcgtcgacccttgacccacgaagtgcgtagcatgcagtatttaaagcagtgtagctacggtcttctgtttttttcccttttttaatagcatgtatggggttctgttccatgtctgtgttgtggacattccgcggcatgaccgcgtgaactgcacggtggagctgcctcagggctgtcggtcaggttggtccagtgaggggtgactgcagccggtcaggtgggcgaggagaaggggggctgcccctttcctacctgtgcttgaggggccggaggcaggtgctgcctggcagagctgtgttaccgtcttggcctcggggtctggtccacactctgtgctcccagccttgaggctgcagtaggactctgatctcacctgccagaagagaggcggggccgcgtcctcctggcgtcaccggcgtcactgtcattccttggtgtctgtgctgggcatggttggcttgggggtctgtggtttcctgggccttgtggcagggtttctcccgtgggagaatttggtgtggaaagcataggaggccccttccgaggttgacaccgtgtcctccgcggtgtttctcgcctggtcgtctcgtcgtgtggacgctgccgttctggttctcggaggtgtgtccttcgccgtgttggggttatttgtctgtgttcctgcacttttcccgggctctgagctggattgatggggccagtctcccccctcccatcttgaggtcgttctccacattccttccagcacacctgtcctttccatagccctttttggacctttagaaccacagatgataggaccagcccaatgagccacagtcagagagtagattgtgcatgtgtgagcacccagctactggggacgggggctctcccacgacccctcctcctgtgtttgccagagctcccatctgccccactcgcctttgccccgtcatcgatgattcaggcagagccagatgcgttaggtccctggaggaaggactgactggaccagagggaccctctggctcaggagggttgggtccctgggaggccggcagccaggccacagaatccacacgtggaccattgtgggtccctgggaggccggcagccaggccacggaatccacacgtggaccattgtgggtcccttgggaggccagcagccagactacggaatccacatgtggaccatgggaagtcagtctcttgcgtgtcctagaccttgtgggtggcgccctgcataggggagcagggggaacgggtctgatgtccctgtgctggctgagggctcagagctgcccgcactccgtagctcatgggatgtgctgggcctgcctttggcgccatgctgcagactccagtgggcctggtttctgcagaatgtccatggtggccgctgcagagttgcagaggtccctgtagagataaagctgaggaggaggctgtgtgtgatggctctggctcggaccaaccagatgagcctcctgaagcccccttccctgcctgcctgctgacccgtggccccagctcactcattgccctcagcagccacccgaggctgtgcagaagggtaggttcaggttgaccaggaagctgccaaaagggacatggatatgaggatacatctggacgtgcttaggaacagggtgctggttgagggcccccagctgacccctactgcagatccgcatgtggaccatgagccggctgccagcactaggtcctgggcagctttgtttgtcccacttttctttgtttcttctcactaaaatgatcacgaagacctttgacaagaggagagatatgcactgtgatattaaattagaaataatttatcaaaatcagacctctcctaaaagaataagaaattcattgtttggcccatcctgaaaggtgaggtggcgagacagtggggtgcctccgtgccgcttcgtgcagcagcaagttcagcctgagatgctggctgtactcagcctttgcaatttttgtagatgtagcttaggacgtgagttatttttccgcagactggccaagagccaggttctaagcttggacctaaggtagaaagctgcccatcgggggccctagctcagccccaccaggccctctgttgggcctgcacacagctctgtggctagaacactccaaggcccttcggtacccatcagagtgggccccttgccaggtggcttttcagttacagagtccagtggaccattttgtagaaccatgcagctccctgcggaaggtggggtagggtgggaaagaggagcaggtctggaggtttgtggaacccagtcccctgcagaatctgtaaaacctaataaatcatggttgtggccattctcacggtggtgattgtgattagacgacccccgggaagcccagacactcggggcctggagttcctccccctgcctgacctagaagcagaaccgttttcagcgctctgccctgttggctttaaggctttgtcttaatttaaggaaaaagatcctcccgggttttatttctctctttcttgagtggactgtttccctataattaaaagaggtggtgagtcctggggtagcttccgcgcctccctgtccacgtgctaacagatcaggacgcccccagcacccctgcctgcttttgctggtggcagtgacgggaccccgactcctcactctcgggccgcagacaatgctgtgagcaagtgtggccatgggcacagaatgtccctttggacgccgctgctgggggctgccaggggccctctggggtcgtgctttgaggcccgtccggttcacgagggggtccgggcagcactgactgcttccgacctgcaggaggcgtaggagcggccctgcgggccctttcacggcagctgctgctgtatagatttgtctccactcagtgacgtgggatttttttgtcttccttttggctttatttttaaactgctttagatattactgctcagtgtttgtgaactttcctagttctctatgttgttagtgcagccagcacccagtggggacctactagaaaaaggaactggcatgcacacgtgcccagcaggaaaagcttcgtcttcacgtcggctgctgccatccagaagaggccctggagcctcacgccgtcgaggctgctctcaggcgttctgttccgggcgaggcttgtgctgcaaggaagggcaccagcatgcaggctgccactggagggtccgggtgctgcgggcagagttcagcgcttgtccaccctcccttagctctgactcagtgcatcctactgtggggacatctcgtgaggggacacgaaatgactgatctcaccctttcccagtattcagagctgtgaacccctgtggcgcaggactggcctgtgtctgttattttggttgtaaatcattctcctgtggaattggcaaaagctacatttttactgtccttaccagcaacagtttgcgtcgtcacatgctgtgagtgtgggctgtggtgtgtccgtgtgtgtacatatgtgtatatgtatatatcacgcagcaggagtgtcattcatgctgctgtcccctggtgaagtgacaagtacaattaaaggtggctctgaaatggcctctggtttcttgggagtcgggcagggacctgcaggaggctttcccagcaggtgcacagaaggaagcgctgagcccactgtgtgcagagggtgtgtgcccagggcactgccacggcccccaccagcattggcctctgctctgcagggtggggtgcccatcctgggggctgtgtgtcatgctcacctgacccaggtgtgtgtcccggtgtgaaatcgaggaggggactggaagcccttccctgccttgaaacatgaaagctgattttctgagcagcagatacggtcagtggcaaagctgcatctgaagggcggcctgggaaggggccctgtgctggccccgggtcggccccagaggagtccacacagcaccacctccagaaggggctgggcccggggtcctgcaggcggcaccttttggtagagtttgtttccctggaaaatggggaaaatgtttcaagccaggtgaggggggaagttaacactgaaatatgtattgtttttaaaaatcaaatgcacacgcatggaagctgcttgtccatgcactggttttgtcactggcgtcctggaatccgaccgtgttggggtgcaggcgctgtcagactccggctgatcctggctcgagcacacacatctaagggccaggctggttccgcatggtgatctccgtcttgtatgtctgaatgttggcctaaaataaagattactgttgtaaaat

SEQ ID NO: 24071 - DNA, 4647 bp, Homo Sapiens
gtcgtgaaagattgtttggctgctgggggagaatgtcctggagcaggtgatcagcaaggagggaggctgttgctgtggctctggtgaaaggtgatggaggcagggaccgggcggtggctgatgggagacaggcagagccaccgggttggtgatggaccggctcagatccagtgggtggaaggaggtgtcaaggataacatctttgtttctggcctggatagtggggccctggccacctcggtgtgccccttcgtctccggggtctccaggggcctgctgctgtccactgggctctcaggacccagctgcatgatgccacctaaactgcagggccctccaagtccccagcaccagcggggcagcaccagtagggcctggacctctttgagaatatgttgaaaagctgacatcaacctcgacgctgtggatgttgggcctgatcattctttggggtgggtctgtcctgggcactgcagggtgctaagcagcctccacccagtccccagtggtgacacccaaaactgtgtccagacattgacaggtgtctccaggagggagactcgcctccatctgagaagcagaaccagcctgacagtccacctcccggctgaaaagtgcttgcatgtgcgatttgccttccgcctgggagtctgggggcactgggatgccatccttgccccaccctggctttcagagctctctcctctcctcctcgtgtgcccatgagtccggctcacaggaacgtgggtctcacatcaggtcctgagggagcaggtgtgtttctgggcctgaggctgctccttggtagtgagggtgtccccacgagccgtgtctgtggcgcctgcagctgcctgcatgtccatctgtgtccacatctgcctttgagcctcatcttcctggccccacggttttctcatgctgtgacccaaaagccaagcattccagggtgttctgctgaaattgagttgtgagcgtgtctctctcctcgctccagtctgaaggagaagcgtggtcggtagatagacgtctcagacctttgtgttttcttcacgtctgtctgttggcaggtccttacactattgtggttgctttagcaacttagctgttgtcgacttaatgtgtttcatgacgttctgcagcaaggaagaaggtccgagtttccactctcaatcaggcaccttcgttcccctcccccctcacttgacttcctgtggggtgtgtggtgtctgcacttatagatgagaatgctgaggcctcaggagggcaagggactcgcccacggtcacggaaccctaagtcaggggtggagaaggaccccctgacgccagcccacctcccctgcccctcagcaggcctggctccagcacagagaagagccattgttgctgctctgggggccctaggagcctgggatgtatcctgcctttgtttctagagcctttgtttgttgtatttcctctgtctccagacatcgcaggccggtgggacccggcgcctgtgcacgctcacgtagcggggcctgttcgggtccctcgtgggtcccttcagttcgagctctgtccttgcctcagcggcccgtcacccatagggtggcagagatgggccgggggagggagtgggcagcagtgcggaccgagtcctggcgcatggggtttccctggtgctggagccgggcgtttcgggggtgtgggcggggctggggtcatatcccctgcatgccccgcatgccatggctgtactcacatggcaagaggtggtgatcgccagctcagggaaggtgggggttccttcatcctgtggagagggggctgaattggggtcccctgagctgtagggtgcagtgcctgacaggccgtggggagggccgaggggatggggatcgacaggccccgggcccatgccgccccctggcacgggaggatgccccgcctcccgggggtgcccagctggactgtggcacccccaaaggaccccacatgtcactgttcccccgcagggcttcccacggcacgacatggagacctgtggttgcgaggctccctggggctcggcttggaccgcgatggggctgggccctggcctcctaacggggctgctgtctggggcggtagctgggggggcgctctcccccctgcccgcgactcggagcacccccacccctcccctgccgggccaggccgggcggcgttgttggcgggggccccggtggaggcccggcctgggcggcgcccgccatgaatgggctgtcgctgagtgagctctgctgcctcttctgctgcccgccctgccccggccgcatcgctgccaagctcgccttcctgccgccggaggccacctactccctggtgcctgagcccgagccggggcctggtggggccggggccgcccccttggggaccctgagagcctcctcgggcgcacccgggcgctggaagctgcacctgacggagcgtgccgacttccagtacagccagcgcgagctggacaccatcgaggtcttccccaccaagagcgcccgcggcaaccgcgtctcctgcatgtatgttcgctgcgtgcctggtgccaggtacacggtcctcttctcgcacggcaatgccgtggacctgggccagatgagcagcttctacattggcctgggctcccgcctccactgcaacatcttctcctacgactactccggctacggtgccagctcgggcaggccttccgagaggaacctctatgccgacatcgacgccgcctggcaggccctgcgcaccaggtgagggcgaccctgggggcagctcagcctgggcacacccaagaggggaccaggcggggggccggggggcgggcttccctgggaggaaggtgggcggccctgcaggaggggagccacagtggatgcacagggccagagagccggacaggcgagcttgggtgtgcaggtgccgcctccacatggctgaggtgtggccaggcggtcctcccacaccctggcctgtggagccaggctccctgggaacccctggcctgaggatgggaaggggctgagcttgtcacaggggtgtggatgccacccggcgggagggagtgggtggtggtctgggggtctgtgcacgtgtggctgggagcccatcggccgaggcagcacttggggccaagtgaggcgaggctgctgcatccaggtccggaggactggcccatgaggccctgtggctgcggagcttggccatcctggggcagggcctacagggtaaggtgcagacccgcagcacacatccgaggtctgggccagcctcgattccagatccagccctcctagtcatccacgtccccagccctgcgcttgcctgggcccttcaccggtgtttgagcaccgcccgggccagtgctgctttggacgaggagacccgggtgggcctctggtggcttttcctgctcaccatccactgggcctgtctcgtcctggccctgcccagcccactggtctgacctgctcccgcagggaccaggcacagctctgagaagtcagaggccctagggaggtggggtcgtcgttgccttggtgatatgcaggcagtccctgcagtgggcctgggagctggtcccctggcaccaccctggctctgggggcctcccagcagtgtgggacgctgacaccaatcaccacttcatgcgacttcctcggcccctcctgtctctactgcctgggccactggcagagtcacacctgccatggccagctctgagctctgtctgctcggccatctgtcctgctgccactttgtcctgcaggaacctaggcccagagctgtgagggggaggccagagcgtgcccagggcctccaccggggatgtgtcctgttcgtttgagtggtgacatccaggtggcagctcggggctcctgcctgtagcaggtggcagggctgggctggctcagcacactactgaccatggctgccagggagcaggccagggaggccgaggcagagctggagccacaggcaccagccaggcagcatcctttggggcatgggtacggcatcagcccggacagcatcatcctgtacgggcagagcatcggcacggtgcccaccgtggacctggcctcgcgctacgagtgtgccgcggtggtgctgcactcgccgctcacctcgggcatgcgcgtcgccttccccgacaccaagaagacctactgcttcgacgccttccctaacatcgagaaggtgtccaagatcacgtctcccgtgctcatcatccacggcacggaggacgaggtgatcgacttctcgcacgggctggcgctctacgagcgctgccccaaggcggtggagccgctgtgggtggagggcgccgggcacaacgacatcgagctctacagccagtacctggagcgcctgcgtcgcttcatctcccaggagctgcccagccagcgcgcctagcggcggccccaaccggccggacctcagcaataaggcggcccccggacctcaccccgcgccggcccccacccaggggctgcatgtggaccccccgggcggcccaggggaccccgccccgacccaggggctgtggacgatgtacaggcaacagagctacgcactcctttccttttggaagcaagaagaaaatacgtgaaaacggaaattaaagatttaaaatttt

SEQ ID NO: 24072 - DNA, 5178 bp, Homo Sapiens
gacacgagcggggggagggaggcggtggcgcgcccggccccgcccgcccgaccaagcgtcggacgcggcccggcgccgagccatggagcctgagccagtggaggactgtgtgcagagcactctcgccgccctgtatccaccctttgaggcaacagcccccaccctgttgggccaggtgttccaggtggtggagaggacttatcgggaggacgcactgaggtacacgctggacttcctggtaccagccaagcacctgcttgccaaggtccagcaggaagcctgtgcccaatacagtggattcctcttcttccatgaggggtggccgctctgcctgcatgaacaggtggtggtgcagctagcagccctaccctggcaactgctgcgcccaggagacttctatctgcaggtggtgccctcagctgcccaagcaccccgactagcactcaagtgtctggcccctgggggtgggcgggtgcaggaggttcctgtgcccaatgaggcttgtgcctacctattcacacctgagtggctacaaggcatcaacaaggaccggccaacaggtcgcctcagtacctgcctactgtctgcgccctctgggattcagcggctgccctgggctgagctcatctgtccacgatttgtgcacaaagagggcctcatggttggacatcagccaagtacactgcccccagaactgccctctggacctccagggcttcccagccctccacttcctgaggaggcgctgggtacccggagtcctggggatgggcacaatgcccctgtggaaggacctgagggcgagtatgtggagctgttagaggtgacgctgcccgtgagggggagcccaacagatgctgaaggctccccaggcctctccagagtccggacggtacccacccgcaagggcgctggagggaagggccgccaccggagacaccgggcgtggatgcaccagaagggcctggggcctcggggccaggatggagcacgcccacccggcgaggggagcagcaccggagcctcccctgagtctcccccaggagctgaggctgtcccagaggcagcagtcttggaggtgtctgagcccccagcagaggctgtgggagaagcctccggatcttgccccctgaggccaggggagcttagaggaggaggaggaggaggccagggggctgaaggaccacctggtacccctcggagaacaggcaaaggaaacagaagaaagaagcgagctgcaggtcgaggggctcttagccgaggaggggacagtgccccactgagccctggggacaaggaagatgccagccaccaagaagcccttggcaatctgccctcaccaagtgagcacaagcttccagaatgccacctggttaaggaggaatatgaaggctcagggaagccagaatctgagccaaaagagctcaaaacagcaggcgagaaagagcctcagctctctgaagcctgtgggcctacagaagagggggccggagagagagagctggaggggccaggcctgctgtgtatggcaggacacacaggcccagaaggccccctgtctgacactccaacacctccgctggagactgtgcaggaaggaaaaggggacaacattccagaagaggcccttgcagtctccgtctctgatcaccctgatgtagcttgggacttgatggcatctggattcctcatcctgacgggaggggtggaccagagtgggcgagctctgctgaccattaccccaccgtgccctcctgaggagcccccaccctcccgagacacgctgaacacaactcttcattacctccactcactgctcaggcctgatctacagacactggggctgtccgtcctgctggaccttcgtcaggcacctccactgcctccagcactcattcctgccttgagccaacttcaggactcaggagatcctccccttgttcagcggctgctgattctcattcatgatgaccttccaactgaactctgtggatttcagggtgctgaggtgctgtcagagaatgatctgaaaagagtggccaagccagaggagctgcagtgggagttaggaggtcacagggacccctctcccagtcactgggtagagatacaccaggaagtggtaaggctatgtcgcctgtgccaaggtgtgctgggctcggtacggcaggccattgaggagctggagggagcagcagagccagaggaagaggaggcagtgggaatgcccaagccactgcagaaggtgctggcagatccccggctgacggcactgcagagggatgggggggccatcctgatgaggctgcgctccactcccagcagcaagctggagggccaaggcccagctacactgtatcaggaagtggacgaggccattcaccagcttgtgcgcctctccaacctgcacgtgcagcagcaagagcagcggcagtgcctgcggcgactccagcaggtgttgcagtggctctcgggcccaggggaggagcagctggcaagctttgctatgcctggggacaccttgtctgccctgcaggagacagagctgcgattccgtgctttcagcgctgaggtccaggagcgcctggcccaggcacgggaggccctggctctggaggagaatgccacctcccagaaggtgctggatatctttgaacagcggctggagcaggttgagagtggcctccatcgggccctgcggctacagcgcttcttccagcaggcacatgaatgggtggatgagggctttgctcggctggcaggagctgggccgggtcgggaggctgtgctggctgcactggccctgcggcgggccccagagcccagtgccggcaccttccaggagatgcgggccctggccctggacctgggcagcccagcagccctgcgagaatggggccgctgccaggcccgctgccaagagctagagaggaggatccagcaacacctgggagaggaggcgagcccacggggctaccgacgacggcgggcagacggtgccagcagtggaggggcccagtgggggccccgcagcccctcgcccagcctcagctccttgctgctccccagcagccctgggccacggccagccccatcccattgctccctggccccatgtggagaggactatgaggaagagggccctgagctggctccagaagcagagggcaggcccccaagagctgtgctgatccgaggcctggaggtcaccagcactgaggtggtagacaggacgtgctcaccacgggaacacgtgctgctgggccgggctagggggccagacggaccctggggagtaggcaccccccggatggagcgcaagcgaagcatcagtgcccagcagcggctggtgtctgagctgattgcctgtgaacaagattacgtggccaccttgagtgagccagtgccaccccctgggcctgagctgacgcctgaacttcggggcacctgggctgctgccctgagtgcccgggaaaggcttcgcagcttccaccggacacactttctgcgggagcttcagggctgcgccacccaccccctacgcattggggcctgcttccttcgccacggggaccagttcagcctttatgcacagtacgtgaagcaccgacacaaactggagaatggtctggctgcactcagtccctcaagcaagggctccatggaggctggcccttacctgccccgagccctgcagcagcctctggaacagctgactcggtatgggcggctcctggaggagctcctgagggaagctgggcctgagctcagttctgagtgccgggcccttggggctgctgtacagctgctccgggaacaagaggcccgtggcagagacctgctggccgtggaggcggtgcgtggctgtgagatagatctgaaggagcagggacagctcttgcatcgagaccccttcactgtcatctgtggccgaaagaagtgccttcgccatgtctttctcttcgagcatctcctcctgttcagcaagctcaagggccctgaaggggggtcagagatgtttgtttacaagcaggcctttaagactgctgatatggggctgacagaaaacatcggggacagcggactctgctttgagttgtggtttcggcggcggcgtgcacgagaggcatacactctgcaggcaacctcaccagagatcaaactcaagtggacaagttctattgcccagctgctgtggagacaggcagcccacaacaaggagctccgagtgcagcagatggtgtccatgggcattgggaataaacccttcctggacatcaaagcccttggggagcggacgctgagtgccctgctcactggaagagccgcccgcacccgggcctccgtggccgtgtcatcctttgagcatgccggcccctcccttcccggcctttcgccgggagcctgctccctgcctgcccgcgtcgaggaggaggcctgggatctggacgtcaagcaaatttccctggccccagaaacacttgactcttctggagatgtgtccccaggaccaagaaacagccccagcctgcaacccccccaccctgggagcagcactcccaccctggccagtcgagggatcttagggctatcccgacagagtcatgctcgagccctgagtgaccccaccacgcctctgtgacctggagaagatccagaacttgcgtgcagcttctcctctcagcacactttgggctgggatggcagtggggcataatggagccctgggcgatcgctgaatttcttccctctgcttcctggacacagaggaggtctaacgaccagagtattgccctgccaccactatctctagtctccctagcttggtgccttctcctgcaggagtcagagcagccacattgcttgccttcataccctggaggtggggaagttatccctcttccggtgctttcccatcctgggccactgtatccaggacatcactcccatgccagccctccctggcagcccatgttctcctcttttctcaccccctgactttccctgagaagaatcatctctgccaggtcaactggagtccctggtgactccattctgaggtgtcacaagcaatgaagctatgcaaacaataggagggtgtgacaggggaaccgtagactttatatatgtaattactgttattataatactattgttatattaaatgtatttactcac

SEQ ID NO: 24073 - DNA, 5209 bp, Homo Sapiens
ggtccagggataaagctgcttcccagagcaccagaggccgttgacttcgtgaagatgcatcaactgtaaaatctgcctgggatgctcaaattgctcaactatctaaggagatggtctccagagaccttcagattcagacgctgcaggaagaagaggtgaagctcaaggcacaggtggcccgatcccagcaggacattgaaaggttgctgccaagctgcaggagacagagcaggcgctacaggagcaggaggtggtgctgaaggccgtgaccctggaacgagaccaggccgtgcaggccctgaggatgcatgggctccccagaccaggggcacagatgcttctcaggcagcatgaagaagaaataagtaaagactttccatccagtgagatccagcggctccgagagcagaacacgagcttgcgaaacgcgattgcccagatgaggaaagaaatggaggctctaagccatcagattcctcctcccatccagacagcggcagagagcacagatgcaaaccagcctgacccagaggctgggggagatgccgccactcctgattatgttctggcccttgaagcagaaatacgaactctaaagcataagtttaaaactctggaaaagcatctagaagatgtgttggatcctttaaagatgtcctcacctcatgctgagtctcagcccagcgtccgcacctcgacagagacgactggagggtctgcccaagctggtcaagccggagggtctgtccaagctggtcaagcaggaggatctgtccaagctggcccagtatcctctggactggcactcaggaagctcggggacagagtgcagctcctaaacctgctggtgacacgactcagacagaaggtgctgcgggaacccctggagccggccgctctccagcgtgagcttccccgtgaggtggaccaggtacacctggaggttttggagctgcggaagcaggtggctgagctggggaagcatctcaggatagcccagcacgggggagcggagccttcaggcaggaagcagcccccagcctcggacgccgtggcccttgggagagaggtgggtgcccgctagctcctcctgccacccgccgaggttcctgccacagaaaccgtccttgcctgtgctctgccagcgttgctgtctgtatgccctgggagctcaggtgggacgagggctgcagtgaaggccgtgcctggaagtgggccctgctccaccccctctccccattcctccgccttcttcctccacacgcctcctcttctcctggtccttcaccttgatgccccgttggtggggggcgggacgggcccatcccagtcctcccttcagctaacagcatcttgtgttggaaacgcacacactgaaggtggctcatgtttgctttaatgcagggccttgacggcctgctgagggggcgtctgcgtgcacagccatgcctgccccatgcctagcgttgggccctccctgcgtggggaggggcccacatggccctcactgctgcgttcagagccacacagctgctccaggccatggcactcctatcctggttttggtcaggcccttggccccgagggagtgacccccaactccatggctgggtttgagccacagctctgagctgtggagacgaccccaggtcctgattctgcagcttggcagagccgaccagcagggcccccttcttcctacctaaggccagagggaaaggctgtgaaggacaggctgcccggcctccctgacttcgtaccctagactgttggtaactgggataactgtagtgacctatgacctgtggtaacctatagttaccaatagtgacctatgaatccacagaaggttttggggacagtagatgatgtctggaaagcacaaagtggaagacagcgtggatccccagggcaccgtgcttggggagcagatccccagggactcaggctggaatagagtggactgaggaagatgcggccgtggctgtctcaggctccaggacagtgaggagcaggccagagctgccttggcatgggatgggcaagaccataaggatgcctcaggggtacaacagggcaggtatgggaaggccgagggagcctgaggccctagcaggtgctcagccagtgcgcacaggaagggctgagctggtcggtaagatattgagctgcacctgcccctgtacctgttggtaaggaggtcttgtcctcaggggtctccagcaccctagccctcctgggctcccagtccagccactccagggtggctcctgcccggtgggggctgtggcccttgggccagctggcagcacagccaggggtaagcatgtctgtacccccacacatctcccacccacctgagcgccatgtgttcccggacacgggcgggcgcctccttgggcagcaaggggccccaggagctctcactgttggcccttgcgtagttcactgtcttcccacttgtttagaatgaaggggcaagaatttatacaaataagcagaattttttctttcttttttttttttttgagacagagtctcacactgtcgcccaatctggagtgcactggcgctatcttggctcactgcaacctcctcctcccgggttcaagcaattctcccgcctcagccccctgagtagctgggattacaggtgcaccacgcccggccaatttttgtgttttcagtagagacagggtttcaccatgttggccaggctggtctcaaactcctggtttcaagtgatctgcctgcctcagtcccccaaagtggtgggattacaggtgggattataggcacagtggcccactgtgcctggcccaaataagcagaattttaaattgagagatgaagccacctgcagcccaatcccagttattggagctaaggcacaggcggggcatacactccaggctctgtgtctacatgcatggaggcgacagtcgggctccaggctcctcctgggtctgagcatcctgtggccgggctctccacccaggcgaggcccacctgggctctgtcctctgccaagcagcatggctgagctcctggagacgagggcgggcccaggtccttgctgcttgctgctgggaaaggagcccagacggagaaggggccatgttggggctggaccctcaggtagaggatcaatgtgtccgttatgttgggtatagagagaagtgggtagagctgcatgtgcatctgatcccagctctgtcctgagagggcccacagcccggactcagccacagcagatgccagttccacagttccaggcgctagttccatggttcctgccctgctcacaggagcccgggctctagcatggaggcaggttcggaaggcacaggaagcagctgaaaggggtccccaaggaccagaactaggccaataggcagtgacgttgaagaccacaatccactgactcaaccaggaaatcatgggtccaggctgatagcaatggacagatcggtcaggggaacggggcactcttccacgcgagagtgccagccaaggaacgcgacaggaacggcgcgccgggcgaccacggatgggtgctgaaccagagggattcccatcagacggatgcgaagcagcatctccccacacgtgacttcttatttccaagggaaatgctggctttccagtggagcagcctgtttgaccccagctgacccgagtgatcagagctcccatcgccagtgctgggatgcgcccgtgtcacgcgcctctgggcgggtcgcactgagacggcacagactcgcgctcggggtccctgccaaaaatgcagaacctgagcttatgcatgaggagacctcaggcaagcccaaacagagggacatctgcagatgagcgggtctagatgcttggcgagtgcccaaacatggaagctggggagccactccagttaggagacctgggagaccccatgtagaaatgccaggtgggaccctggaccctgcacaggagagacagcgtcagggcatcatctgtagaaacgccacgtgggaccctgggctctgtacaggagagacgggcatcaagtcatcatccgtagaaacgccacgtgggaccctggaccctgcacaggagagacggcgtcagggcatcatccgtagaaacaccacgtgggaccctggaccctgcacaggagagacggtgtcagggcatcatctgtagaaacaccatgtgggaccatggaccctgcacaggagagacagtgtagaaatgccacgtgggaccctggaccctgcacaggagagatggcgtcagggcgttatctggacggttggtgacatttgcacacgggccacggaccaggtcacgtattgtgtacacccacccaagtactgaggtgtgacgcggcactgcgtctccagcctacctcctgtagtgcaggaagccagtgcagggtgggtgaggaagtgcacaggggtccagggactgtcccacagcactcctgacgaaagctggtccccttccacggccctagccaaggagccaggtctgcaaagctgggaccaggtgtgtgcggaggcacgtgttcccacttctcccatggcagagggagagcctgtggacaacagtggggcactctgctcccaggcaggtcccactgggctgagccgcacagcctggctttgggcttccctgactgcaccacccacatcagctgcctctagcccttaaaatacaaaacttcccccagtcactggccgccagggctgagttgggggatgtgttacatccctgggtccactggggggcagtgttggccatggtgttggtgctggctctgcagagaggcgttggagtggctgtgtggggcggtgagcgccggcccagcctgatggaacccactgtaccaggcccaggcctcagcctctgagaaggacttccctgtgtcactcactcatacatgtcctcaggacgtgaagacatttcagcagaccaaagtttccttcgaattttcttcgaatcgtccagatacttggagacatctcctcctcacctgtggggtgctggggcagtcctaggcgtgggggcagatgggtggacagctgctgctgccctgctgggggtgggcagcccttggagcacacagtggtgaagacattcctgaatatttctcaggctgtagaaatcttattttgtggaaagattttagagaatcatcaaaataaacttttaccaaataacattttaccag

SEQ ID NO: 24074 - DNA, 5282 bp, Homo Sapiens
ggaggacgtcaggcactacttccccgagctcctggacttcaatgccacctgggtttttgttgccacctggtaccgagtgaccttctttggaggcagttcctcatcccctgtcaacacattccagactgtgctcatcacagacggcaagctctccttcaccatcttcaactatgagtccatcgtgtggaccacaggcacacacgccagcagcgggggcaacgccactggcctcgggggcatcgcagcccaggctggcttcaacgcaggcgatgggcagcgttacttcagtatccccggctcgcgcacagcagacatggccgaggtggagaccaccaccaacgtgggtgtgcccgggcgctgggcgttcagaatcgatgatgcccaggtgcgcgtggggggctgcggccatacaacgtccgtgtgcctggccctgcgcccctgcctcaacggcggcaagtgcatcgacgactgcgtcacgggcaacccctcctacacctgctcctgcctctcgggcttcacggggcggaggtgccacctggacgtgaacgaatgtgcctcccagccctgtcagaatggtgggacctgtactcacggcatcaacagtttccgctgccagtgcccggctggctttgggggacccacctgtgagacagcccaatccccctgtgacaccaaagagtgtcaacatggtggccagtgccaggtggagaatggctctgcggtgtgtgtgtgccaggccggatacaccggagcagcctgcgagatggatgtggacgactgcagccctgacccctgcctgaatggaggctcttgtgttgacctagtggggaattacacctgcttgtgtgccgagcccttcaagggacttcgctgtgagacaggagaccatccagtgccagacgcctgcctctcggccccttgccacaatgggggcacctgtgtggatgcggaccagggctacgtgtgcgagtgccccgaaggcttcatgggcctggactgcagggagagagtccccgatgactgtgagtgccgcaacggaggcagatgcctgggcgccaacaccaccctctgccagtgccccctgggattctttgggcttctctgtgaatttgaaatcacagccatgccctgcaacatgaacacacagtgcccagatgggggctactgcatggagcacggcgggagctacctctgcgtctgccacaccgaccacaatgccagccactccctgccatcaccctgcgactcggacccctgcttcaacggaggctcctgcgatgcccatgacgactcctacacctgcgagtgcccgcgcgggttccacggcaagcactgcgagaaagcccggccacacctgtgcagctcagggccctgccggaacgggggcacgtgcaaggaggcgggcggcgagtaccactgcagctgcccctaccgcttcactgggaggcactgtgagatcgggaagccagactcgtgtgcctctggcccctgtcacaacggcggcacctgcttccactacattggcaaatacaagtgtgactgtcccccaggcttctccgggcggcactgcgagatagccccctccccctgcttccggagcccgtgtgtgaatgggggcacctgcgaggaccgggacacggatttcttctgccactgccaagcagggtacatgggacgccggtgccaggcagaggtggactgcggccccccggaggaggtgaagcacgccacactgcgcttcaacggcacgcggctgggcgcggtggccctgtatgcatgtgaccgtggctacagcctgagcgcccccagccgcatccgggtctgccagccacacggtgtctggagtgagcctccccagtgccttgaaatcgatgagtgccggtctcagccgtgcctgcatgggggctcttgtcaggaccgcgttgctgggtacctgtgcctctgcagcacaggctatgagggcgcccactgtgagctggagagggatgagtgccgagctcacccgtgcagaaatggagggtcctgcaggaacctcccaggggcctatgtctgccggtgccctgcaggcttcgttggagtccactgtgagacagaggtggacgcctgcgactccagcccctgccagcatggaggccggtgtgagagcggcggcggggcctacctgtgcgtctgcccagagagcttcttcggctaccactgcgagacagtgagtgacccctgcttctccagcccctgtgggggccgtggctattgcctggccagcaacggctcccacagctgcacctgcaaagtgggctacacgggcgaggactgcgccaaagagctcttcccaccgacggccctcaagatggagagagtggaggagagtggggtctctatctcctggaacccgcccaatggtccagccgccaggcagatgcttgatggctacgcggtcacctacgtctcctccgacggctcctaccgccgcacagactttgtggacaggacccgctcctcgcaccagctccaggccctggcggccggcagggcctacaacatctccgtcttctcagtgaagcgaaacagtaacaacaagaatgacatcagcaggcctgccgtgctgctggcccgcacgcgaccccgccctgtggaaggcttcgaggtcaccaatgtgacggctagcaccatctcagtgcagtgggccctgcacaggatccgccatgccaccgtcagtggggtccgtgtgtccatccgccaccctgaggccctcagggaccaggccaccgatgtggacaggagtgtggacaggttcacctttagggccctgctgcctgggaagaggtacaccatccagctgaccaccctcagtgggctcaggggagaggagcaccccacagagagcctggccaccgcgccgacgcacgtgtggacccggcccctgcctccagcaaacctgaccgccgcccgagtcactgccacctctgcccacgtggtctgggatgccccgactccaggcagcttgctggaggcttatgtcatcaatgtgaccaccagccagagcaccaagagccgctatgtccccaacgggaagctggcgtcctacacggtgcgcgacctgctgccgggacggcggtaccagctctctgtgatagcagtgcagagcacggagctcgggccgcagcacagcgagcccgcccacctctacatcatcacctcccccagggatggcgctgacagacgctggcaccagggaggacaccaccctcgggtgctcaagaacagaccgcccccggcgcgcctgccggagctgcgcctgctcaatgaccacagcgcccccgagacccccacccagccccccaggttctcggagcttgtggacggcagaggaagagtgagcgccaggttcggtggctcacccagcaaagcagccaccgtgagatcacaacccacagcctcggcgcagctcgagaacatggaggaagcccccaagcgggtcagcctggccctccagctccctgaacacggcagcaaggacatcggaaacgtccctggcaactgttcagaaaacccctgtcagaacggaggcacttgtgtgccgggcgcagacgcccacagctgtgactgcgggccagggttcaaaggcagacgctgcgagctcgcctgtataaaggtgtcccgcccctgcacaaggctgttctccgagacaaaggcctttccagtctgggagggaggcgtctgtcaccacgtgtataaaagagtctaccgagttcaccaagacatctgcttcaaagagagctgtgaaagcacaagcctcaagaagaccccaaacaggaaacaaagtaagagtcagacactggagaaatcttaaggatttaagacgttcttgttacactccaccaacctcacgagtttctaacacccaggaagatgaggtctaaaaactggatgaaaaaggacaccctgagaaaaggtcctagctggagtcagtcccctctgtgacctctctcctcaggcctctagaggacagatggccaggcctgtgcacacaccagcccaccctgagagacccctctgggaccaaccacctgtgagtcctgcgatgcgtttaagcagcctgtgccctcacccaagctgcagttcctgaaggtgtagtctgtgtctctgcggatgagatgacagctcgccattccccggaatcagtgaggctgtcagtcagccacgcttctgcagtatgcagaaacctgttcttagactccaaagccagagaaagaattctcccttcgaggcccaacaaattgagaaggaactgtgatggaccacttccaaaacagagacgggggcaggggctgaagggcagagaccaggtgatgtcagaaggaaagccgggttgcagacacagccgcccctgctctggtcctccagcgtgtttatgacgctcgtgcaggtcgacgagccatcctatggactagttaacactaaggtggagttcagacttttttagacaacggcgcgactggcagcctttctctatcaagggtcagacggtaaacgttttcagctttgcagaccagaggtccctgtggctacagtagcgcagacacagccacaggcatgtcattgaatggctgcggctatgttccaataaaaacttatttacaataacaggtggtggccaaattggcccatgggccttatttggtgaaccctgttctatgagatcacctaggcttcagccttaaacagtggaagccatcccctgaatgacaagtcacaagggtatcaaagaaagacccctgaattttcatggaaaaagctattcagacccctgcttggaaagctaaggcacactgccacgaagcagcaaggacgccttacaagtctcagtgcaacagagatggacacctgggctgggctggacaatgtttaaggttccttttagtccatgactcaagtgatactgttttaggctatcaggtagtaaacacgatcttagacatccccatctttgtaagcagaacagtacggcacttcaccacatctgcttcccaccatgcttctaagcagctgtcttccccctgctaatgttacaaccaaagcagccaccccacctcctctcgtgttgagcctcacgaccgctgacccagctggaaagccagcgccctgccgcgtcaccctgactctgctcagagccagcattccagccacaaagagggcctccttcctttcctctttcataaaaatgttttttgaagagttagagtatattttaggctttttatctttattaaaatttcatgtgc

SEQ ID NO: 24075 - DNA, 5250 bp, Homo Sapiens
cggagggcggttccgccgcgcggcgggcgcgccgcccacatggcggccatcagggcgctgcaacagtggtgccggcagcagtgcgagggctaccgcgacgtgaatatctgcaacatgaccacgtcgttccgcgacggcctggctttctgcgccatcctgcaccgccaccggcccgacctcataaacttcagtgctctcaagaaggaaaatatttatgaaaacaataaactggccttccgcgtggccgaggagcacttgggcatcccagccttgctggatgccgaggacatggtggccttgaaggtgcctgaccggctgagcatcttgacctacgtgtcccagtattacaactacttccacggccgctcccccattgggggcatggcaggcgtgaagagggcctcggaggactctgaggaggagccgtcagggaagaaggctccagtccaggcggccaagctgccctcgcccgccccagcccggaagcctccactatctccagcccagacaaaccctgtggtccagaggaggaatgagggtgcagggggcccgccccccaagactgaccaggcattggcgggcagcttggtcagcagcacctgcggggtctgcggcaagcacgtgcacctggtacagcggcacctggccgacgggaggctttaccaccggagctgcttcaggtgtaagcagtgctcctgcacgctgcactcgggggcctacaaggccacaggagagccgggcaccttcgtctgcaccagccacctccccgcagccgcctctgcaagccccaagttgacgggtctggtcccccgacagccaggggccatgggtgtggattccaggacctcctgttccccacagaaggcccaggaggcaaacaaggccagaccgtcggcctgggagcctgctgcgggcaactcgcctgccagggcttccgttccagctgcacccaaccctgcagccaccagcgccacgtccgtccacgtgaggagcccagccaggccctctgagagccgcctggcccccactcccacggaggggaaagtccgccctcgtgtgaccaatagctccccgatgggctggtcgtcagctgccccgtgcacagcagcggctgcctcccatcccgccgtgcccccgagtgccccagaccctcgcccggccacaccccagggtgggggagccccccgagtggcagctcctcaaaccacactcagttcaagctccacatctgcagccacggtggaccccccagcctggaccccgtccgcctccaggacccagcaggcccggaataagtttttccaaacatcagcagtgccccccggcaccagcctttctggcagaggtcccaccccgtcacttgttctatccaaggacagcagcaaggagcaggcgcggaacttcctcaagcaggccctctcagcgctggaagaggctggcgctccggcgcctggcaggccctccccagccactgccgctgttcccagttctcagcccaaaactgaagcaccacaagcaagtcccttagccaagccgttacagtcctcgtctccccgggtgcttggcctcccttcgaggatggaaccgccagccccgctgagcacgagcagtacctctcaggcatccgcgttgcccccggcaggcaggaggaacttggctgaatcctcaggggtcggcagggtgggtgctggctccaggccgaagccagaggccccgatggcaaagggtaaaagcaccaccttaacgcagggtgagtaaggggctgggaggcaggaggccccgggggcccgcagctctgggactctcccctggccgcactctgcagtgtgtgcggtttcatcatcagccccgcccgccttcctctccgtctcatctctgtcctccgtgacacctgctcgcagcctcctggggtcctggtgcgctctctgtgtggtggctgcaaatgtcctcagggctatgctgtttgccggcacccagcccaccccatccgcacgtcctgcaggtgcctgcagcccagccctgcagcgtcccgctcagctcggtctggcagttacatcctgtggctagcagtggcctggcttggccgtggtctgtggggcctcctgttctcccgtggtgttttgcgcttcctgcctgtcgctttgacaacgtcgcgctgttgctgtggcaccctgtgtcaccacataccggagatggtgccctatgccccgtcccccctgtggtgtcccggtgacggtgccctatgccccgtcccctccgctggtgtcccagtatgccctgtccccctggtggtgtccaggtgagagcgccctgtgctccgtcccccccggtggtggtctggtgacgatgccctatgacctgagggctctggtgcctcctaggctgggagctcttcctgggggctccctggaccacacagtcctgttttatggcctcacgtgttttcgggaacagggagcgagctttcttctaggcaactggctgtcacccaccaggggttagccccctgggtgatcatggccaggctgggcaggacgtgggcttagggcttgtgaggccaaccctgtgccagctgggaggcccagggcactgggatggccaggctacgcagtgagctgtcagctgtgccaggacagaccccaggctcctggcggccctgctttgatgcacggctctgtctcccaacctgggggcagccgagtccccccgcctcgccccactgcaggaaactggctgtccctgccacctgggtgtgtgtagaaaaaagctagaggttcccatggctttatcgagctgggctcagggaacaagctgggctgcaaagggtttttccagatccttctctttggctgagttctcattgttaaagccacgcgctggatcctgcaggacccaggagccaagaaagcctgcagacgggcagccgtggctcaggtgttccccttgcacaggtggacagaggatcagggtccacggggctcaccctgccacgtccccacccattcggcagaaggggaagttgaggcccagaggcagggagagcttcccccagggacacacagcacaggagagccagctgggagcccctcccctgactccctgcccggtgctcctgatgccccccggccggctggctgtgggggtgtctgagggtggagtggctatgggaagatgggagggggaggcacagccacccttgcagacaccccattcccagcactccttcctcacacccagaccccttgcctcccacccagacatgagcaccagcctccaggaaggccaggaggacgggccggcaggatggagagcgaatctgaagcccgtggacaggagaagcccagctgagaggactctgaagcccaaggaaccacgggccctggcagagccgagggcgggggaggcccccaggaaggtctcaggcagctttgctgggagtgtccacatcacaccctgacccccgtgaggcctgacaggaccccacgcccagccagcccaggacccagcctcccagccaggtccccctccccaccccgccgcaggagactggccgtccctgccagcctcgacgtttgtgacaactggcttcggccggagccccctggccaggaagcccgagtgcagagctggaaggaggaggagaagaaacctcaccttcagggcaaaccagggagacccttgtccccggccaatgtccctgctctgcctggcgagacggtgacctccccagtcaggctgcaccccgactacctctccccggaggagatacagaggcagctgcaggacatcgagaggcggctggacgccctggagctccgcggcgtggagctggagaagcgactgcgggcggccgagggagatgacgctgaggatagcctcatggtggactggttctggctcattcacgagaagcagcttctgctgagacaggagtcagagctgatgtacaagtccaaggcccagcgtctggaggagcagcagctggacatcgagggcgagctgcgccggctcatggccaagcccgaggctctgaagtcactgcaggagcggcggcgggagcaggagctgctggagcagtacgtgagcaccgtgaacgaccgcagtgacatcgtggactcgctggacgaggaccggctccgggaacaagaggaggatcagatgctgcgggacatgattgagaagctgggtgactgggccggggatgctgagggctgggctggctggctgggtgggccggggatgctgagtgctgggctggctggctgggtggaccgggcctccagctgggggtggggggggggcgggtatcgggtccccccctcagccttggtgacaggacaggcaggttcaccctgagggtgagagctccctcccgcccctaagagagccaggggcagctggtgaccgtgtggtcatggtggggaccagccctccggggcacccagtcggggcaggttctcacgtgggagggcacagggcttcctgcaggctcggaggcccagggcggattgtggccagtggaagggaaggatgtttctggcagggggacttgtgtgggccacggctgtgcggctgcggcgttgagcacggcctcactgtccacctgtcccctaggcctccagaggaagaagtccaagttccgcttgtccaagatctggtcaccaaaaagcaaaagcagcccctcccagtagtagccagtagggccgtgggctcggcccggacctggcatccggacttggactcggggccatgggcttggcccggacccggaacccggacttgtactcggggccgtgggctcggcccggacccggcattcggacttggactcgggaagggcctcctgtccctacaaggggcatgtggacagcagggacctgcgctaccgtctgtggtctcaataaagaaaccgaccacatggccccggactcctacgtgcctccgtgtttgcctcggtgcccctgggcggccccgcacctgcctggggtctcgcctgcctcccagctcttgcctgcaggacggacgtgctctgtggcctcgggcaggagccgaccctctcagggcctggccctcgaaggtgtttccccccgggccggcctgccgtgacgatcacagccctgccgtctcaggtcacggttttggattctgcgctaacgaggtctcccaggtgggctggaaacactgatgaagacggatagaaaaaacaccagcccaccggattattaataaagataatcacacacacccctt

SEQ ID NO: 24076 - DNA, 5496 bp, Homo Sapiens
gtggaagccagctctccaggccacggaagtcctctgagcagcctgttaccttctgcctcagtgccagagtccatgacaattagtgaactgcgccaggccactgtggccatgatgaacaggaaggatgagctggaggaggagaacagatcactgcgaaacctgctcgacggtgagatggagcactcagccgcgctccggcaagaggtggacaccttgaaaaggaaggtggctgaacaggaggagcggcagggcatgaaggtccaggcgctggccagagagaacgaggtgctcaaagtccaactgaagaaatatgtaggagctgtccagatgctgaaaagagaaggtcaaacagctgaagtgccaaatctttggagtgttgatggagaagttacagtagctgaacagaagccgggagaaattgctgaagaactcgcaagctcctacgaaagaaagctcatcgaggtggcagagatgcatggcgagctgattgagttcaacgagcgcctgcacagggccctggtagccaaggaagccctcgtgtcccagatgaggcaggagctcatcgatctccggggaccggtgcctggagatttgagtcaaacgtccgaagaccagagtttgtcggattttgaaatatcaaaccgggcgctgatcaacgtctggatcccctcagtgtttctccggggcaaagcagcaaatgcattccacgtgtatcaggtctacatccggataaaagacgatgaatggaatatttatcgccggtatacagagttcaggagtttgcaccacaagttacaaaacaagtaccctcaagtgagggcctacaacttcccacccaaaaaggccattggaaacaaggatgccaagtttgtggaggaacggagaaagcagctccagaattacctgcgcagcgtcatgaacaaagtcatccagatggtccccgagttcgctgccagccccaagaaggagaccctcatccagctgatgcccttcttcgtcgacatcaccccgcccggagagcctgtgaacagccggcccaaagcagcttcccgcttccccaaactgtcccggggtcagccccgggagacccgcaacgtggagccccagagcggtgacctctgacctcgacaaaaccgcagccacgggccctgtgcgtggcaccagctgcgtccaccccagccactgccgctggcccctcacctcagcgtgacaaccacgtccacctggtgatcctgagagcacacgattcccaacagttacacaacaccccgattaaactaatcagtcttcgagccgcatgataccgtgacccgagagaccaaggcagcacctcgctggagagactgggacacacagtccttctgcttctggggtctaccctgggctgcaagggctgttcctccacctttctgtagttcagggctggcaggagggtgggcaccaggtcaggctgggtgcgccatggttgagaggcaaaggtgatcccctatataggaaggttcatgcagagccagcctctccactctttcccacgtggggactaaaatgactattagcctctccttttgctttttaaggttattacctggcctaacctagggatggctggcttttggggggggggggtgggcatggttcctttcactgcattttccaccaacagtcattagacacctggcactgtcacagctcacttttccagagggatattcctgtggctttggcaaggagccattagtgatgtgcaacttgagttcagagaacttcccctacctcccccatggctggcttcaggaaggaccagtgccctccatagcctgaggccacctaggccctcgccaggcttggagtggggggactcagacatctggcccagccatcagcagcaacctagtaacccggcgtcatccagcgtgtccaaagtagcattggccctacagtcatgagagacttgggtcagggaaccactgcagaaggttccagggttttcaaaccaggctccatgactatgaagttggacccagtgtggacacttaacagatcatgtgtctctccactaaaaacattttccatcccgtctgcccccgacattgaccttgataacagaactctgcatcccctaagagtcctctgttcctcccatgtcaggtggctctcagagtacagggaccttggcaggtggagaggaggatggggaccagcagctgggcagcccccagggctcctcctccagtgagctcacatcagagcacctcacagagcaatagccgtcctcagatgctcagcaaagttgtggcagtttgcatttctagggtaaactaactaggaaggatgtcgtgaaatggactatgcaagagtaagtttgtgtgtttcgccttaatctgaggcagagacacagcagaacctgaggacaaaagcaggtggaaggtgacggttagatggtaagccatgggcttgtcctggaactgcttcaactcagtggcttaaaatgagaactgcccaggtgagcatggagcatctcctaggctcgaggacatctctggagaatcatctggaaggtttatactgtgccttcccctcgtagcaaaaaggaagattgttcatggcctttaaggaaggctgagatcactcacacacagcgcccccccaccccagagaaaccgagtcagcctacatgacttccaagggaacctggggccagataagccctgccccggtgagaccaaatgagctggagcatgtatggaggtgcggaccctgcaatcagtttgcgagtgtggaggacccgagacatcctgtaaaggcaacttggtctccctcccactcacctgccaacattgctgcaatacacatggtttatctgaaattccagggccagagtgcacatcagctcacatgactggcaactctaaatagagagccctaatggactgaggcaggaaacgtctaaaagctcaatctgctgtatgtcatgaccccttaggttgggtttatgccacatcggtcattttgaagtaggtgtttgatgccagctcagagactgtctcaggagtgcctccctggcctgggtagctacccctggaggtcatctccctgttctctgttggataaaggaacctcccccatctgtgacattcccttgggcccaggcttatgacctgcaccttttctgacacctgcccccaaagcacaggatgtgaattggtctctctccagataccccacgaggaagcaccttggacattctgcacatgataataatgcaacagagtcccccattgctgagagatactaacccgtgagaaacaagtatgctctcagctggtattgaactggtgggagaaactgcctcctacttttataatactgaattattcacaaaaaacctggtctgctctccaaaatgggagcatgttcctgggagccacatggggaccatccccagctgcctgctcctggtacctcccccatgatcatgcacagaccgtagagtcgagtcatctcgcagatccagaccatctcctctcattctcactctaaaaatgctggtggcccgcccatgacagcaactccccgaagccttccctttggaatcccatagaatgttctgcaatgattgggtccatcttgctgctcagaagaatcccgtcctgctctctagtgtggtgggatgaacttcaggcaacaaacaactggcagggttcccagttcctggagttatggagcagaaacacccaggcctagcagaattgtggctgaaacctggtgcccaaattccacacccctggaaatgtgtcaactgcccgtcagcctggattcaattctgagggctaagccacgaccttatccatgagtggcgaagacacccctgagtaaaggattgcttgcacctcacatctgtcttcttctaagattactcggagattttcaaacaacatctgagaacagaagccccctcccctactcagagaggaacgagggtggcccacctctcaagggccttggattcctgggaccaccctttgctgggaggaagaatccacaccgaatccttctgtcttcatggcctgctgtgctgaaacagaacagcaggttccatctttcacatctttttttctcccccagatgaaagacgactcaggaacggtagggctgggcagaggtgtctctccttgagagacaacaaaagcttctaagggagggagcttaaaggctgctagaaacctagcccaaccatccactcctgatctgagacagaaccttctccgccactcttcctgcaatcagtgtgaaattccagcttctttgattcccacttagcagtatgctccaatcacgttgctggcaaggcattttagagtttggagctgaggttcaaagccccctgcatttctctactggcaggccctggtgaaggaagacactttcagggaagaggctcttacagtctatggtggtagccatcttcacatccagtcaccagttgcatctagggagctgctggctataaaagggatcatccagtggagttgtaaacaagggaaccatcttgcaagatctaggaagaggaaggggagggatgtggactgggtcagatcacagcccttggccctgcttcatactttggagcttattaagatcaattttgataaccatgtaatttcttagaaccatggcaggtagtattgtgctttaaaaaccagaggctcctgaaagtcgtttacaccaggtggattgataccatggctgtagctgatgcaactaacaagtactggggccagtgatcacaatccagggttggaaacaggagtgaagcccaccagcctgcctggctgatggacagcaggctctgccttctggaggcggcttatatcccaacagcctgaggcagggctctgtggcccaggccagcagtggctgcctcttttggttctgcatggtacattttgccaaccctgaggaccagttcttggggttccaggcctcggccttcctgctccacgtgctcaagcccccacatggggctgcgacaccatctggctcctcacagggaggtccagccatgttctctgggctcccagtgagccccctgccctccagctacccccagaatccatccttcattcctccaccaagctcctgtgtgagctgcagcacccacacgggggaagccctgcactccagcagcatcttccagccttggcacagaactgatggcaaaggaagggctgggttttcagcttctgggacccgaggaagaccccacctcactcctccttccccagtacatcagactggttaggaggcatcccagaaggggcagcctcatgcccaggtttcagccctaaaggtaatgattgtcttgactctgccttggcatttcgctcggaatcacggcagacttggagtgtttcttcaaggcaggcatctgcttatgagcaaggtcaaagatttttcaaaatattgtgcattaattcattaaagctactgttaaat

SEQ ID NO: 24077 - DNA, 5761 bp, Homo Sapiens
gcgcacagcaggcaaagagctggccctggcaccgctgcaggactggggtgaagagaccgaggacggcgcggtgtacagtgtctccctgcggcggcagcgcagtcagcgcaggagcccggcggagggccccgggggcagccaggctcccagccccattgccaataccttcctccactatcgaaccagcaaggtgagggtgctgagggcagcgcgcctggagcggctggtgggagagttggtgtttggagaccgtgagcaggaccccagcttcatgcccgccttcctggccacctaccggacctttgtacccactgcctgcctgctgggctttctgctgccaccaatgccaccgcccccacctcccggggtagagatcaagaagacagcggtacaagatctgagcttcaacaagaacctgagggctgtggtgtcagtgctgggctcctggctgcaggaccaccctcaggatttccgagacccccctgcccattcggacctgggcagtgtccgaacctttctgggctgggcggccccagggagtgctgaggctcaaaaagcagagaagcttctggaagattttttggaggaggctgagcgagagcaggaagaggagccgcctcaggacctcccagagttgcccaaacttctgacccagactcttcagaggcctgcgcggaggaagaggaagggctcatgcctcaaggtccccagctcctggacttcagcgtggacgaggtggccgagcagctgaccctcatagacttggagctcttctccaaggtgaggctctacgagtgcttgggctccgtgtggtcgcagagggaccggccgggggctgcaggcgcctcccccactgtgcgcgccaccgtggcccagttcaacaccgtgaccggctgtgtgctgggttccgtgctcggagcaccgggcttggccgccccgcagagggcgcagcggctggagaagtggatccgcatcgcccagcgctgccgagaactgcggaacttctcctccttgcgcgccatcctgtccgccctgcaatctaaccccatctaccggctcaagcgcagctggggggcagtgagccgggaaccgctatctactttcaggaaactttcgcagattttctccgatgagaacaaccacctcagcagcagagagattcttttccaggaggaggccactgagggatcccaagaagaggacaacaccccaggcagcctgccctcaaaaccacccccaggccctgtcccctaccttggcaccttccttacggacctggttatgctggacacagccctgccggatatgttggagggggatctcattaactttgagaagaggaggaaggagtgggagatcctggcccgcatccagcagctgcagaggcgctgtcagagctacaccctgagcccccacccgcccatcctggctgccctgcatgcccagaaccagctcaccgaggagcagagctaccggctctcccgggtcattgagccaccagctgcctcctgccccagctccccacgcatccgacggcggatcagcctcaccaagcgtctcagtgcgaagcttgcccgagagaaaagctcatcacctagtgggagtcccggggacccctcatcccccacctccagtgtgtccccagggtcacccccctcaagtcctagaagcagagatgctcctgctggcagtcccccggcctctccagggccccagggccccagcaccaagctgcccctgagcctggacctgcccagcccccggcccttcgctttgcctctgggcagccctcgaatccccctcccggcgcagcagagctcggaggcctgtgtcatccgcgtcagcatcgacaatgaccacgggaacctgtatcgaagcatcttgctgaccagtcaggacaaagcccccagcgtggtccggcgagccttgcagaagcacaatgtgccccagccctgggcctgtgactatcagctctttcaagtccttcctggggaccggggctgggaagagatgctgatttctgcgataaaatcagtaggtacattttttggaatgttcgctatgtgccaggctagattttacagatgagaagtctgaagctcaggtaaggtaagtcacctgtccagggccacaaagaaaaaaaaaacgtgtgtctgaagccagaacgggagctgttgcggcccaactccctcccctgcccccaagcggcctctgggctcgggaagggcccctgcctcctcccgccaggcacttatctctacccaggctgagtgctggccccgccccctcggggatctgccacttagaggcgcctggtcgggaagggcctggtcagctgcgtccggcggaggcagctgctgacccagctgtggactgtgccgggggcgggggacggaggggcaggagccctgggctccccgtggcgggggctgtatcatggaccacctcggggcgtccctctggccccaggtcggctccctttgtctcctgctcgctggggccgcctgggcgcccccgcctaacctcccggaccccaagttcgagagcaaaggtaaggatgagctgcgtgtggacccctacgctggagcctgcaggaccatgctggggcctgaactcccagcctaggtcctgggggccatgcctgtttctggacttcctgaccgggtcctgggggccaagctggcatctgaacccttagactgggtcctggatgggtggggggcggggtggggtatgttaggatccaagactcctgatcgcgtcccgggcaagagctagagtgggcttaacattcccgttttaccttttcagggagtctgggacatgctaaatcctaagggggctgacttggtgctaaggtccctggggggtggggaccaagccgaccctccctaggggagggagggtaaagcccgggtccgagttagaggggccaagccacaggctactgtaaacacggtttgtgtgagggcgccagatcacttgcccggcccggtggagggagggaggcgggggggcacggttggcgctatcggttggcggggagcctgccggggccgatagggggcccgcctctccgcacacacccccagccgcgcgcgtgtcctaggctggggcggggctggcagtcccgagctcgaggtcttgaacgccgcgcccagctcagctggccgctgggtgggcaggtgtgcgccagtggtgacggcgggggacagtaaggcgagaaacttgcccctgggaattaggggggcaccacctctgcggacccctccaagggacccgcttgggaagatggcagggcggggcttttttcttatcgggtccgcccaggctgcgggagggaagaggagggggctgtctcccgaggatagagctcagacccccatgcccttcctttgtcgcccctccccagcggccttgctggcggcccgggggcccgaagagcttctgtgcttcaccgagcggttggaggacttggtgtgtttctgggaggaagcggcgagcgctggggtgggcccgggcaactacagcttctcctaccagctcgatttgaggcccgacggcgcctccagtcgtggtcactggagggaaacctgcgggtccagggctggcacgccctctatgggccggggcgcgaacactcccgcgatcaccgctggaacgcgaccccaaacatcaggctgggataacaacgcctccaaatcgaggggatgagccatggaagctgtgtcgcctgcaccaggctcccacggctcgtggtgcggtgcgcttctggtgttcgctgcctacagccgacacgtcgagcttcgtgcccctagagttgcgcgtcacagcagcctccggcgctccgcgatatcaccgtgtcatccacatcaatgaagtagtgctcctagacgcccccgtggggctggtggcgcggttggctgacgagagcggccacgtagtgttgcgctggctcccgccgcctgagacacccatgacgtctcacatccgctacgaggtggacgtctcggccggcaacggcgcagggagcgtacagagggtggagatcctggagggccgcaccgagtgtgtgctgagcaacctgcggggccggacgcgctacaccttcgccgtccgcgcgcgtatggctgagccgagcttcggcggcttctggagcgcctggtcggagcctgtgtcgctgctgacgcctagcgacctggaccccctcatcctgacgctctccctcatcctcgtggtcatcctggtgctgctgaccgtgctcgcgctgctctcccaccgccgggctctgaagcagaagatctggcctggcatcccgagcccagagagcgagtttgaaggcctcttcaccacccacaagggtaacttccagctgtggctgtaccagaatgatggctgcctgtggtggagcccctgcacccccttcacggaggacccacctgcttccctggaagtcctctcagagcgctgctgggggacgatgcaggcagtggagccggggacagatgatgagggccccctgctggagccagtgggcagtgagcatgcccaggatacctatctggtgctggacaaatggttgctgccccggaacccgcccagtgaggacctcccagggcctggtggcagtgtggacatagtggccatggatgaaggctcagaagcatcctcctgctcatctgctttggcctcgaagcccagcccagagggagcctctgctgccagctttgagtacactatcctggaccccagctcccagctcttgcgtccatggacactgtgccctgagctgccccctaccccaccccacctaaagtacctgtaccttgtggtatctgactctggcatctcaactgactacagctcaggggactcccagggagcccaagggggcttatccgatggcccctactccaacccttatgagaacagccttatcccagccgctgagcctctgccccccagctatgtggcttgctcttaggacaccaggctgcagatgatcagggatccaatatgactcagagaaccagtgcagactcaagacttatggaacagggatggcgaggcctctctcaggagcaggggcattgctgattttgtctgcccaatccatcctgctcaggaaaccacaaccttgcagtatttttaaatatgtatagtttttttttgtatctatatatatatatacacatatgtatgtaagtttttctaccatgatttctacaaacaccctttaagtcccatcttcccctgggcataggccatagggatagaagttaaagttcttgagcttattcagaagctggatctgcaatctgaatgctactcataacataacaaaatagtatgttaaacagctcttaaatcttactggcttaccacattaaatgatttctctctcctaactcagctcaaatgggcagccatccatgggatgagtcagaggttcagactcttccagtctgtagctctaccttctcttagggtacttagatggatcccctgttctacaaactgccagtcagcaagggaagaaaaagggcagcaatgaccctcaatgggccatttgagggatctggcctggaaatgggcttcctctcttcttctcacacctcactggctggaaacagtcacatgaccccagtcacatgaaaggccaggaaacttagtttagctgtacacccaggaagggcaaagctgtttaagggccactagctagtctctgccactaataataataaaagtaattctgaatcag

SEQ ID NO: 24078 - DNA, 5203 bp, Homo Sapiens
gcacgctgagctgaagggtgtgcggagcggcgcggcacagagcctgttgttgagctcagtatgtcgtgggaatccggggccgggccaggtctaggttcccaggggatggatctcgtgtggagtgcgtggtacggaaagtgcgttaaagggaaagggtcgttgccactctcggcccacggcatcgtggtcgcctggctcagcagggccgagtgggaccaggtgacggtttatctgttctgtgacgaccataagttgcagcggtacgcgcttaaccgcatcacggtgtggaggagcaggtcaggcaacgaactccctctggcagtggcttctactgctgacctgatacgctgtaagctcttggatgtaactggtggcttgggcactgatgaacttagactgctctatggcatggcattggtcaggtttgtgaatcttatctcagagaggaagacaaagtttgccaaggtccccctcaagtgtctggctcaagaggtaaatattccggattggattgttgaccttcgccatgagttgacccacaagaaaatgccccatataaatgactgccgcagaggctgctactttgtcctggattggctccagaagacctattggtgccgccaactggagaacagcctgagagagacctgggagttggaggagttcagggaagggatagaggaagaggatcaagaggaagataagaacattgttgttgatgacatcacagaacagaaaccagagcctcaggatgatgggaaaagtacggagtcagatgtaaaggccgatggagacagcaaaggcagcgaagaggtggattctcattgcaaaaaggccctgagtcataaagagctatatgaaagagcccgagaactgctggtatcatacgaagaggagcagtttacgggaggctgtgctggatgcttttctggatgatggcttccttgtccccacatttgaacagttggcagctttgcagatagaatatgaagatggtcagactgaggtccagagaggggaaggtactgacccaaagtcacacaaaaacgtggacttgaatgacgtcctggtgccaaagccgttctctcagttctggcagcccctgctcaggggcctgcactcccagaacttcacgcaggccctattggagaggatgctctctgaactgccagccttggggatcagcgggatccggcctacctacatcctcagatggaccgttgaactgatcgtggccaacaccaagactggacggaatgctcgccgattttctgcaggccagtgggaagcaagaaggggctggaggctgttcaactgctccgcctcccttgactggccccggatggttgagtcctgcttgggctcaccttgctgggccagcccccaactccttcggatgtaagtctcttgaattccatccggtaagagggtgaggcccttcaagcctcagggccacactgccctagaatgactgagttagaagggccctttggggacagtctagcccagtctcactcccactgacagatgggacaactgagtccagagaggggaggggtagggttttcttacctaagatcatacagcttaagacctgactgaactgagtccagtgtgggaatggataagacaatccccctagagtgcttagcacagtggcctgcacagagtaagtgcacaataaatggtagctgctgtttattattgaacccaggtcttctgactccaagcccagtgctgtttcctctattatctttccaaagtatacctctgatagttgcttagcaaccttcagttgctccctattgccttcctgttaagtctaggcttcttagcctgacattcaaagatctttctgattctggcccaacttaccatggtagccatacctcctgtgagtctcctttaccctatccaccctgggttctatggtcaaactgaatattgcactggtaaatacctgtggttgtctccctttccttttctctgtcatttcctgaccctgagccacttccctcataatcatggaagcctttagcgcctgattcccttcttgctttcttgagcaatatctgtttcatttggatgactcatctgacactctacagctcctcaactccagtgactttcattctccactacactcagcaacccatttccatcattcggagctattccacctctgaaagctcacatcccagcatcccactcggtgaccaccacttctcgtccttctagttctcacccttgcatcccatgacatctgctctttgcctgcatccagatctccatccctccatttcctgcatcccttgaccttgcttcctctctatcctgtctgtggttgctcagttcggccactcatcatcagcaccttcagctttgcccatcctttggccatatctgacttgcaaacccctgagctggaattgatcctccccattctgcttcccctgctcctcagcccgggtagctgagctctgctggagaaaaccacatagccctgcggattgctgccactgcagaggtatgatttttaatctcgggcgaggcctcagttctgcttgtctgaacttttacttgttttctgaccactttctctcccatttcctcactattctaaacccttaccgctcacctcaagcccctccccctctcccatttcaccctagcttcctggagcacatggaggcatccggcagggccccctcgacctgaggtccagccctcgtgaactgatctgcggctgcactcaaccttctcgccagtctcaggatgaggtggccttgccccacctcaaagcctgctcctccacctgtgctctggagccacctctgccagcatcgctggggcctcaccccagcctctaccttgctctgctggctcttgctcttcaacctaggaacgtgcctgagcttttctcatcttaaacaaaacaacaataacagcaacacaagcaaaatctcctttgaccctgcatccctctgttgggttatcatcagcttatcattcccacccttcccatcaaaacatctcaaaagagtagtctacactcaacactctccatttcctcactaccctcttactcctcaacctgctgcaatttgacattcacccccagagttgctttgacctcctaattaccaaatcagtgggcccttgtcagtctctgtgtctgctgcattgatgctgtttaccaccccctcctcaaaaaatgcctgtgcttattactagttcctataaagtgctgaaacccaaatctgtctagccctggcccctcccccaagattcagcctcctgtactcgactacatgtcagacatctccccttggatggcccacaggcaccttactgtgaccaaaagagaattggtcgtctcagtccccatctcaactctaaagtgatcttcctcctctgttccctatctcacttggtggcggcaccatctaccctgtcctgttgactctcgaatacttcccaaatctgaggttttgtgttgccgtgtctacttcccttagtgtctccttccctctatcagactaagcttttcaagggcaaggactctacatcagctgtccgtgccctagcacaccacacaagtctaggcaccaaacaggcctcagtaaatgtcgttgaattgaaccgtgctctgctctctcattcccagcagtgctgtccttggtgggagctgacccagtgcctggggaatgaatgaagtgggagtctggatgccaagaccctcttagtccctgatccccctattgagtccaaaagtctttctttaaccctgatggcatttgggacacagaggtatttgtaaggttttaaaagtggctttgtagacaaagtcagtcaaggcaagacttccaggagttggaactgaacagccacattgccagatgtgtgctccagactagaagtgatgtggatgggtgggcaattgggaggagaaccaaaagggcctggatgagtcagagtttcaagaggaggcatttgaacaattcaagcaggagaaagaataaagcaagtttcaaagtccagaaggaacatggcatgtgtatataatgggagggagggagtgacaagagcagcatggagaggtttggataggtggccttcaaggtactttccaatcctaagtgcctgcagagtggaagctgctggtctcggagaagtctggaccacagagatcttctcccaacccaagcataccagagggatgcgacacatgccggcagtaacagcggctcacttggcatcttcaaagccatggggcagggcctgccagacgaggagcaggagaagctgctgcgcatctgttccatttatacccagagtggagaaaacagcctggtgcaggagggctctgaggcctcccccattgggaagtctccatatacactagacagcctgtattggagcgtcaagccagccagctccagcttcgggtctgaagcaaaggcccagcaacaggaggagcagggcagtgttaatgatgtcaaggaagaggagaaggaggagaaagaggtcttgccagaccaggtagaggaggaggaagaaaatgatgaccaagaggaggaagaggaggatgaagatgatgaagatgatgaagaggaagacagaatggaggtggggcctttctctacagggcaagagtcccccactgccgagaatgctaggcttctggcccagaaaagaggagctttgcagggctctgcatggcaggttagctcagaagacgtgcgatgggacacatttcccctaggccgaatgccaggtcagaccgaggacccagcagctcatgctggagaattatgacaccatgtatcttttggaccagcctgtgctagagcagcggctggaaccctcaacatgcaagactgacaccttgggcctgagctgtggtgtcggcagtggcaactgcagcaacagcagcagcagcaacttcgagggccttctctggagccaggggcagctgcatgggctcaaaactggcctgcagctcttctgatggccatccctggtgcaagtgttcatccagccgtgccagggcaacagcccaccccctagtacaactgatgctccctgagacaacctgggagacagcctggatcagccacatcaactcagttgtccaccacaggggaattttgaatgtcttttgtttttgttttgttttgaaaaataataaacaggcaactgt

SEQ ID NO: 24079 - DNA, 4421 bp, Homo Sapiens
gctggacatgtcctgtccgctgctgcagcagaacaagcaggtggtcccagtgtccagccaccgcaaccccctgctggacctggctgcttacgaccaggagggccgccggttcgacaacttcagctctctgagcatccagtgggagtccaccaggccagtgttggccagcatcgagcctgagctgcccatgcagctggtgtcccaggacgatgagagtggccaaaagaagctgcacggtttgcaggccattttggttcacgaggcatcaggaaccacagccatcactgccactgccactggctaccaggagtcccacctcagctctgccagaacaaagcagccgcatgaccctctggtgcctctgtcggcctccatagagctcatcctggtggaggacgtgagggtgagcccagaagaggtgaccatctacaaccaccctggcatccaggcagagctccgcatcagggaaggctcaggttacttcttcctcaacaccagcaccgcagatgttgtcaaggtggcctaccaggaggccaggggtgtcgccatggtgcaccctttgctcccgggctcatccaccatcatgatccatgacttgtgcctcgtcttcccggccccagccaaggctgtcgtttacgtgtcggacattcaggagctgtacatccgtgtggttgacaaggtggagattgggaagacagtgaaggcatacgtccgcgtgctggacttgcacaagaagcccttccttgccaaatacttccccttcatggacctgaagctccgagcagcctccccgatcattacattggtggcccttgatgaagcccttgacaactacaccatcacattcctcatccgcggtgtggccatcggccagaccagtctaactgcaagtgtgaccaataaagctggacagagaatcaactcagccccacaacagattgaagtctttcccccgttcaggctgatgcccaggaaggtgacactgcttatcggggccacgatgcaggtcacctccgagggcggcccccagcctcagtccaacatccttttctccatcagcaatgagagcgttgcgctggtgagcgctgctgggctggtacagggcctcgccatcgggaacggcactgtgtctgggctcgtgcaggcagtggatgcagagaccggcaaggtggtcatcatctctcaggacctcgtgcaggtggaagtgctgctgctaagggccgtgaggatccgcgcccccatcatgcggatgaggacgggcacccagatgcccatctatgtcaccggcatcaccaaccaccagaaccctttctcctttggcaatgccgtgccaggcctgaccttccactggtctgtcaccaagcgggacgtcctggacctccgagggcggcaccacgaggcgtcgatccgactcccgtcacagtacaactttgccatgaacgtgctcggccgggtaaaaggccggaccgggctgagggtggtggtcaaggctgtggaccccacatcggggcagctgtatggcctggccagagaactctcggatgagatccaagtccaggtgtttgagaagctgcagctgctcaaccctgaaatagaagcagaacaaatattaatgtcgcccaactcatatataaagctgcagacaaacagggatggtgcagcctctctgagctaccgcgtcctggatggacccgaaaaggttccagttgtgcatgttgatgagaaaggctttctagcatcagggtctatgatcgggacatccaccatcgaagtgattgcacaagagccctttggggccaaccaaaccatcattgttgctgtaaaggtatcccctgtttcctacctgagggtttccatgagccctgtcctgcacacccagaacaaggaggccctggtggccgtgcctttgggaatgaccgtgaccttcactgtccacttccacgacaactctggagatgtcttccatgctcacagttcggtcctcaactttgccactaacagagacgactttgtgcagatcgggaagggccccaccaacaacacctgtgttgtccgcacagtcagcgtgggcctgacactgctccgtgtgtgggacgcagagcacccgggcctctcggacttcatgcccctgcctgtcctacaggccatctccccagagctgtctggggccatggtggtgggggacgtgctctgtctggccactgttctgaccagcctggaaggcctctcaggaacctggagctcctcggccaacagcatcctccacatcgaccccaagacgggtgtggctgtggcccgggccgtgggatccgtgacggtttactatgaggtcgctgggcacctgaggacctacaaggaggtggtggtcagcgtccctcagaggatcatggcccgtcacctccaccccatccagaccagcttccaggaggctacagcctccaaagtgattgttgccgtgggagacagaagctctaacctgagaggcgagtgcacccccacccagagggaagtcatccaggccttgcacccagagaccctcatcagctgccagtcccagttcaagccggccgtctttgatttcccatctcaagatgtgttcaccgtggagccacagtttgacactgctctcggccagtacttctgctcaatcacaatgcacaggctgacggacaagcagcggaagcacctgagcatgaagaagacagctctggtggtcagtgcctccctctccagcagccacttctccacagagcaggtgggggccgaggtgcccttcagcccaggtctcttcgccgaccaggctgaaatccttttgagcaaccactacaccagttccgagatcagggtctttggtgccccggaggttctggagaacttggaggtgaaatccgggtccccggccgtgctggcattcgcaaaggagaagtcttttgggtggcccagcttcatcacatacacggtcggcgtcttggaccccgcggctggcagccaagggcctctgtccactaccctgaccttctccagccccgtgaccaaccaagccattgccatcccagtgacagtggcttttgtggtggatcgccgtgggcccggtccttatggagccagcctcttccagcacttcctggattcctaccaggtcatgttcttcacgctcttcgccctgttggctgggacagcggtcatgatcatagcctaccacactgtctgcacgccccgggatcttgctgtgcctgcagccctcacgcctcgagccagccctggacacagcccccactatttcgctgcctcatcacccacatctcccaatgcattgcctcctgctcgcaaagccagccctccctcagggctgtggagcccagcctatgcctcccactaggccgcgtgaaggttcccggaggatgggtctcagccgagcctcgtgcacccccaagatggaacatccctgctgcattcacactggaacaagcccctccagatgagtgccccggccccaggccagcttcactgccgtctcttcacacagagctgtagtttcggctctgcccattagctcattttatgtaggagttttaaatgtgtttttttttcctttcaagtcttacaaagctaagactttttggctcattcctttttgcatggttgtctagggtttctggacaatgtgctgttgcatttttattttcctagccttgctaaaatctttcccttctcaagactttgagcagttagaagtgctctttagaagttgtctgtgggtgatgttactgtagtggtctcagggaaaggattgtccagttactttagggggtttttggtggggtttttccccctgtgaaaacttactttgcccctagtctggctgctgctaggacttctgaggagcaatgggacatgagtgtccctgtatctgcgccactgccgcaagggaagcctcaggaaccagcacctggaggccaggatagccaagccctgggtgagcgagaggctggagaacacaggagctcacccagggctgctgcccaaccatgggccactgtgaacagacttcagtcctctgtttttgtttcataagccgttgagacatctgatggacttggcttaggccctgctgggacatcccacgtgtgatccctttcactccatcaggacaccaggactgtccttaggaaaatgtccttgagatggcagcaggagtcatattttctgtgtgtgtgtttcggaaagccgctgtgtcctgcctcagcacaaagacccagtgtcatttgctcctcctgttcctgtgccactccagaacctcagcagatctgagccaccgcctgccagtgtgagaggcggccactttcatggcagctcatcaggcgcagggccccagacagcttcccagcaggccctagagcccggcctgggccaatgatgga

SEQ ID NO: 24080 - DNA, 4378 bp, Homo Sapiens
ctccaacatctccatcttctcctcgtccgtggactccctgtcggacatcgtggacacgcccgacttcctgccggctgacagcctcaaccaggtgtccaccatctgggacgataaccctgccccctccacccacgataagctgttccagctcagcaggccgtttgcaggcttcgaggactttctgccctcccacagcaccccgcttctcgtcagctaccaggagcagagtgtgcagagccagccagaggaggaggacgaggctgaggaggaggaggcggaggagctggggcacacagagacctacgccgactacgtgccgtccaagtccaagatcgggaagcagcacccagaccgcgtggtggagaccagcacactgtccagcgtcccacccccagacatcacctacaccctggccctgccctcggacagcggggccctgtctgccctgcagctagaggccatcacctacgcctgccagcaacacgaggtcctgctccccagcgggcagcgcgcgggctttctcatcggcgatggggccggcgtgggcaaaggccggacggtggccggagtcatcctggagaaccacctgcgcggccggaagaaagcattgtggttcagcgtctccaacgacctcaagtacgatgcggagcgcgacctgcgggacatcgaagccacgggcatcgcggtgcacgcgctcagcaagatcaagtacggtgacaccactacctcagagggcgtcctcttcgccacctactccgccctgattggggagagccaggccggcggccagcaccgcactcgcctccggcagatcctggactggtgtggggaggcctttgagggcgtcatcgtgttcgacgagtgtcacaaagccaagaatgccggctccaccaagatgggcaaggccgtgctagacctgcagaacaagctgcccctggcccgcgtggtctacgccagcgccacaggtgcctctgagcctcggaacatgatctacatgagccgcttgggtatctggggcgagggcacacccttccggaactttgaggagttcctgcacgccatcgagaagaggggcgttggcgccatggagatcgtggccatggacatgaaggtcagcggcatgtacatcgcacgccagctcagcttctccggcgtcaccttccgcatcgaggagatcccgctggccccagccttcgagtgcgtctacaaccgcgcagccctgctgtgggccgaggccctgaacgtgttccagcaggcggccgactggatcggcctggagtcgcgcaagtccctgtggggccagttctggtcggcacaccagcgcttcttcaagtatctgtgcatcgcagccaaggtgcgccggctggtggagctggcccgagaggagctggcgcgagacaagtgcgtggtcatcgggctgcagtccacgggcgaggcgcgcacgcgggaggtgctgggggagaacgatgggcacctcaactgcttcgtctcggccgctgaaggcgtgttcctgtcgctaattcagaagcactttccgtccaccaagagaaagcgggacagaggagcgggcagcaagcggaaacggcgacctcggggacgcggggccaaagccccccggctggcgtgcgagacagcgggcgtcatccgcatcagtgacgacagcagcacggagtcggaccctggcctggacagcgacttcaactcctcccccgagtccctggtggatgacgacgttgtcatcgttgatgcagtcgggctccccagtgacgaccggggatccctgtgcctcctgcagagagacccgcatggccccggggtcctggagcgggtggagcggctgaagcaggatctgctggacaaagtgcggcagctgggccgggaactgccagtcaacaccctggacgagctcatcgaccagctgggcggcccccagcgggtggcggagatgaccggcaggaaaggccgcgtggtgtccaggcccgacgggacggtggccttcgagtcgcgggcagagcagggtctgtccatcgaccacgtgaacctcagggagaagcagcgcttcatgagcggcgagaagctcgtggccatcatctcggaggcctccagctcgggtgtctccctccaagccgaccgccgtgtccagaaccagcggcgccgcgtgcacatgaccttggagctgccgtggagcgccgaccgcgccatccagcagttcggccgcacccaccggtccaaccaggtctccgcgccagagtatgtcttcctcatctcggagctggccggggagcgccggttcgcctccatcgtggccaagcgcctggagagtctgggggccctgacccacggagaccgccgcgccacggagtcccgtgacctcagcaagtacaactttgagaacaagtatggcacccgggccctgcactgtgtcctcaccaccatcctgagccagactgagaacaaagtgcctgtgccccagggataccctggaggggtccccaccttcttccgggacatgaagcagggcctgctgtctgtgggcattggtggccgggagtcccggaatggctgcctggacgtggagaaggactgttccatcaccaagttcctgaaccgcatcctggggctggaggtgcacaagcagaatgccctgttccagtacttctcagacaccttcgaccacctcatcgagatggacaagcgggagggcaaatacgacatgggcatcctggaccttgctcccggtatcgaggagatctacgaggagagccagcaggtgttcctggctcccgggcacccgcaggacgggcaggtggtcttctacaagatcagcgtggaccgcggcctgaagtgggaggacgcctttgccaagtcgctggcgctgacgggcccctatgacggcttctacctctcctacaaggtccgcggtaacaagcccagctgcctgctggcggagcagaaccgcggccagttcttcacggtgtacaagcccaacatcggccggcagagccagctggaggccctggacagcctccgccgcaagttccaccgggtcaccgcggaggaggccaaggagccctgggagagtggctacgctttgtcgctgacgcactgcagccacagcgcctggaaccggcactgccggctggcgcaggagggtaaggactgcctgcaggggctgcggctgcggcaccactacatgctgtgcggcgcgctgctgcgcgtgtggggccgcatcgccgccgtcatggccgacgtcagcagcagcagctacctgcagatcgtgcggctgaagaccaaggacaggaagaagcaagtgggcatcaagatccccgagggctgcgtgcgccgggtgctgcaggagctgcggctgatggatgcggacgtgaagcgcaggcaggcgcccgcccctgggctgccccgccccgcccgccccgcgcccgctggcgctgccttgcggccccggagaggtgctggacctcacctacagccccccggccgaggccttcccgccgcccccgcacttctctttcccggcgccgctgtccctggacgccggccccggcgtcgtgccgctgggcacccccgacgcccaggccgaccctgcggccctcgcgcaccagggctgcgacatcaacttcaaggaggtgctggaggacatgctgcgctcgctgcacgcggggccgccctccgagggcgcgctgggggagggcgcgggggcggggggcgcggggggcggtggtcccgagcggcagagcgtgatccagttcagcccacccttccccggcgcccaggctcctctctgacacgcctttaggcgaaacatgccccaagacacagggaccgtttctcccctaggagcagcggtggggagcagggccaaggtcccctgaccactgctcagaggagccctaggccctggccgcagtgccttcagcgcccgacccgggcccccacctggtcagccctggcggggcccactcaggacagctgggggccggggcgtggcagggccctctctgtgcctctcctcccaagtaggaaggggctccgggtggctgctctgggactgggcacccacaagggctcagtgggcccaaacccttgaaatccgtgaaaccgggtggtcccaagagctagaaactcaggaaaccccaggtgctcagggccccgcgtctcgggggctccgtggggcagacccctgctaatatatgcaattctccctcccccagcccttccctgacccctaagttattgcccgctcacctctcccaggccccaggccgcggagctggcagggtggcgcctgcggtttctatgtatttatagcaagttctgatgtacatatgtaaaggacttttttaaatatatgtgccttttgcct

SEQ ID NO: 24081 - DNA, 3990 bp, Homo Sapiens
acggaagcgcgctgggactgacacgtggacttgggcggtgctgcccgggtgggtcagcctgggctgggaggcagccccgggacacagctgtgcccacgccgtctgagcaccccaagcccgatgcagccacccccagacgaggcccgcagggacatggccggggacacccagtggtccaggcccgagtgccaggcatggacggggacgctgctgctgggcacatgccttctgtactgcgcccgctccagcatgcccatctgcaccgtctccatgagccaggacttcggctggaacaagaaggaggccggcatcgtgctcagcagcttcttctggggctactgcctgacacaggttgtgggcggccacctcggggatcggattgggggtgagaaggtcatcctgctgtcagcctctgcctggggctccatcacggccgtcaccccactgctcgcccacctgagcagtgcccacctggccttcatgaccttctcacgcatcctcatgggcttgctccaaggggtttacttccctgccctgaccagcctgctgtcgcagaaggtgcgggagagtgagcgagccttcacctacagcatcgtgggcgccggctcccagtttgggacgctgctgaccggggcggtgggctccctgctcctggaatggtacggctggcagagcatcttctatttctccggcggcctcaccttgctttgggtgtggtacgtgtacaggtacctgctgagtgaaaaaggtaacgcaggccgggcgggctagtcccgggcgcccacagctgcccagtgcctcctcccctggtggcagccgctgagcagcctggagcaggagcccggagacgatggctttgacctcccaaagaatccgccagtgaggaaaagcgctcgggtgctgagctgtcagcggctccgccacccaattcgatctggaaggttccatctagggctaaggcagacacccaggaagacctgctgggcacaggtcaaggcagggtgcaggagcagccgagtctttgggtggccagggggctctggaggaggccgtgtggagggtcgttcagaacgcggttctcaaaggtgatgctgcctgttaggtgtctggtaggggaggccaagggaggctggcacccatgtgcaacctgaggcatggacgaggcctgctgacccctctggaaccacccccaaatccccaatcctttggcaacgggtggcgcctcccgccctgatagccatcagtttgaaaccgttgctccctcagatctcatcctggccttgggtgtcctggcccaaagccggccggtgtccaggcacagcagagtcccctggagacggctcttccggaagcctgctgtctgggcagccgtcgtctcccagctctctgcagcctgctccttcttcatcctcctctcctggctgcccaccttcttcgaggagaccttccccgacgccaaggtgagtcgggggctcccgcagggtgaaggagcgcccagaaggcacgaggcttgagctgcaccaggcactgtgggtccttggcctgcagatggtggaaccctcggctcctcctggactctgagggtcctggcactgccaggctcttcctctggagaggaccccgtccatgctcggggcaggtttctgtgtttgaggctggaaatgatgcgggcgctcggtgccttcctgctgcggctgcagccctcccagccctcatcgtgacctgctggcccacagaacccgacttcagagcctgaggaggccggtgcagaagccgggatgtggacagaggggtcacctgcgggctggatcttcaacgtggttccttggttggtggcgattccggccagtctattcagtgggtttctctctgatcatctcatcaatcagggttacagagccatcacggtgcggaagctcatgcagggcatgggccttggcctctccagcgtctttgctctgtgcctgggccacacctccagcttctgtgagtctgtggtctttgcatcagcctccatcggcctccagaccttcaaccacagtggcatttctgttaacatccaggacttggccccgtcctgcgccggctttctgtttggtgtggccaacacagccggggccttggcaggtgaggggcgggcctctgtgcccaggagttcccctgtctgtggggtttgaggccaccgaggtgctgcagggtggggttgtgcctcccttcagagggggtccgggtgtcagaggagggcacagaccccagagcaggcccaggagaggaggatggggctgccttccaggttccactggactttgctgacggcaggtggctcatgagtcgccatctgccctgactcacagatatgttcccatcctggtagcccagggtccccgggacacctcctggccccgctgagtgccatggatgatgggggtccttcttcagctcagcctcgcctgagccggcctgtggctcccattttcctttcagcgggacaaaggggacttgttaccaggccattttctggatggcctgtgagatctctgcccctccaagaccctccaagtctgagcctgacccacagctgggacactgaattcagccctgggaaccatgggggctcctatcaggcgctagacccccagcccttcccctggcactaccttgggaaccagggtggggtgtggggcctgggctgcccgggagcactcagcccgcctggccctctcttgggcaggtgtcgtgggtgtgtgtctaggcggctacttgatggagaccacgggctcctggacttgcctgttcaaccttgtggccatcatcagcaacctggggctgtgcaccttcctggtgtttggacaggctcagagggtggacctgagctctacccatgaggacctctagctcccaaccccacagcctctccaaggacccaggcgccagcagccccaggacacaggggactcagtgtgtgggacttggtcactccatgtcagacacacgagcagagaggaacacaaaccactgtggagcctgaagctccttaagaagagtccacaacagctggtgggagggtggggtgggcctgggtccagaccaggctcgctgctctctgggcctcagtttccccacctgccagcgggctcggccctgtcctcctcacaggctggtgtggccgtcagggtgggtggggttattgttagtaggcgcagcctcattcccaccacgatctgttccgcgtggttcccgccaaacctccctcggtcgccgtgttctccgcaagcctcctgcagcgcccgcctgccaatgtgaggctggcaccaggctgcagcctccccaatcccagcccactttgctgtgtctctggcgggctgtcctccttggtgggagctgtcctgcacactgtaggatgcttaaaggtatccctggcctccacccacccctagccagcagctcccagtcagacaacagccagaaatgtctccagactctgcccagcctccccaggtagccaccctcgagacacgacctcagagtctctgtgtctcctagaagcctgacagagacccccagggcagtgggtgggtggcgggctagagacccttgcctgtgtccgggaccctggcgccgctctcccctcctgtggatccctccgcactaacagtgttctcagtgggcagacgcctgggcaccccttgggccctgcccagcatggccatggcgcaggctctcgaacccgcatggctttcccaggcctggtgattctgctctccagggacggttggcaccttcctcgggggcgggccccacgcaccccagaacacacagacccacctttctggcgttctttctacctcccttttcgttgcctgaggagctggtggtttcatgagttaatgatacatcttgcaaggtgtacacatagagaaaaaaacctaaaaatgtggaaaagcacgccaaagccttatttaaataataactattaaactattcaaaaag

SEQ ID NO: 24082 - DNA, 4319 bp, Homo Sapiens
gggtggtgggaccagcagtgggggcagcagcaccaactccctgactgggtcccggccccccaaggctcggcccactattctcagctcagggctgccagaggaacccgaccagaacctgtccagccctgaggaggtgttccactctggccactcccgcaactccagctatgccagccagcagtccaagatctccggctacagcacagagcactcgcgctcctccagcctctcagacctgacgcaccgccgcaacacgtccaccagcagcagcgcctctgggggccttggcatgaccgtggagggccctgagggcagtgagcgggagcaccggcccccggagaagccgccgcggccaccccggcccctgcatctgtccgatcgctctttcaggcggaagaaggactcggtggagagccacccgacctgggtggacgacacgcggatcgatgcggatgccatcgtggagaagatcgtgcagagccaggacttcacagatggcagcaacaccgaggacagcaacctccggctgttcgtgagccgcgatggctctgccacgctgagcggcatccagcttgccaccaggtagggcaggcttagggaggggtcgtcggggcggctggggcttgggggtgagagcagagtccccacagtccactcacctggccttgaacgccaaatcttgtcgccacagtgtgaccctgggcctgtcatgtctctgaacctccctttccccatctgtcaggctgtgtggacaccaccacctcacctgggagcctggggcagtgagggcacggacaggttcggtggtttcccacagttcacaaggtcacctccagcaatgcctggtgcagggctcagcacatggcaggggcctcacacgcatttatttagaaccctcccttctacttcctcccagctccagggactcgggaagaatggtggtggtgatgcctcatgggtttactgaacaaatctttccctagcaccagctaggcactaggccctaagtgaaggcctggttcaatgcaggctgctgcctacacagcatccacagatggcaggggtagatgggaccaaagttgcgggaacgacagtttatagagtgctgcgtcacagacattcatttggagcatgttgactatgtgcctggctctccatgtgctttggctaaccaaatgaatgagcgagtgagcgaatgagcttcccacaggcgggctgctgagggcaggtggggagcccgcctaacatccacatccccagggaagaggcgtggccaggccgctgcgcagaggctaccctctcaagctgctctgctgactcctgctggccacggcctggaatggcagccatcacctcccagtagcctcctgggctgctctggggtgggggtgagggggcggtgagcaagaaggaaactgaggggctggcttccttatgggtttgtaaacacacccctccctggccccctctgaaaatgaggaagcatcttggggaaagaaaccaatctggttgggagcgagatcacagcagagctacatgctgagccccgagagtccccgactccagggctgggcctgggctcggcagggaaaggagctgaccaggtttcctgacttcccactgccctcttggtcaccctcacatccctctgagcctcagtttcttcacctgtcaagtggggcaggatgcagtgactccctgccgaggtgaccgtgaggatggggtggcacagccagatgtgcccggaagggctctgcaggccccacagactctgatgcttactatctgtgtcactgtgggcaagggacttaccatcgctggggcacggttttagcccctttgcaacacagggctggttaacagtacctgcttgtgaaacacctccagaggcctggtccagtggagcgctcaggaaatggggtatcgagggggacatgctgacctgtctctcacctgcagggtctcttctggggtctacgagccagttgtgattgaaagccattgaggagcaggtgtccgggctggagaagagtcctgctttctctggagtccagacctgtatcattccatgaggaactttccccttcagatcacctctgcgccacatctcatccatgcctcctccatgcactccagtccacactccccgtagcatcattccattgcccctcctatccatgctgggaccctcctggcccaccaaggcccaggcaccactgtgaatattctcctctgaaccactagagggcaggccaggcaggccaggcgggcccgtgcagcttgtgggcaagaaggagctggcaaggaccggcgctgctggagactgacccagccctctggctgaggacatgcagcagctcctaaatgtagagatgcctgtggctgagggggcctctctacctgtgtccccactcactccaggagcactggctttggtcacgtcttagcagcagggccttgctccgttgttcccttgccctggtggtgggggggccagaccgcctccggaatcctgccacctgtgactgtctgactgcttagtgcttcagctgtcccttccttgtgtcctgggggacctgctggcggcctcttcctgggagccatgacctcagaccccacccacactccagatcgagacccctgcctccccccggcaaatgtcctcccgctgccttgcagcctgcactttgcacatgctcacccccagcacagtcccactggcccctcacctccccttccctgagctccttcccaaggactcctggtcactgcctgctgtgcagtcagaggcccagggtccagcagcccggcgggaacgggtgctgcctcttcctccagttagctccagctcaggtctgagacccgtgctgagaaaggtctgagcaccgaccgtgccctctgcccagggctgggtcctgagcagctggttttcctgcaggaaggttggagcaagcaaagtccttctctgccctcagggtcagctgcccagactggggcggatgccagagaggcaggtgggctgtggctggactggtccggagctggcttccttaccagaaaagcctcagccttcctctggaagcatcccccgttctgggcaagggggaagggctcctttaaggggtgtgctttcccagtggggagcagtctggccctgccccctactaaagcctctgctctcagcactttcccccaagtccttgtaacttgcttgaaggtgggttctggctgccagccagtccctggacaaactctcctgccccttttaaatttcactcattttgtataaacccagcaggctggtgtttacttagccctgtagcttttttcattttttctttccgtctttcttcttgagttcacggttcaatattgcctcctcgccctggtgaggggaggtgctgcttttctgccccacctgccggctggttccagcagcgctggggcccagctggggggccgggatgggggcttctctctctgggaggggtgcaggtgccctccccaggctgggagggttccttccctagctccccatctgcccccgctggtgagagttgggcttcttggtcttggaactccctggcattgggaacagagcatttccagcatttgttgttgttgttttactcacctaacccttagaaaatgaatgttagaaggtgcctgccgaggcgggacagagtgtttgctcgcgctggagaaggctctgctcagccctgagagtcccttcctgccccaccgatactggcactttaaaaaggaagctgaccgcacagtgtccagacgaattggcccccagaagatggggagttctgtcctgcccttctgtgtctgcgtgacctcacccagcctaggagggaggtgcattcagggtagatttgcctctcattcaaagttctggggctttgggcggaaaacagccagctttggcgctgttggggagactcctccagaccaggaaccccagaaggagacagagcctgccacatcctcccacgccaggccctgggccagggtgattggactgagaatttggccacaaccaaattgatgctggctggaaccagaggccagaaagcctggccttgtccccatgtgggagccctgtcctcagccctcttgtccccttgagctcagtgaattcccaccaggtgcccacagctcctggacttcaaattctatatattgagagagttggagagtatatcagagatatttttggaaaggagttggtctatgcaatgtcagtttggaatcttcttgaaagtttaatgtttttattaggagatttaaagaaaataaaggtctacaatatc

SEQ ID NO: 24083 - DNA, 4468 bp, Homo Sapiens
accgaagctcagaattgattcattctggggagctgaccaaaatcactaagcaaggcaaaagccagcagcggacgttcttcctgtttgaccaccagctggtgtcctgcaagaaggacctgctgcgcagggacatgctgtactacaagggccggctggacatggatgagatggagcttgtggacctgggggatgggcgcgacaaggactgcaacctcagcgtgaaaaatgccttcaagctcgtcagtaggaccacagacgaggtttatttgttttgtgccaaaaaacaagaagacaaggcgaggtggctgcaggcctgtgcagatgaaaggaggcgggtgcaagaggacaaggagatgggaatggaaatttcagaaaaccagaagaaacttgccatgttaaatgctcaaaaggcaggacatggaaagtcaaaaggctacaacaggtgccccgtggccccaccgcaccagggcctgcaccccatccaccagcgccacatcactatgcccacaagcgtcccccagcagcaggtctttggcctggcggaacccaagaggaagtcctcgctcttctggcacaccttcaacaggctcacccccttccggaaatgaaaacaggaggctgtgcttccatggagctgggtgtcaagagaagaactgtctttgtttcttgtgtgcttcaatccagggaaagtttcttggacccagtgataaaaacttccttttagggatcaatgaaggagagaaggtcttggaatcaccttcagtctttggagacccagctgcctttgtggaagggaggagacggtcatgacacaaagctttatcctacacagaaacacccgtgacccgctatgagatggcccagatgtgggacccagtaccatgctctaaagcgagtgattaggcagcagctgaagccacccctgctgatgatgagcaagtgcctgctgcaggtccaaacacagcatccagggctttgcagttcctaaggagtgatgaggttaggggatcacttctgcatttgattttcaaggatgccgtcaagacggggttgacacaatgctgcacgtgtctggtcacacttagaaattgagctcttactctcttctgtaatactgggggacctacagctgccgtggagccgaccacggtgttccctggcatcgtctgtgtccacacagatgctaactggtagtgcaaatgtcatcctgcaaggttcctcttcctgcaagcaaagtggagagaaacaagatgcatctgtcaccttcatcagggtcctcagtgcagagcaacttacgcatcctcaagaatccactgcttttcaggcaaggagggagaaatcctgctgcacactggctttgtcccggagtcggattccctcctgcctgcacgccttcagtaactccgagcagaaatcacatcttgcccacatgctgtaacctaagaaactgctatgcaaggctgggtgctgtggctcatgcctgtaatcccagcactttgggaggccaaggcaggtggatcacctgaggtcaggagttcgagacaagcgtggccaatatggcaaagcccagtctctactaataatacaaaaattagctgggcatggtggcgcatgcctgtaatcccagctactgggaaggctgaggtaggagaatcttttgaatctgggaagcggaggttgcagtgagctgagatcgcaccactgcactccagcctgggagatacagcgagactgtctccaaaaacaaaaacaaaaacaaaaaacattcaaacaactgtttgcaatataaaaagctcatttactgtaatatttatgatacagtgaatatgaaaatgcactggtcagaaggcactctcaaagagccgcactgctcctgacatcgtccttagcaatgaaatcacaaagacagccaaagcagtcctgcttcttggaaatcagaagctgcctttatcacatataaagccaaacagggcataaccatgtcacgtgagcatgtcatcaggcttctgaggacttgttctttataaaaaaagaccttcacaaaatatcttggcttagagatagcagtctttattaacaaaggccacctaggctgacacctgcagataatcatctccttttctttgtctatgttgtacattttcatgatataacttttaactatgtctagagaaggcaggctctgcaagagaggtgccctttcaacccgctcagtgccctggacaggagatgctgtgttaaactgttaatggatatctatatgagaagctcatttttgtatgctatccctgcagtttttttttttctaacaggcccatgtttgagaataaacaagtctgtgatgtcagagacaaaggtgtattcttcagtctgcaggtgtgtggcacctcccttctcccctgcagccccccacatccagagccgttcctgagagtgacatcatgcatcaagaaaacataaccttggtcctcaggtgaacccttggaacattctgtgaccgcctgatgtccattctgagccaccttggcacacatgcttacaggcagcactgctaagggttcaggtgccccatggctgacagcccgagttgcttctgtggaccatcatgccgctcggcacgtcctgagacagaagttgctgcaggaaggagcttctggagaggtcctgtggcatgtgtgggggtgtgtgtgtgtatgtttccttcttgaacagacattccaactttagatgtgtttatagaactgacctttttactaacaaaatacaatgatatatgttggaaactacttaatatgcttttcctgcacaccttagcaataactgtaggggtctctgctagagttgtttgtatgtacagcaattttgaacaaattgttttaaatgtaatataagagaattagtttaaggaagtaaagagaatcatttgcttgtgttacattttcagtgaggattcagtttaagagtcattcttaggacttccatttcctaatatttattcatgggtaatgaagaaatggtttgcattttgtggccagtcctaatttattttccagctgagccctaacttccggctcccacctacctccacggacttcctaacagagacttaagaataccaggatgtgtttttgttaagtcaggttcaattcgttgcccctgtcagttttatagagtgtgagggtcactccattaaagatctctcctgggtggatcctacttggatgttcaggtgattttgaaaactgctaacatttttaaaaggctagaacatcctttgacttcttgaaaatctgcatgtctggcttgggttttattaccacatgcctgagttcttcaagaatggaaggctcaagtattctcatcttccatttgccaaacttccttcctgatttgagtcacgtgttccacttggaaagaaagggaacagagagcctcctccatggacagtgtatgaatttcattgggaatcttgctctctcccgcctctatgcctttctctctttttaaccttactttacataatattatagatgggccaagaaaagaaaagatgacataacattttgatgaattacacctattccattcttcacgtttcagaattggtcgactttgttagaagataattgaagtagccttgggtcaaaagcaaccttttcaattgtgatcatacctaaaacatataaaaaccctgccgtagattaaaagcaattataaaatcataaaattaaatgtttgcagaatcctggagcagtagatttctttgtctttggcctgcggactagaaagagggcagcagtagtatgctggagcttccctgggataccagccacatggtttcttttcattagatctgatttttgtttcccactgtagatctgattttgtagttgaaaacatttcaccaccatcaaacactatttctgaatattgtgcctttttatacctagcctagatgacccccgatgccattcttattcagaaaatccccccatcctacatgactgttatctagacataaagcaaagtgcatttaattcaaaatttggttcacaatataagtattttgtaaaagccagctgaaccagcattttatcaggtggaaatctctgcaagccaaattgctgatactccttcatgcagatcaacttggtgtcccagtcagaatagaacagcataattacctggagttagggggagtatttctgcactattacttgtcagggagagaagaaacttagaattgtccctcaaaggagtgtcaagaagtatgaataaatgtcctttcaccagctcacaggccagaaatggaggacccaagtcaactaggtgaaactactagcagacccagctttcccataataacctaatctgcaaattgttctattaaagtctcattgttttcaggatgcaatgaaagtggatttcaaaaggctttggaaaaataagtggaacatgactgatcttg

SEQ ID NO: 24084 - DNA, 4470 bp, Homo Sapiens
cccaatcagtgccaatgtgtgccaggctggcggggcgacgactgttccagtgagtgtgccccaggaatgtgggggccacagtgtgacaagccctgcagctgcggcaacaacagctcgtgtgatcccaagagtggggtatgttcttgcccttctggtctgcagcccccgaactgccttcagccctgtacccctggctactatggccctgcctgccagttccgctgccagtgccatggggcaccctgcgatccccagactggagcctgcttctgccccgcagagagaactgggcccagctgtgacgtgtcctgttcccagggcacttctggcttcttctgccccagcacccatccttggccaaaatggaggtgtcttccaaaccccacagggctcctgcagctgcccccctggctggatgggcaccatctgctccctgccctgcccagagggctttcacggacccaactgctcccaggaatgtcgctgccacaacggcggcctctgtgaccgattcactgggcagtgccgctgcgctccgggttacactggggatcggtgagtggcgtggggcgggcgggagacgggagggaggaggtggggcgccgccaggctcactcagctaggtgcccaggtgccgggaggagtgcccggtgggccgctttgggcaggactgtgctgagacgtgcgactgcgccccggacgcccgttgcttcccggccaacggcgcatgtctgtgcgaacacggcttcactggggaccgctgcacggatcgcctctgccccgacggcttctacggtctcagctgccaggccccctgcacctgcgaccgggagcacagcctcagctgccacccgatgaacggggagtgctcctgcctgccgggctgggcgggcctccactgcaacgagagctgcccgcaggacacgcatgggccagggtgccaggagcactgtctctgcctgcacggtggcgtctgccaggctaccagcggcctctgtcagtgcgcgccgggttacacgggccctcactgtgctagtctttgtcctcctgacacctacggtgtcaactgttctgcacgctgctcatgtgaaaatgccatcgcctgctcacccatcgacggcgagtgcgtctgcaaggaaggttggcagcgtggtaactgctctgtgccctgcccacccggaacctggggcttcagttgcaatgccagctgccagtgtgcccatgaggcagtctgcagcccccaaactggagcctgtacctgcacccctgggtggcatggggcccactgccagctgccctgtccgaaggggcagtttggagaaggttgtgccagtcgctgtgactgtgaccactctgatggctgtgaccctgttcatggacgctgtcagtgccaggcttctggatgggtgcccgctgccacctgtcctgccctgagggcttatggggagtcaactgtagcaacacctgcacctgcaagaatgggggcacctgtctccctgagaatggcaactgcgtgtgtgcacccggattccggggcccctcctgccagagatcctgtcagcctggccgctatggcaaacgctgtgtgccctgcaagtgcgctaaccactccttctgccacccctcgaacgggacctgctactgcctggctggctggacaggccccgactgctcccagccatgccctccaggacactggggagaaaactgtgcccagacctgccaatgtcaccatggtgggacctgccatccccaggatgggagctgtatctgccccctaggctggactggacaccactgcttagaaggctgccctctggggacatttggtgctaactgctcccagccatgccagtgtggtcctggagaaaagtgccacccagagactggggcctgtgtatgtcccccagggcacagtggtgcaccttgcaggattggaatccaggagccctttactgtgatgccgaccactccagtagcgtataactcgctgggtgcagtgattggcattgcagtgctggggtcccttgtggtagccctggtggcactgttcattggctatcggcactggcaaaaaggcaaggagcaccaccacctggctgtggcttacagcagcgggcgcctggacggctccgagtatgtcatgccagatgtccctccgagctacagtcactactactccaaccccagctaccacaccctgtcgcagtgctccccaaaccccccaccccctaacaaggttccaggcccgctctttgccagcctgcagaaccctgagcggccaggtggggcccaagggcatgataaccacaccaccctgcctgctgactggaagcaccgccgggagccccctccagggcctctggacagggggagcagccgcctggaccgaagctacagctatagctacagcaatggcccaggcccattctacaataaagggctcatctctgaagaggagctcggggccagtgtggcttccctgagcagtgagaacccatatgccaccatccgggacctgcccagcttgccagggggcccccgggagagcagctacatggagatgaaaggccctccctcaggatctccccccaggcagcctcctcagttctgggacagccagaggcggcggcaaccccagccacagagagacagtggcacctacgagcagcccagccccctgatccatgaccgagactctgtgggctcccagccccctctgcctccgggcctaccccccggccactatgactcacccaagaacagccacatccctggacattatgacttgcctccagtacggcatcccccatcacctccacttcgacgccaggaccgttgaggagccaggatggtatggcagaggccagcacacctggctgttgctgctcaaggctggggacagagcctagtgtacccctgccaggagcagggagtggaccggcaggctgtgaacatgaacaacgcttaacagagcaagtgatgggagccttgttcctgggttctaccatgggagacgctgatcagcaggatgcctggctccctttcccaacccactgctcccaaggcctccagggccctgtgtacataaactggtgggttggaagttgctgggtaactctgatttcagacatgcgtgtggggtaccttttctgtgcatgctcagcctgggctctgtgcgtgtgtgtgtttctgtgattttagaagggtaccaggcacaggttctgtcctagggcacttaccatttagtagggagatggaaccaacccaattaactctagcaatagcctcctaactggcctcctccattgattcagtgaaccttccaatgcatggctcataatttcaaaatacaggctggttagttactccctacctgaaagccttcataggtgcctctttgctcttctgccagtatcaaaacttttgaaggccttaaaggccctgctttgcctggcccatctgtctctccagcctcaccttgaactgtgttcctgtcactgcacgccagtcacaccggcctctaggtcctcctgtaggccactcttctttctggcacagggacctgcacacctggagtgcccttcctcccccactcgcctgttcacccctgcttttcctttacacctcctcctcagggaagtgcccaccctccgtacatctttcacagccctgattgcagctgtgttcactcaccaggtacctgcagaaggcctacagggtgccaggcacttctttaatgtgttctttctttatgtgattatttgattaatctctgcctcccccactagactgtaagctccctgaaggcaagaatcctgtgcttatgctcaatattagctctcccttggcacagagtaggcactcaacaaatgctccccaaaaggctgagtggctgactgaattaagtaccagtgacatgcagtaactgctaagatagatgagccatctgtatgctctgacagttacagactgaataagttggagacttccctaaagggtggcatttccccagggtaacaacgcagagctcaggtgtgggaaggtgccaggggcaggggtgcagaggggctgaggctgaggggggtgcagaggctggagaaaggataacaggagagagtatacaggcatgccttgatttattgcacttcacaggtagcagaatttttaaagaaattgaaggttttgggacatatatgtgacagcaataggttaagaaaagcaaagcagagaaattgaagatttgtgtcaacactgctttaagcaaatctgttggcaccatttttccaatagcatgtgcccattttgggtctctacattgcattttggtaattgcttgcaatatttcaagcattttcattgttattatatgtgttatagtgatctgtgatcagtgatctttgatatattattgtaattgtttcggggcgccatgaaccgcacccatataacacggtaaacttaatcagc

SEQ ID NO: 24085 - DNA, 4382 bp, Homo Sapiens
gggggttggtgaatggtgccgaccgcggccatcgcagttggaggctattttttggggggggtgagtagcgtccatggagttactttgcgcccactcctagcggcaccggcttaggtcctgcgggccgaccgtccccggcggggggcgtggggcctgggacgccgcgggcccggccgcctccctcgccgcgaccccggatggatgcgcgccccccgccctcccgcgccggccccaggagctcccggcttcgggagcatccttcccgcgccggtccctgcagcggcgcgtagtcgaggggcagcgcccgtcaggggggcaccggggagcaagatggaagagaagaggcgaaaatactccatcagccagtgacaactctgacaccactgacagtcatgcgacatctacatccgcatcaagatgctccaaactgcccagcagcaccaagtcgggctggccccgacagaacgaaaagaagccctccgaggttttccggacagacttgatcacagccatgaagatcccggactcataccagctcagcccggatgactactacatcctggcagacccatggcgacaggaatgggagaaaggtgtgcaggtgcctgccggggcagaggccatcccagagcccgtggtgaggatcctcccaccactggaaggcccccctgcccaggcatccccgagcagcaccatgcttggtgagggctcccagcctgattggccagggggcagccgctatgacttggacgagattgatgcctactggctggagctcatcaactcggagcttaaggagatggagaggccggagctggacgagctgacattagagcgtgtgctggaggagctggagaccctgtgccaccagaatatggccagggccattgagacgcaggaggggctgggcatcgagtacgacgaggatgttgtctgcgacgtgtgtcgctctcctgagggcgaggatggcaacgagatggtcttctgtgacaagtgcaacgtctgtgtgcatcaggcatgctacgggatcctcaaggtgcccacgggcagctggctgtgccggacgtgtgccctgggtgtccagccaaagtgcctgctctgccccaagcgaggaggagccttgaagcccactagaagtgggaccaagtgggtgcatgtcagctgtgccctatggattcctgaggtcagcatcggctgcccagagaagatggagcccatcaccaagatctcgcatatcccagccagccgctgggctctgtcctgcagcctctgcaaggaatgcacaggcacctgcatccagtgttccatgccttcctgcgtcacagcgttccatgtcacatgcgcctttgaccacggcctggaaatgcggactatattagcagacaacgatgaggtcaagttcaagtcattctgccaggagcacagtgacgggggcccacgtaatgagcccacatctgagcccacggaacccagccaggctggcgaggacctggaaaaggtgaccctgcgcaagcagcggctgcagcagctagaggaggacttctacgagctggtggagccggctgaggtggctgagcggctggacctggctgaggcactggtcgacttcatctaccagtactggaagctgaagaggaaagccaatgccaaccagccgctgctgacccccaagaccgacgaggtggacaacctggcccagcaggagcaggacgtcctctaccgccgcctgaagctcttcacccatctgcggcaggacctagagagggttagaaatctgtgctacatggtgacaaggcgcgagagaacgaaacacgccatctgcaaactccaggagcagatattccacctgcagatgaaacttattgaacaggatctgtgtcgagagcggtctgggaggagagcaaagggcaagaagagtgactcgaagaggaagggctgcgagggctccaagggcagcactgagaagaaagagaaagtgaaggcggggcctgactcagtcctggggcagctgggtgagtgagggccatgctggcctgcagacacggcaggcttgaccatcaccacgcttgcagctctgtctgccctgcggaaggccagctgcacagagtaggagactgaggctcaagagcggtaaccaggcccttgcttgcccaggtgcacacaccttccacccacaaaggagacagatctcagagccccgtgtgacatcctgggaaatgccccatctgtagacctggatggaggctgggccacgcccactcaggaactgtccagtcattcccctggctggggggtcctgggtgctggattttcccagaggcccctgggacagccccatgctgggaggggaggatctgccagaaagccccatccttgtcctactctcccagaatcctctaagtgggcccttcctgcaacagcagcagactctcctggagctgcccagaggagtggctgcaggctctggccctgcccaccacctccactgtcccaggcctcctgttaggcagagcagcctaatgggagcagtgtgactcatggacctcacgtgcttcctccagagatttcagggagcatcatggagtccccttccagaccttgcctctgggatggaagccccaggtcatcctttctgtccctctgtctcaagaaggggaaaacccaggcgtggtggtgcatgcctgtattcctagctgctcaggaggctgagttgggaggatcgcttgagcccaggaggttgaggctgcagtgcaccatgatcatgccactgcactccagcctgggtgacagagcaagaccctgttccttcatttcacacccctcccgcaaaaagaaggggataacttgggtgtctaacaggaaacccagtctcccgtctcgccagctgccccctcccaagacctcggtaaggaaggaaggctctgccgccctcacatctgctggcgtctcacttgcctcccctctccctgacatccaggggggactggatactgcttgctacccctattcgtacctgatccctttatccatgctctttgctgcaagcgctgggaggcaacgcttataaagactgagcgccctctggcggcctgagggcattttcctccagattcctccttccccaaccccaccagaatgggggtagtgggcaggtccaacttcgtgggtagcaacctgtgcagtgccacggggtccttgttcttggttaatgctctgctgctgccaccttgaattttctttcccatggcaggctttctggtaaaatccaaaaaacctgctagacaaactaaaagagctataacactccaccttgaaattcttaataatatttgaacaaggagcctatattttcattttacactctagcccacaaattatgaagcccatcttgagggcagcacgtccttctggagagaagcgtataagtagtccctactctttggtggtgttggcaggagggatggacaaaacaagatagctcacctgggtctggcacagggggacagagagaagacgatgcctggtggtgtgctgggagcgtcagtgggcttcctgaaagggtgggacacacgtctgctggcgtctcacttgcctcctctctcccctcagcaggcctgtccacctcattccccatcgatggcaccttcttcaacagctggctggcacagtcggtgcagatcacagcagagaacatggccatgagcgagtggccactgaacaatgggcaccgcgaggaccctgctccagggctgctgtcagaggaactgctgcaggacgaggagacactgctcagcttcatgcgggacccctcgctgcgacctggtgaccctgctaggaaggcccgaggccgcacccgcctgcctgccaagaagaaaccaccaccaccaccaccccggacgaggcagcctcagtagctgctgactcagatgtccaagtgcctggccctgcagcaagccctaagcctttgggccggctccggccaccccgcgagagcaaggtaacccggagattgccgggtgccaggcctgatgctgggatgggaccaccttcagctgtggctgagaggcccaaggtcagcctgcattttgacactgagactgatggctacttctctgatggggagatgagcgactcagatgtagaggccgaggacggtggggtgcagcggggtccccgggaggcaggggcagaggaggtggtccgcatgggcgtactggcctcctaactcacccccttccctgtcccaggccctgccctggtccccccacaaggcctcagcccagtcacaactgccatttccagtctctgctgagtgtcccagaccctcgaggctgccactccgtcgtggttttatttttaatatagagagagttttgaattct

SEQ ID NO: 24086 - DNA, 4761 bp, Homo Sapiens
ctccctgctgggccctcttgaactcacagctccaggaaactgggagactcatccctggtgttccagggagtctctgctgcccaccatctctgccccccagggcccaggagccaccatgtggcgatgtccactggggctactgctgttgctgccgctggctggccacttggctctgggtgcccagcagggtcgtgggcgccgggagctagcaccgggtctgcacctgcggggcatccgggacgcgggaggccggtactgccaggagcaggacctgtgctgccgcggccgtgccgacgactgtgccctgccctacctgggcgccatctgttactgtgacctcttctgcaaccgcacggtctccgactgctgccctgacttctgggacttctgcctcggcgtgccacccccttttcccccgatccaaggatgtatgcatggaggtcgtatctatccagtcttgggaacgtactgggacaactgtaaccgttgcacctgccaggagaacaggcagtggcagtgtgaccaagaaccatgcctggtggatccagacatgatcaaagccatcaaccaggggcaactatgggtgagaggccctagaggcaccctcagtgggcacacatgcatactcatgcatgtatacacgcatgctgtgctgtggggcacgtccagcaggccactcctacacccagatttgactgtgtgtgcgctcagccactgtgcgtctctcccacccacatgcacccacgccaaggaccctgagcctcggcagatctgtgacttccttccgtcccctctccttcagctggcaggctgggaaccacagcgccttctggggcatgaccctggatgagggcattcgctaccgcctgggcaccatccgcccatcttcctcggtcatgaacatgcatgaaatttatgtaagtccatccttccccacaatgctgccatctccccatggctcagaacctcagggatgctggccctgtgccctgctcctccaagggcctggaccatcccctactacaaggctgtgtgtccctggacaagttactccccttctctgggcctctgttccctgcttccacaggatgtgctgtgctggaagaactgatgctcagattgaatttcgtggtcttggcatcagctcccccctgatctctccagcctgggaaaaatgctgttggtctcagtacagctgggttagggcccaaggggacagggggtcaccttggtattttgggaagggaaggacacacactcctccagttctggccagagggcagcagttctcggaaataaatgccggttcagcggaaccccaagggaggagagggcttctcccttcccaccagtgggaccctctgggagaggaatgaaaaccaggcccaaagtgaaagggtgaggaaggggagcttcagcaggcctggaccgggacatgtgccggagcatttgtccatcagtggcaggcagcggggaggcaggggctggcaggagtggccctccctgcggagacttcggccttgggtgaccagaccctggccctgcccttattcccctgggcctctggctattttctgcctcttgctgtttgtgttggcagactgcctggtcacgggaccctactgcctcttccctcccctgagggaaagctaaggcctgaagaaagctaaggccgatcagaaggtgcagaggaaagaggcaggggttgagaatggaaagctgagggacctggcctggccacttctctgtgcctggcctcagctgcctcatctgggaagcaggactagtcaccaccgccaccccgccccgccccaccacctgatacctgggaggcactaaatggtgcttggttcttcaacacaagtcaaaattggaggcagctggaatcctgcagcagcaggagggctcaagattaaactgcagaaggccctggacttggtggccctccagtgccaatgggcacctgaggggcaggccagggcagagcaggaggcagacagggcaacctttatcttgcagacagtgctgaacccaggggaggtgcttcccacagccttcgaggcctctgagaagtggcccaacctgattcatgagcctcttgaccaaggcaactgtgcaggctcctgggccttctccacagcagctgtggcatccgatcgtgtctcaatccattctctgggacacatgacgcctgtcctgtcgccccagaacctgctgtcttgtgacacccaccagcagcagggctgccgcggtgggcgtctcgatggtgcctggtggttcctgcgtcgccgagggtatgcagcaacaggggatgtgggcagagaagagggcaaggagctccgtgggcatggcctgggccatgatgcactgagtctttctgcctttgctccctcttgctgcctttgcagggtggtgtctgaccactgctaccccttctcgggccgtgaacgagacgaggctggccctgcgcccccctgtatgatgcacagccgagccatgggtcggggcaagcgccaggccactgcccactgccccaacagctatgttaataacaatgacatctaccaggtcactcctgtctaccgcctcggctccaacgacaaggagatcatgaaggagctgatggagaatggccctgtccaaggtaaacccccttatccagcaccctggttccagaagcttgtgcctgcttgagagtgggcacagtagcacaagtggcctgcacagcattcagcagcatgtccagtagggccaggagtaggggtccccccctcccacaggcagcacctggagggagcacttagagctttggtatggagggaccctggtgcctgggcacatctcaatagactcaggctccagtgcctgtgccaacgggctgagtggaccctaccttgacatctgcccacagccctcatggaggtgcatgaggacttcttcctatacaagggaggcatctacagccacacgccagtgagccttgggaggccagagagataccgccggcatgggacccactcagtcaagatcacagggtgaggggcgtgtgggcagagggggtttgggacagcagggtttgtgctaggggctctggagcctgccttgggttcttacaacctctctaaaaagccaggactgctctcatcatttcaatagggagaaaactgagactcagaaagagaaaggacttgccctgggtcgaattgaaggttgggagcctctgaaggcttttttaggaactgttccttccttacattgggataaaataactccaatatgaagagagcctcaagagtttctcaacctctccccacctcagcacctgtcccagctctgcctgacccaccgagtgacctgggaggtcgctcccctggcctcagtttccctatccgatttagggaatatagatgttaggatcactgacttcaatgaactcggtgaaatgtgctttacggtgggaattggcggtctctaagatacccatattctcagagtgtcttccttctggcccttggcacctacccctccctggatccccaagtgagggagggcaggtggatgtgtggtcccatagaactggcccctaggaggtgggtctctggaggacccaggttccctcctcttctgctcaccttgcctccacttgtccccttggtgccccaccccctcccatgctgggcctgggtgcaccgacttacagatatgagagtgagggagatgcagagaggtacagagacctgcctgagccctaagggtgtacccaaccctccaaaggcaactgggggctggatggggcaggtttccgggattggagctcctgagagcaggtagacccagctcccttccccctcctctgctctgcccacagatggggagaggagacgctgccagatggaaggacgctcaaatactggactgcggccaactcctggggcccagcctggggcgagaggggccacttccgcatcgtgcgcggcgtcaatgagtgcgacatcgagagcttcgtgctgggcgtctggggccgcgtgggcatggaggacatgggtcatcactgaggctgcgggcaccacgcggggtccggcctgggatccaggctaagggccggcggaagaggccccaatggggcggtgaccccagcctcgcccgacagagcccggggcgcaggcgggcgccagggcgctaatcccggcgcgggttccgctgacgcagcgccccgcctgggagccgcgggcaggcgagactggcggagcccccagacctcccagtggggacggggcagggcctggcctgggaagagcacagctgcagatcccaggcctctggcgcccccactcaagactaccaaagccaggacacctcaagtctccagccccactaccccaccccactcctgtattctttttttttttttttttagacagggtcttgctccgttgcccaggttggagtgcagtggcccatcagggctcactgtaacctccgactcctgggttcaagtgaccctcccacctcagcctctcaagtagctgggactacaggtgcaccaccacacctggctaatttttgtattttttgtaaagaggggggtctcactgtgttgcccaggctggtctcgaactcctgggctcaagcggtccacctgcctccgcctcccaaagtgctgggattgcaggcatgagccactgcacccagccctgtattcttattcttcagatatttatttttcttttcactgttttaaaataaaaccaaagtattgat

SEQ ID NO: 24087 - DNA, 4348 bp, Homo Sapiens
gaaggagacgctgcccttccgcagcgatggcatcccggctctgtggaggggccctctggtatgtgtgtccctgtccttctggggcgtggatggtgcctgggacccagctggcaaccagttgaagacgttctccttggaagctcttggccctgaggactttgcctggggcattggccctgccatggcgttccggagggccgagggcacgtctatgatccaggccctggccatgacggtggccgagatccccgtgttcctgtacacgacgtttgggcagtctgcattctcccagctacggttgacgccaggcctgcggaaagtcctctttgccacggccctggggactgtggccctggccctggctggccaccagctgaagaggcgacggaggaggaagaagcaggttggtcccgagatgggaggggagcagctgggcacggtgcccctccctatcctcttggccaggaaggtcccttcagtgaagaaaggatactccagccggagagtccagagccccagcagcaagagcaacgacaccctgagtggcatctcttccattgagcccagcaagcactcgggctcctcccacagtgtggcctcgatgatggcagtgaactcatccagccccacagccgcgtgctcgggactatgggatgccagagggatggaggagtctctgaccaccagcgacggcaatgcagagagcctgtacatgcaaggcatggagctgtttgaggaagctctgcagaagtgggagcaggcactaagcgtgggccagcggggggacagcggcagcacccccatgcccagggacggcctccggaacccagagactgcatcagagccactgtctgagacggagtctcactctgttgccaggctggagtgcagtggcgcgatctcggctcagtgcaacctccgcttcctgggttcaagagattctcctgcctcagcctcccaagtagctgggattacagccagagtcacagcggaaggagtttgcagagaagctggagtccctgctgcaccgtgcctaccacctgcaggaggagttcggctccaccttccccgcagacagcatgctgctagacctcgagaggaccctcatgctgcccctgaccgagggctcgctgcggctgcgggcggacgatgaggacagcctgacttcagaggattccttcttctccgccaccgagctctttgagtccctgcagactggagattacccgatcccactctccagacccgccgctgcctatgaggaggccctgcagctggtgaaggaggggagagtgccttgccggaccctcaggacggagctgctgggctgctacagtgaccaggactttctggccaagctgcactgtgtgcggcaggccttcgaggggcttctggaagacaagagtaaccagcttttcttcgggaaagtgggccgacagatggtgacaggcctgatgaccaaggctgagaagagccccaaaggcttcctggagagctacgaggagatgctgagctatgccctgcggcccgagacctgggccacaacacggctggagctggagggccgaggggtggtatgcatgagcttcttcgacatcgtgctggacttcatcctcatggacgccttcgaggacctggagaaccctccggcctcggtgctcgccgtcctgcggaaccgctggctgtcagacagcttcaaggagacggtgggtcactgccctgctctcagacccacacttgctcacatcagcccgtgtggttgcctggctccgtcccctctgtccctagcactggcaccagggctgggcccccaccccctagatccgcggctgccaggcctgggagaccagagtctgccctggagaagcctccagggtgccccgttgctgcctggtgccccagtttagaaccaacatggtgtgcgctttcttcctattgtgtggttttacttttgtgctggtatgaattcgattccattttaatgcatcctgttaaatcaagttaaaagaggggaaagcaaaaccaaaaggaaaaaaaggcacagagtgagagacaacccagcacaggacccccaggaaggcaagcagtaacgctccagcagccgggctgtgctgcctgggcccaggcttctgcgaggtggtttacaggcgggaaccattgctcccacaaccaccaaaggaggtgggagtgctgtgttgtgcccctttacagaagaggagaccgaggctcagagaagatccagcagtaagattagagtcaagattcaagtttaggtatgtctgagtccaaaatcagaggaggaagcagcagagcttaggcacctggccccatcttcctgcttggagtggggccttggccactgcttgctggtcggtcctgaaagccaagaggaggctgctgatggtgcctgatggcttcatctcccatttctactccgtatcggagcatgtgagccctgtcctagccttcggcttcccttggacccaagcactcagcttgctgaagtctgtgctttcttcaagcaccagattgtgcagtacctgagggacatgttcgacctggacaatgtgcgctacacgtcactgcccgcgctggcagacgacatcctgcagctgtcccggcgccgcagcgagatattgctggggtacctgggggtgcccgcggccagcagcgcaggcgtgaatggggcgctgccccgagagaatgggcccctgggggagctgcagtagaggcggcacgggctggggggtggcagagagaaggctcctcctcccttccctgggttggtatctgacagctgtggtggctgagggccgttgcccctgactttgccccacccccatcatctgggagtccccaaggcccagaggggacatttccatggagaagaacggttcctgggggaagcagaggccaggaccagtggggcctgtgggagagaaaggctgtgagagagggggttgttgtggagaattgggacaggcagagccaggatgccccaggtgggggaccccaaaacctcccatcgctccagggctgctgacaagggtgctgggagggtggaggtgaaggatggggcctagagccctgtggtgaaggtcacagtgtcctgagctagaagccacctgtggctatatggtctcagcatccagctggcctgtcctgatgccctccccacctcaaccgccttctcagagagtttgcaactccagagaaggagagtggggccaccttagtgggcagcaggcctgggccatccagagatggggcagaggtgggcctcccaatcctgtgctctcttctgagcaggaaatgggcccttggaaagtgttctttgaaattccctcgccctaacaaagattgtcttttctcctcccacctctgtcaccaccaaagacgggcggaggtggggctgggccctcctgcccccgcccatcccccttccatgagcccagacctccctgggtggtgctaggctctgagctgggggctcagaccagggatcgctcaggcccctgtcacctgtgggcccggggaccacttgggggaggtcagaggatgtatgtggccggaccagcttccccaccttcattaggacaagaaactgcccagcactttgccttcagttcaacgcacaaacgctcctggggcctcatgggggcagagcctcccctgggcctgcagagagtcctgttagcagcgacgtccccccgccgcggggtcctgtcagcccggcagtgtcttctcagtgtcttcacctgagcgagtgtctgtggccccaacgcgttctgctgtggctctgccctttccaggttgagaggcctgcaggagaaacacactcccctcctgggtttccacactcaggaggtcagaggactggctcctgtgaccagggcccctctcccctgaatgggaaaggggtctggggatgggagggcgcaccacagagaggagatgatgctgggtgtggcccatcttctgtgggccccttcccagacaccggatccatgggcactaacccgcctcccaggctgatgcccggaggcagcttcctgggcaggagggttccatgggcactaacccacctcccaggctgatgcctggaggcagcctccagggcaggaaggaccctgtgctccccgccccccatcctgacatcctgttcttttgcacttaccctgtgctgtgaatgtaacagtgggccttggccccgcccactctgatttgcattttcatttgtgtttgtttacacatccatgcactgcctgtagcagtcgattgtcacagcttcgacttttggatggtagagtgtgtgcactgactgtgagtcgaataaacaattgagacg

SEQ ID NO: 24088 - DNA, 4548 bp, Homo Sapiens
ccaagagctacttggagctgcttcatattttctccatcctcatcgggcagaagaaactggagctgaaaactgccaagaaccgcatgaagagcggcctcgacaagctgctgcgcacttctgaggatgtagccaagatgcaggaggacctggagagtatgcaccccctgctggaggaggctgccaaggacaccatgctcaccatggagcagatcaaggtggatacggccatcgccgaggagacccggaattcagtgcagacagaggagatcaaagccaatgagaaggccaagaaggcacaagctattgctgacgatgcccagaaggacctggacgaggcgttgccagccctggatgcggctctggccagcctgcgcaacctcaacaagaacgatgtgaccgaggtacgtgccatgcagcggccacccccgggtgtgaaactggtcatagaagctgtgtgcattatgaaaggcatcaagcccaagaaggtgcctggagaaaagccaggcaccaaggtggatgactactgggagcctggcaaggggctgctgcaggacccgggccacttccttgagagcctcttcaagtttgacaaggacaacattggggatgtggtgatcaaagccatccagccgtacatcgataatgaagagttccagccagccaccattgccaaggtgtccaaggcttgcacctccatctgccagtgggtgcgcgccatgcacaagtaccactttgtggccaaggccgtggagcccaagcggcaagccctgctggaggcccaggatgacctgggggtgacacagaggatcctggatgaggcaaaacagcgccttcgtgaggtggaggacggcatcgccacaatgcaggctaagtaccgggaatgcattaccaagaaggaggagctggagctgaagtgtgagcagtgtgagcagcggctgggccgagctggcaaggtgcgcaccctcctcctgcaaggcctgcaagcgggcccggcccagacaggggccagaaaggaccagggcgccggtgggtcctggggtggctgtccacaccccctccctggcaacccaggtgccacagtgggtagggccagccccaggcccctagcccagcctcccagagcccaccccacggggctgcccctccagctcatcaacgggctgtcggatgagaaggtgcgctggcaggagacggtggagaacctgcagtacatgctcaacaacatctccggcgatgtcctggtggccgctggctttgtggcctacctgggccccttcacgggccagtaccgcacggtgctctacgacagctgggtcaagcagctcaggagccacaatgtcccacacacctccgagcccacgctaatcgggacgctggggaaccctgtgaagatccgatcgtggcagatcgctggcctccccaacgacacactgtcagtggagaacggggtcatcaaccagttttcccagcgctggacccacttcattgaccctcagagccaggccaacaaatggatcaagaacatggagaaggacaatgggctggatgtgttcaagttgagtgaccgcgacttcctgcgcagcatggagaacgccatccgctttggcaagccatgtctcctggagaacgtgggcgaggagctagacccagccctggagccagtgctgctcaagcagacgtacaagcagcagggaaacacggtgctgaagctgggggacacggtgatcccctaccatgaggacttcaggatgtacatcaccaccaagctgcccaacccacactacacgcccgagatctccaccaaactcaccctcatcaacttcaccctgtcgcccagtggcctagaggaccagctactgggccaggtagtggcagaggagcgacccgacctggaggaggccaagaaccagctgattatcagtaatgccaagatgcgccaggagctgaaggacattgaggaccagatcctgtaccggctcagctcctccgagggcaaccctgtagatgacatggaactcatcaaggtgctggaagcctccaagatgaaggctgctgagatccaggccaaagtcaggattgcagagcagacggagaaggacatcgacctgacgcgcatggagtacatacccgtggccatccgcacccagatcctcttcttctgtgtgtccgacctggccaacgtggaccccatgtaccagtactcccttgagtggtttctcaacatcttcctctcgggcatcgccaactcagagagagcagacaacctgaagaagcgcatctccaacatcaaccgctacctgacctacagcctctacagcaacgtctgccgcagcctctttgagaagcacaagctgatgtttgccttcctgctgtgtgttcgcatcatgatgaacgagggcaaaatcaaccagagtgagtggcgatacctcctgtctgggggctccatctcgatcatgactgagaatccggcaccggactggctgtcagaccgggcttggcgagacatcctagcactctcgaacctgccaaccttttcctccttctcttccgacttcgtgaagcacctctcagaattccgggtcatcttcgacagccttgagccccaccgggagcctttgcctggcatctgggaccagtacctagaccagttccagaagctgctagtactccgctgcctgcgtggggacaaggttaccaacgccatgcaggactttgtggccaccaacctggagccacgcttcattgaaccccagacagccaatctgtcagtggtgttcaaagactccaactccaccacacccctcatctttgtgctgtcacccggcacagaccctgctgccgacctctacaagtttgccgaagaaatgaagttctccaaaaagctctctgccatctccctgggccaggggcagggccctcgggcagaagccatgatgcgcagctccatagagaggggcaaatgggtcttcttccagaactgccacctggcaccaagctggatgccagccctagaacgcctcatcgagcacatcaaccccgacaaggtacacagggacttccgcctctggctcaccagcctgcccagcaacaagttcccagtgtccatcctgcagaacggctccaagatgaccattgagccgccacgcggtgtcagggccaacctgctgaagtcctatagtagccttggtgaagacttcctcaactcctgccacaaggtgatggagttcaagtctctgctgctgtctctgtgcttgttccatgggaacgccctggagcgccgtaagtttgggcccctgggcttcaacatcccctatgagttcacggatggagatctgcgcatctgcatcagccagctcaagatgttcctggacgaatatgatgacatcccctacaaggtcctcaagtacacggcaggggagatcaattacgggggccgtgtcactgatgactgggaccggcgctgcatcatgaacatcttggaggacttctacaaccctgacgtgctctcccctgagcacagctacagcgcctcgggcatctaccaccagatcccgcctacctacgacctccacggctacctctcctacatcaagagcctcccactcaatgatatgcctgagatctttggcctgcatgacaatgccaacatcacctttgcccagaacgagacgttcgccctcctgggcaccatcatccagctgcaacccaaatcatcttctgcaggcagccagggccgggaggagatagtggaggacgtcacccaaaacattctgctcaaggtgcctgagcctatcaacttgcaatgggtgatggccaagtacccagtgctgtatgaggaatcaatgaacacagtactagtacaagaggtcattaggtacaatcggctgctgcaggtgatcacacagacactgcaagacctactcaaggcactcaaggggctggtagtgatgtcctctcagctggagctgatggctgccagcctgtacaacaatactgtgcctgagctctggagtgccaaggcctacccatcgctcaagcctctgtcatcatgggtcatggacctgctgcaacgcctggactttctgcaggcctggatccaagatggcatcccagctgtcttctggatcagtggattcttcttcccccaggctttcttaacaggcactctgcagaattttgcccgcaaatttgtcatctccattgacaccatctcctttgatttcaaggtgcccgctgggatccagaggccttccagctggctgagtctcagcccaaggagctgtacacagagatggccgttatctggctcttgccaacacccaaccgcaaggcccaggaccaggacttttacctgtgccccatctacaagacactgactcgtgctggaacactatcaaccacaggacactctaccaactatgtcattgctgtggagatccccacccatcagccccagcgacactggataaagcgtggtgtggccctcatctgtgccctggactactagactcagacagaagggctggggccattaaagctgaattttct

SEQ ID NO: 24089 - DNA, 4683 bp, Homo Sapiens
tcccgctcctgtacgtggagctcaatgactccgccaagcagctcattgagatggacaagccatgcccagccgctgcatccagctgcaatgcctccctgccctctgactccggcgctgtggccagcgtggccccaagtcccactttaagcagctcaggggcggtcagtgcctttcagcggcgtgtggatggcaagaagaacaccaagaaacgccactccttcaccgcgctcagtgtgacgcacagatcctcccaggctgccagccacaggcattccatggaaattagtgctccagtgttgatcagctccagcgatccccgagccgcggccaggattggagaccttgctcatctgtcgtgcgctgctcccacccaggatgtctcctcctcggcgggatctacccccacggctgtcccacgggctgcctcggtgtctggagagcagggcacgcctcccaaggtccagctgcccctcaacgtgtacctggcgctctacgcctacaagccccagaagagtgacgagctggagctgcacaagggagagatgtaccgggtcctcgagaagtgtcaggatggctggttcaagggggcgtctctgaggaccggggtctctggggtgttccccggaaactacgtgacacccgtttccagggtgcctgcaggaggggcagggccgccccggaataatgtagtcggagggtctccactggccaaagggataaccacaaccatgcacccaggcagtgggagtctgagcagcctggccactgccaccaggcccgccctgcccatcaccactccccaggcccacgcccagcaccccacagcctcgcccccaacaggcagctgtctacggcactcagcccagccaacggccagccaagcccggagcaccatttcaacagctgcccactctgcagcccaggctcaggaccggccaactgccaccgtgtcacccctgcgcacccagaactctccatcccgcctgcctgccaccagcctcaggccccactcggtggtgtccccgcagcacagccaccagcccccggtgcagatgtgcccacggccggccatccccctcacatcagcagcatcagccatcacacctcccaacgtcagtgccgcaaacctcaacggggaggctggaggggggcccatcggtgttctgtccacatccagccccaccaacacgggatgcaaactagacgagaagaaaagtgaaaagaaagagaagaagagtgggctcctgaagcttctagccggagcatccaccaagaagaagtcacgctccccgccatctgtgtctccaacccacgacccccaggtggccgtggacgccctgctccaaggtgcagtgggccccgaagtgtcctcactgtccatccacggcagggcagggtcctgccccatagagagcgagatgcagggtgccatggggatggagcctctgcacaggaaggcaggctccttggatctaaacttcacatctccttcccggcaagctccgctgtccatggctgccatccgccccgagcccaagctgttgcccagagagaggtaccgcgtggtggtctcgtacccaccccagagtgaggcggagatcgagctgaaggaaggcgacatcgtctttgtgcacaagaagcgtgaggacggctggtacaaggggaccctgcagcggaacggccgcacaggcctcttcccgggcagcttcgtcgagagcttctgagaactggtgctccctgcacccagctcacagagggggaggccgcctgggaagctccacggcacacagagagggagccatggcgccccaagggttccaggtcatctccaaggcacctggcgggggataccctggcccagggtgggggccagggactgtggaggtcgtgccttctcccaaaacccccaaacggagagcacacctgggatgttcttcaaggaaatgcccaccccctctgtggaaactgcaaagaaagcaccttgaggaagagaggcaggtgccggcgcaggcaggcctgtggctgtggtttgcagccatggcagcgttctcatttaccacctaagcagggttggaggttgcaggaggtctgcaggcgaggtgggtggcatgggggccaggagcgctggagatcatctttctgggctgccctgggcttcccgcggggcccaggttgctctgtcaccattctatatacctcagtcacctgccgcccggctgctcagcaggggtgtttgtgaggccctgggggtgccccggaaggggcaccccaccgcccctgttgggaaccagagcagaatctgtgggcttgtcgcctgccagtagtataagcaacactttctgttcaccaccattgtcccttgcattacttctttcttacagcatatttttaacataaagctgttagactttatatatttctaataggtcagacattgcctatttttcatacatctggtgctgcctttttgtaaaactaataatgacttggttgagcttgaaagaaaagatgtctgaggcgacatcaaaggggcagaatttttatatttcccatatggctttgggagagcgccgagaagccgccatcccgcacctcagcgctggccagtactctgggggctggcggggtggatccattgagggggtcggagggagcttggaagcagccggtttctttaaactcttaccaaaaccccgcgctctgtctagacggtgatgattattattcaagacctggaaacatttcgaggaagggccactataattgtccttttgtgtggcggtagaaggagcacgcaggtcaaccccagccgggaaggcaaaatcttccctttattgcctcagagagaactgcaattagcattctcagaagatgatttcttggtatcaaaatgtgcagtttctacaacagtttagatcaccaccaccatttttcttcttttttaaaaataaataactgctcccatttcaggcagtgcaaaccttcatctgctggagaccagaggtacaaggagatcagggggttgcagcaccgctgcaggcttgcaagatcggggagttgggagggcgagagaggaggaggtgcagctttgatgctgggacctccctgagtggggctgatgaatgtatattcattagcaccatggctcacttcccaggaagactgatcaggagcccttcagggacaattttgttctcaagattcacaccttaggaacacatttttatcacctcaaaattttgatccatcacccctctctccacctatatttttacaaataccattcagacttaaattaagctgaagaaactagcctttggtaacatagggtgtcattggttttcagggatgtaaccaattccagaaatacattcttttgcctggcatgaagactttgaaacacgggccgcttattttcagagttcctgttttgggacgtgacttggctacttgttacttccaggtggttaccacacggcgggggtcatgcctttccctcccccaagatgataatagatttaatagactcaaagaagttgttcagaatcaaagaagaaaaagtctggcttaaacatagtaacttctgtgtgccaggttaatgacaaccaaaagctctctatttaccattattgccaaacttcatcagttgcccatcctgcaccaaaatcctgtgcgtgtttaaattcacgttgtcaccaaagaggtgcacagatcaacaacctggatgacgcaggtgttctccagggaaaccagaccaagtcaagtctccaggtaacttttttgaagtcttttttttaaggcgcgcaggtaccaagcaacagaatagagtaacctgaacgttcttactctcccaggcatggcccacgtggtgcttcaggtagaaatgtgcttcaccctcctggtggggggcgaggacacagcccactgcatgcagcatggtagagagctggggcgaatatctccatgtctttggaggatgtcagctggccgctttcagggcagagtcgggtgggcgttggtgccaccttaggaaggagagcgatgcgtgggtctggccagagctctggagccaatgccgggctgcctgagagcagaggaaatgcatggcccatgtgcatttctgagtattttaaactcgttcaggccctgcagccttcatgatgatgtagctcgcagagaagagcaggagcagaattagccctttcttcaggccatcttgcctcaaagggtacacatgtttggcggttaagatgaaactaacccttatgtttcatcctggccccatgatgtacacatcttagccatgtagtggccttggggggccacagagatttcctttgaggagcatggtagagtccacagccatggctgaagtcagtggacaccgaggggacaggactgcaggccaccaggggcctctgcccagagggaggcagagaggatggcggccacgggtgctctcctggcatcctcatggggtgatgccaggccgggcacttcaaaacaggctcagccgactgggagatcctttgtactttgcacagttcacacacacaaacacacacaccctatcccaagtgtttttgttagacacaaatgtcagcgtgtgattttggaagacttgtcagtgatgacaaaccatgatgcctgtgtttctgagtctttaaataaaaatgaacatgg

SEQ ID NO: 24090 - DNA, 4507 bp, Homo Sapiens
ctctccgcccgtgtggagtggtgggggcctgggtgggaatgggcgtgtgccagcgcacgcgcgctccctggaaggagaagtctcagctagaacgagcggccctaggttttcggaagggaggatcagggatgtttgcgagcggctggaaccagacggtgccgatagaggaagcgggctccatggctgccctcctgctgctgcccctgctgctgttgctaccgctgctgctgctgaagctacacctctggccgcagttgcgctggcttccggcggacttggcctttgcggtgcgagctctgtgctgcaaaagggctcttcgagctcgcgccctggccgcggctgccgccgacccggaaggtcccgaggggggctgcagcctggcctggcgcctcgcggaactggcccagcagcgcgccgcgcacacctttctcattcacggctcgcggcgctttagctactcagaggcggagcgcgagagtaacagggctgcacgcgccttcctacgtgcgctaggctgggactggggacccgacggcggcgacagcggcgaggggagcgctggagaaggcgagcgggcagcgccgggagccggagatgcagcggccggaagcggcgcggagtttgccggaggggacggtgccgccagaggtggaggagccgccgcccctctgtcacctggagcaactgtggcgctgctcctccccgctggcccagagtttctgtggctctggttcgggctggccaaggccggcctgcgcactgcctttgtgcccaccgccctgcgccggggccccctgctgcactgcctccgcagctgcggcgcgcgcgcgctggtgctggcgccaggtaaggctggagctccgaactgactaaggcggggccagccacagaagggggcgtgtcggagaccacagaaaggcttggtctcatccctgggcctgggaagaagccgactatcccttggggttcgaaagtgggtggagataggagtctccgggtttgagaagggatgaggctgaatctttggtgccccaaggatccccaaggagtcgagttccaggcctcagacccaagatggaatgtccatacccttcaccctcatccaagagcagtgtgggctgggatagggaggggacatgggtcataggctcttctaggtagagccagggccccggcgttgtgctttcccacccttctagagtttctggagtccctggagccggacctgcccgccctgagagccatggggctccacctgtgggctgcaggcccaggaacccaccctgctggaattagcgatttgctggctgaagtgtccgctgaagtggatgggccagtgccaggatacctctcttccccccagagcataacagacacgtgcctgtacatcttcacctctggcaccacgggcctccccaaggctgctcggatcagtcatctgaagatcctgcaatgccagggcttctatcagctgtgtggtgtccaccaggaagatgtgatctacctcgccctcccactctaccacatgtccggttccctgctgggcatcgtgggctgcatgggcattggtcagtctccccaaccccaccttcattaattcatccagtagacatttattaagcacgtactatggtgtgagtcctccagggtagataatctagaggacggatggggcagagccctactcaccaggagctctgtacaatagggcaatgtcacctgcctagacctacagactgaggaacggtgaggggggccatacagccacataactccaggctgcagggtcaaaggcagggaaggactgtgtcagtccaggaacaggcaagtaagagaagagggagagagagacaaggaagtgagagtgtggaggatgagatctttggggctgggaagtagggaaagggcattcacctcttctaaggctggggacaggggccgggggaggggaaagagggcccagcacggcttcctgacggtgtgactcccacagtgggcccttcccagggaaagactacagtgatggctggggtctggaaagaggggcttgggctccccactctgctcctaatcttacctccttccttcttccccctgcccacttctggcaggggccacagtggtgctgaaatccaagttctcggctggtcagttctgggaagattgccagcagcacagggtgacggtgttccagtacattggggagctgtgccgataccttgtcaaccagcccccggtgcgtgggcacagatcctgggcagagctgctgacacagggctagctcacggggagcaggacagttgacaggagacagggagttggagggagaagcagcaagaagaaaatggcagtgtaagataaggagccagagatggcctaggccatctgatgcttacggcctctgaaggaggtcacagtaggagggggttctggggaatggggaacaggaattcacttccgggagcgggcatcttgatgctgaagctccggcccctctcccactcatctcagagcaaggcagaacgtggccataaggtccggctggcagtgggcagcgggctgcgcccagatacctgggagcgttttgtgcggcgcttcgggcccctgcaggtgctggagacatatggactgacagagggcaacgtggccaccatcaactacacaggacagcggggcgctgtggggcgtgcttcctggctttacaaggtgaggggcagagaggaaactgaaaacccgtggaacagcagagggctggcaggagagggggctcatgtgactgcaatgatccagtacccaggtctccctttccccagcatatcttccccttctccttgattcgctatgatgtcaccacaggagagccaattcgggacccccaggggcactgtatggccacatctccaggttggtggtgttctggtggggtgggcggggtgctgaagctggcacaggaggactggaattggagactggggtggatgggggcagaaggctctgggaaaggtgacaccactcctgaccctggtgactctgccaggtgagccagggctgctggtggccccggtaagccagcagtccccattcctgggctatgctggcgggccagagctggcccaggggaagttgctaaaggatgtcttccggcctggggatgttttcttcaacactggggacctgctggtctgcgatgaccaaggttttctccgcttccatgatcgtactggagacaccttcaggtatctgtccataactggtttttcatcctggacatctgatctctgtgatccaaagcttctgaacctcaactctctaatctgccacctcaacctgggtcctaagctaatctctcattctcagatctcaccatttcatccctgtgacactgacctctgacctcatctccccaccaagcccataaggccctgacccctgactcccagtttcagatctctgctctctgacaggtggaagggggagaatgtggccacaaccgaggtggcagaggtcttcgaggccctagattttcttcaggaggtgaacgtctatggagtcactgtgccaggtgcctaggcatggaaggtgggggaggcacccagccaccaccccgaattggtagtacttgggcgcagggagcacgaggccttcgtggtggtcagccatggaggggcttactctgtctcccacacccaccagggcatgaaggcagggctggaatggcagccctagttctgcgtcccccccacgctttggaccttatgcagctctacacccacgtgtctgagaacttgccaccttatgcccggccccgattcctcaggctccaggtaaccggccacttcccccgccggcccctcaccccatatatcctcaccccacatatccaccccgtgtatcaacttaggagtttgatggctcccaaactccacaaagggacccccagcgtaatacactccgtgaagagaaaaaacacggagacacaagctcttcaccccacttctttccttatccctgccctcttctggcctggctctttctcctccctgtcacctcctcccctaaaccttgacctcacactccctttcccaagacttgctccttaacaaaattcaggcaactcccctgaaccacgtgggcagagtccccttccctccaaatccctgaccctcctgtccccaggagtctttggccaccacagagaccttcaaacagcagaaagttcggatggcaaatgagggcttcgaccccagcaccctgtctgacccactgtacgttctggaccaggctgtaggtgcctacctgcccctcacaactgcccggtacagcgccctcctggcaggaaaccttcgaatctgagaacttccacacctgaggcacctgagagaggaactctgtggggtgggggccgttgcaggtgtactgggctgtcagggatcttttctataccagaactgcggtcactattttgtaataaatgtggctggagctgatccagctgtctctgacctac

SEQ ID NO: 24091 - DNA, 4799 bp, Homo Sapiens
tcagaactgccctacgtcctggagatggtggctgagctggctggacagcaggaccctgggctgggtgccttttcctgtcaggaggcccggagagcctggctggatcgtcatggcaaccttgatgaagctgtggaggagtgtgtgaggaccaggcgaaggaaggtgcaggagctccagtctctaggctttgggcctgaggaggggtctctccaggcattgttccagcacggaggtgatgtgtcacgggccctgactgagctacagcgccaacgcctagagcccttccgccagcgcctctgggacagtggccctgagcccaccccttcctgggatgggccagacaagcagagcctggtcaggcggcttttggcagtctacgcactccccagctggggccgggcagagctggcactgtcactgctgcaggagacacccaggaactatgagttgggggatgtggtagaagctgtgaggcacagccaggaccgggccttcctgcgccgcttgcttgcccaggagtgtgccgtgtgtggctgggccctgccccacaaccggatgcaggccctgacttcctgtgagtgcaccatctgtcctgactgcttccgccagcacttcaccatcgccttgaaggagaagcacatcacagacatggtgtgccctgcctgtggccgccccgacctcaccgatgacacacagttgctcagctacttctctacccttgacatccagcttcgcgagagcctagagccagatgcctatgcgttgttccataagaagctgaccgagggtgtgctgatgcgggaccccaagttcttgtggtgtgcccagtgctcctttggcttcatatatgagcgtgagcagctggaggcaacttgtccccagtgtcaccagaccttctgtgtgcgctgcaagcgccagtgggaggagcagcaccgaggtcggagctgtgaggacttccagaactggaaacgcatgaacgacccagaataccaggcccagggcctagcaatgtatcttcaggaaaacggcattgactgccccaaatgcaagttctcgtacgccctggcccgaggaggctgcatgcactttcactgtacccagtgccgccaccagttctgcagcggctgctacaatgccttttacgccaagaataaatgtccagagcctaactgcagggtgaaaaagtccctgcacggccaccaccctcgagactgcctcttctacctgcgggactggactgctctccggcttcagaagctgctacaggacaataacgtcatgtttaatacagagcctccagctggggcccgggcagtccctggaggcggctgccgagtgatagagcagaaggaggttcccaatgggctcagggacgaagcttgtggcaaggaaactccagctggctatgccggcctgtgccaggcacactacaaagagtatcttgtgagcctcatcaatgcccactcgctggacccagccaccttgtatgaggtggaagagctggagacggccactgagcgctacctgcacgtacgcccccagcctttggctggagaggatccccctgcttaccaggcccgcttgttacagaagctgacagaagaggtacccttgggacagagtatcccccgcaggcggaagtagctgagggcaagggtcccgatgagggtcccatggcctgctccctcaggaacagctccagcaccaataaagaggcatcttaccacccaggcttcttggtggtccttcttcctggtgccaccatctaggggcaccagggaaagagcggggtgaacagagctttgctgaaaagggccccctgcaacctagtgcctgaccctccctggactcaggaccaggaaggagttgacaccctggatggtcaagggaggccctccccatccagcagcctggcctgggcttcctccctccctgcctccttttttcctttcgtagaatttgactggtatttgaagtcacccaatatgtatcaggtgggcactgtgggggaatgcagatgcacaggtgtacacagcagtccagaggtcccaggcctgactccaggaaactggcctccctggggaagccacggtgtcacccagaggtcagatagaagcaagagtatctgagggaggcaggggaatgagccaggctggagctgagccagcagggcagggcccccctgctgcgacagtggcatcctgatagtgagatgctcagatgctgctgccctctagtggccgccagttccctgcaactcagaccacgtgatttctgggaaaaggccctccctggaggagaactgaaacttagggtggggactgtagaaaggggcggagagatcagccgcccagccaggagttaagctgaggtcgtctgagccctgcgacagcctggacagcaactcaggatggcatcaggcagggcacgctgcacccgaaaactccggaactgggtggtggagcaagtggagagtgggcagtttcccggagtgtgctgggatgatacagctaagaccatgttccggattccctggaaacatgcaggcaagcaggacttccgggaggaccaggatgctgccttcttcaaggcctgggcaatatttaagggaaagtataaggagggggacacaggaggtccagctgtctggaagactcgcctgcgctgtgcactcaacaagagttctgaatttaaggaggttcctgagaggggccgcatggatgttgctgagccctacaaggtgtatcagttgctgccaccaggaatcgtctctggccagccagggactcagaaagtaccatcaaagcgacagcacagttctgtgtcctctgagaggaaggaggaagaggatgccatgcagaactgcacactcagtccctctgtgctccaggactccctcaataatgaggaggagggggccagtgggggagcagtccattcagacattgggagcagcagcagcagcagcagccctgagccacaggaagttacagacacaactgaggccccctttcaaggggatcagaggtccctggagtttctgcttcctccagagccagactactcactgctgctcaccttcatctacaacgggcgcgtggtgggcgaggcccaggtgcaaagcctggattgccgccttgtggctgagccctcaggctctgagagcagcatggagcaggtgctgttccccaagcctggcccactggagcccacgcagcgcctgctgagccagcttgagaggggcatcctagtggccagcaacccccgaggcctcttcgtgcagcgcctttgccccatccccatctcctggaatgcaccccaggctccacctgggccaggcccgcatctgctgcccagcaacgagtgcgtggagctcttcagaaccgcctacttctgcagagacttggtcaggtactttcagggcctgggccccccaccgaagttccaggtaacactgaatttctgggaagagagccatggctccagccatactccacagaatcttatcacagtgaagatggagcaggcctttgcccgatacttgctggagcagactccagagcagcaggcagccattctgtccctggtgtagagcctgggggacccatcttccacctcacctctttgttcttcctgtctcctttgaagtagactcattcttcacacgattgacctgtcctctttgtgataattctcagtagttgtccgtgataatcgtgtcctgaaaatcctcgcacacactggctggtggagaactcaaggctaattttttatcctttttttttttttaattttgagatatacgccctctttcatctgtaagggactaggaaattccaaatggtgtgaacccagggggcctttccctcttccctgacctcccaactctaaagccaagcactttatattttcctcttagatattcactaaggacttaaaataaaattttattgaaagaggaatcagtatctgattttctgggagaagaaggtagcagtggtcacagatagagatgtaaacttaagagtggggcactggggttctcttcctgctgacatctccagcctctttcctctcctctgcccacaggttctggctaagatgctgcctgggccctgtgggtcctgggcctggcactctacagaggtaccctctgggcagataagattagggtgtgggttgggcaccaagccttcagccaggcactatagccaccaacttcacatggtaaagtctgggctccacagttcttgctagaaggccccaacatcgggcctgaggttagttagattggaggtctaaatgaagaggagacacttgagggtgacctgaaactatggtctagaggccctgggacctgagaacagaggagtcagagagaagagttgctgaaactgtacctgctgttactggcacctcttcctccagcacaatttcactgtcaccccagcagggtactcccaaactggattccttgctctatctaagccccataaaagacactctggccggctgggcgcagtggctcacacctataatcccagcactttgggaggccgaggtgggtggatcacttgagatcaggagttcgagaccagcctggccaacacggtgaaacagcgtctcttctaaaaatgcaaaagttggccaggcctggtggcgggcacctgtaatctcagctacttgggaggctgaggcaggagaatcgcttgagcccgggaggcggaggttgcagtgagccaagatcgtgctattgtactccagcctgggcaacaagagcgagactctgtctcaagatt

SEQ ID NO: 24092 - DNA, 4547 bp, Homo Sapiens
ggattgagcgggctcgcggcgctgggttcctggtctccgggccagggcaatgttccgcacggcagtgatgatggcggccagcctggcgctgaccggggctgtggtggctcacgcctactacctcaaacaccagttctaccccactgtggtgtacctgaccaagtccagccccagcatggcagtcctgtacatccaggcctttgtccttgtcttccttctgggcaaggtgatgggcaaggtgttctttgggcaactgagggcagcagagatggagcaccttctggaacgttcctggtacgccgtcacagagacttgtctggccttcaccgtttttcgggatgacttcagcccccgctttgttgcactcttcactcttcttctcttcctcaaatgtttccactggctggctgaggaccgtgtggactttatggaacgcagcctcaacatctcctggctctttcactgccgcattgtctgtgagtgagattcaggggaggggaagggaggactggaacgtgaaccgtggacctgtactccagagcacaggctaccccccacagctgtacaggaaagataatttaggaagttaatttgcatagtctctgtgctgttccactctagggcttctcaactgcctgggccctcagccctttgccttctcacctgcagcctgggcagccccaacaactccccctcccccaggaagttcccagagggccaggttcagtggagtgtgcccacctgactagatcgctggggccatggtgggcttgagggtggggctgtcctagagcattaaacagctgttgggccctgggctgacccccccaccctgcatgtgtgggggtccccacagctcttatgttcctcctgggcatcctggacttcctcttcgtcagccacgcctatcacagcatcctgacccgtggggcctctgtgcagctggtgtttggctttgagtatgccatcctgatgacgatggtgctcaccatcttcatcaagtatgtgctgcactccgtggacctccagagtgagaacccctgggacaacaaggctgtgtacatgctctacacagagctgtttacaggcttcatcaaggttctgctgtacatggccttcatgaccatcatgatcaaggtgcacaccttcccactctttgccatccggcccatgtacctggccatgagacagttcaagaaagctgtgacagatgccatcatgtctcgccgagccatccgcaacatgaacaccctgtatccagatgccaccccagaggagctccaggcaatggacaatgtctgcatcatctgccgagaagagatggtgactggtgccaagagactgccctgcaaccacattttccataccagctgcctgcgctcctggttccagcggcagcagacctgccccacctgccgtatggatgtccttcgtgcatcgctgccagcgcagtcaccaccacccccggagcctgcggatcaggggccaccccctgccccccaccccccaccactcttgcctcagccccccaacttcccccagggcctcctgcctccttttcctccaggcatgttcccactgtggccccccatgggcccctttccacctgtcccgcctccccccagctcaggagaggctgtggctcctccatccaccagtgcaggtgagcctttgggtactgtgacagccagggggcggcagggatggaacactcactgacttcgttcctgctcttcagcagccctttctcggcccagtggagcagctacaaccacagctgctggcaccagtgctactgctgcttctgccacagcatctggcccaggctctggctctgccccagaggctggccctgcccctggtttccccttccctcctccctggatgggtatgcccctgcctccaccctttgccttccccccaatgcctgtgccccctgcgggctttgctgggctgaccccagaggagctacgagctctggagggccatgagcggcagcacctggaggcccggctgcagagcctgcgtaacatccacacactgctggacgccgccatgctgcagatcaaccagtacctcaccgtgctggcctccttggggtgtgtctgtacaggggaagcagagtgggtttggtgggtcaggagtggagctgccaagaggtccccagcagtggttcttggcctttgacacctgccaattcaggctgcctatctacaggcccaccaagggtctccaggagttcttggtaactcctggtgcctttatttcccactccagaaagcatgtctggatctaagtaggagtgatgtttattcgagagctgactttagatcttattcctttatatttttctaaagtcaaattattcagaatttgcagtgctttagttcatcacatgatattcttctgagatgtggtgacacttagattggcaattgctgcccccaaactgagggagcgaataataggaagtcacttggagccatcctggctcaagttcaagcgctggtcccatcactcatttttgacctctcattatttgaataaaggggtcttaattcatattcataagtgatgtgtactgccagatacacacctataatcagcactttggaaggctgaggcaggaggattgtttgagcctaggaatttgagggtgcagtgagctatgattgtgccactaaattccagctttggtgacagagccgagacgctgtcttttaaaaaagtgacatgtacataatgcctggcatctagcagtgacagcacaggcttggagaggaacttgagtccaaggctcgagcactgtggcttattgagtgagtcccctataaggtgcctgactccccagggtggagactgcagggtaagagtgaacaggtcaacagtccctgcctgcaagcaccttacagctaagggatagaatcatttggcccttgagtccagtcaccctgtctgagttcattcagcatgttcacttgtgtttgccaggcactggggccacaagggcacatcattctatactctgttctgcaaggctcaccaagggcaggagaatctgcccaaccttggatgccaaggccaggcccgcctctcgtcccttctcttcccaggcccccccggcctgccacttcagtcaactccactgaggagactgccactacagttgttgctgctgcctcctccaccagcatccctagctcagaggccacgaccccaaccccaggagcctccccaccagcccctgaaatggaaaggcctccaggtaggtgtgattggcctccagccgggggagcagggaacttctctaggttccacttccagtctctctgtccccagctcctgagtcagtgggcacagaggagatgcctgaggatggagagcccgatgcagcagagctccgccggcgccgcctgcagaagctggagtctcctgttgcccactgacactgccccagcccagccccagcctctgctcttttgagcagccctcgctggaacatgtcctgccaccaagtgccagctccctctctgtctgcaccagggagtagtacccccagctctgagaaagaggcggcatcccctaggccaagtggaaagaggctggggttcccatttgactccagtcccaggcagccatggggatctcgggtcagttccagccttcctctccaactcttcagccctgtgttctgctggggccatgaaggcagaaggtttagcctctgagaagccctcttcttcccccacccctttccaggagaaggggctgcccctccaagccctacttgtatgtgcggagtcacactgcagtgccgaacagtattagctcccgttcccaagtgtggactccagaggggctggaggcaagctatgaacttgctcgctggcccacccctaagactggtacccatttccttttcttaccctgatctccccagaagcctcttgtggtggtggctgtgccccctatgccctgtggcatttctgcgtcttactggcaaccacacaactcagggaaaggaatgcctgggagtgggggtgcaggcgggcagcactgagggaccctgccccgcccctccccccaggcccctttcctctgcagcttctcaagtgagactgacctgtctcacccagcagccactgcccagccgcactccaggcaagggccagtgcgcctgctcctgaccactgcaatcccagcgcccaaggaaggccacttctcaactggcagaacttctgaagtttagaattggaattacttccttactagtgtcttttggcttaaattttgtcttttgaagttgaatgcttaatcccgggaaagaggaacaggagtgccagactcctggtctttccagtttagaaaaggctctgtgccaaggagggaccacaggagctgggacctgcctgcccctgtcttttccccttggttttgtgttacaagagttgttggagacagtttcagatgattatttaatttgtaaatattgtacaaattttaatagcttaaattgtatatacagccaaataaaaacttgcattaac

SEQ ID NO: 24093 - DNA, 4617 bp, Homo Sapiens
atggaatcaccttcaaaatgccacaggaggctcgtggtgcagagagcattatgttaaacctggcaggacagctcatcatgatgcagagggacaggtcaggcccacagatccgggagaaggacagtaaccctaataaccaaaggaaacttctgccattctgtcctcctgttgtactagcccagtctgttgaaaatgtctggacaacgtgtcgagcaaataaacagaaacgtcaccttctggaggccctctggctgagctgtggtggtgcagggatgaaagtttggctccctctcttccctagggatcaccgcaagccccattccttcttgtcccagcggatcatgctgcctttccacatcaacatttacccgctagctgttctgtttgaagatgctttagtccttggtgctgtcaatgacactttgctctatgattctttatatactcggaacaatgctagagaacagctggaggtgctcttccctttctgtgttgtggagagaacctctcagatctacctccaccacattctacgtcaacttctggtcagaaaccttggggagcaagccttgctcttggcccagtcctgtgccacattaccttacttccctcatgtgctggagctcatgctccatgaagtactggaagaagaagctacctcacgggagcccattcccgaccctctgcttcccactgtggcaaaatttatcactgagttccccctcttcctgcagacagttgtccattgtgccaggaagaccgaatatgccctgtggaattacctttttgcagctgttggaaaccctaaggacttgtttgaggagtgtttgatggctcaggatttggacacagctgcctcttaccttattatcttacagaatatggaagtccctgcagtaagtaggcaacatgctacccttctattcaacacagcactagaacaaggcaagtgggacctttgtcgacacatgattcgatttcttaaagccattggctctggagaatctgagacacctccatccacacccacagctcaggaacccagttcaagtggtggatttgagttcttcaggaatcgaagcatcagtttatcccagtcagctgaaaatgttcctgccagtaaattcagtttacagaaaacactaagtatgccatctggtccctctggaaaaagatggagcaaagacagtgactgtgctgagaacatgtatattgacatgatgctctggagacatgctcggcgcctcttagaagatgtgaggttaaaggaccttggctgctttgcagcccagctgggctttgaactaattagttggctatgcaaggaacgtacccgagccgcccgggtagacaactttgtaatagccctgaagagactccacaaagatttcctgtggccacttccaatcatcccagcctcttctatcagttctcctttcaaaaatggaaaataccgaactgtgggagagcagctgttaaagtctcaatcagctgacccatttttgaaccttgagatggatgctggcatctccaacatccagcgaagtcagagctggctcagcaacattggccccacccatcatgagatagacacagcttcatcccatggaccacaaatgcaagatgccttcttgtcacctttatctaataaaggtgatgaatgcagtattggttcagccacagacttgactgaaagtagctccatggtggatggcgactggacaatggtggatgaaaatttctctacactcagtttaactcagtcagagctggagcacatttccatggagttggccagtaaagggcctcataaatcccaggtccagcttcggtatttgctacacattttcatggaggcagggtgcctagactggtgcatcgttataggcctgattcttagagaatcctcaataatcaatcagattttggttattacacagtcttcagaggtagatggagagatgttacagaacataaagacagggctccatgcagtggaccgatgggcctctacagactgtcctggatataagccatttttaaacatcattaagccacaactgcagaagctcagtgagataacagaagagcaggtccagccagatgccttccaaccaataactatgggtaagactccagaacagactagcccccgggcagaggagagcaggggctcctccagccatggaagcatcccccagggtgaagttggaagcagcaatatggtcagccggaaagaggaggacacagcccaagcagaggaggaagaaccttttcaggatgggacttacgactgttctgtgtcctaacagtgaggttccatcacaaaggggcagtattaattagcagcagcgtgcagctcagtacgttgtaacatagttggatgatttaacaggagaactcagttcagagactcttcggtaagtattagtagattttaactaattctttcttgtctaagaaatctttttgactccataaaaatgtgatataaagcatctttcataaaaaaattttaagctgcagtgaaaagtaaatattgtacagatgtacatgagaatattttggttttactcaaaggttggtagctcttaaaccacaggaattgttttgccccaggtgagcttactttttcactacttacatcttctcacatttcccggttctgcattatgtccagattgctttttaaaaaataaatgctaaggtgcttgctatagtctgtcaggtacttgagctacctgtttgctcccttggatacagctggactctttaatcagtcctcctgaatagattgctaccctggggcacaatatgtgccagtgtgatggaaacattctccttggctttactagccagtcaaatcccagtccagaattgatggaagctatttacctgtgagttaatgtgcttgttttagcaagcttgattcccattagaccaatgtgggcagaggtctgagggggttcttctcaattttgctgttagataccactaaactattttgtattaaagaacagtatctttttgtgaatactcttgtgtaaatatattcaaaggcactgttcatattttagggcttgtattataatttgcaaggttttaatgctggattctgcatgtctacacatacaaagacagggcttgctcctctgcaaaactgaggaagacaggtttattggcttggtcatgaagtaacagaaatggtcacactgatcatgaaatgcagcaagttttgtgcaaattaacatagtctcttatttattgcttttgtaaattgaatacagatggacttctatgtaaatagactgctgaatcctgtattaccacggctactaaaaattagtgtgtaaagaatgcattcttcattgtaaacttaaagtattttatgtacttctagaaatgacttaaatttgttttcatacattatgaaaacaactgcatactccttaattgctttaaacacccatccactgtatgtaattctaattaccttataacagtattaagacagcttgtttgtactgtgcaatttgaacaaggaatgcaatgttattttttacaaaaaacaaacttgtttatttttataataacgatgtatttgatgtggaccaaattcgtaccactatctaaaatagcctcttttctcatagtgcagttgtagtttagaaacaaaacttggtcctctctccttgctttttaaagtaaatggctagatttagttgtcttagccaggtttcctttgaagagaaactcaaaaccattttgaaactgcttagttcagaatacatcgaagtatttaaaattactgagttgggtaatttactatcatttactttttacattacaagtgcaataatatttcacaaaatgaaactcccgaatgggtggagtatgtgattattggtacctggtccttctggtgctatttttatttaagtctttgtttcaaaccacctttccctgaatcttaaagataatgttttgcatgtgagtacatgcagcccagcaagaaactaaactgaactctcttctcctatcctagtccattaaggagaagaaccagcattgcttttgtgtttggtgtgaatattcagtcaataaaaatgatttaccattataaagagctgtgatcttttcaagtatctgaaataaaacactgtgctgctgagttcatctcaaacattcttgaaagcagggcaccagtataagttaactgtattcctgtgggttaggccgtgaatgaatcatttcttttatacaatattcttttacaactaatagagataggaggcccccaggcaagaagtttggcaggtttacagaaaatttggtaatttatttgttatataccttaatttttaaaaacccatttttattgtggtgtttggttcacatatcaactgtttaagccataattttagccaatgaatttaaatattcagtataactatttgaggtttactagatgcatttattaataaattatttgctgaaaccaaaacaagtcattgggggtgtgggaataaaatcaacctttgcttgtaattaaagttgctgctatttctgtaatgtgtatttttctccccttggtaaagggcaataaaaccattacac

SEQ ID NO: 24094 - DNA, 4235 bp, Homo Sapiens
accccacctgagctcagccatcctggggtggcaccctacccatacccggccaagtgtttggggagaaaagggctgttggttctaggatgtgccaagcatttgtgcagggcttgacctgaccctcggtctgcccccaggaagctccgtgtgcccagctggggcacagccccagctgatgccccagaggggccacccatcgcaagaggggctttgggctctgccctccctccccatggcgcatgggccaaagcctgagactgaaggactgttggacctcagcttcctgacagaggaggagcaggaggccattgctggcgtcctccaacgagatgcccgcctgcgccagctggaggaggggcgggtcagcaagctccgggcctcagtggcagaccctgggcagctgaagatcctgacaggggactggttccaggaagcacgctcccagcggcaccacaatgcccacttcggctctgaccttgtccgagcgtctatgcgcaggaagaagagcaccaggggagaccaggctccaggccacgacagggaggctgaggctgctgtgaaagagaaggaagaggggccagagcccaggctcaccattgatgaggccctcaggagaggctcagggagactgagggacctgatttcccatcgccttctgtccccctaaaggcttcagatcctgaggaggcgtcccaggcccaggaagatcctggccaaggagaccaacaggtctgtgccgaggaggctgacccggagctggagcccgcgtcggggggagagcaggagccgcggccccagccaagcccaggtaggcgggagtggcccgtggctgctctcaacatccggagcggactccgggcggggagcgctcctgcccagggctgcgagccgcccgcgacccagggcgctcggggcaggggtggggaaagaaggggcgccccgtcacttgccccctctgcagaccaaggccgcgtcccagatcctggagaatggggaggaggccccggggcccgacccctctctcgaccgcatgctcagcagcagctcctcggtgtccagccttaactcctccacggtgaggcgggagggaggggacccgggcggccggggggtggacccgttccgatgcgtagcccctgcctgcccctccctcgccgcgggacccaccgctgcagccccccagcctgccacctatgacccgggtctgaagcctccgcgctgcccgcggccccgacgtgagccctgcgagcggccctgactcccacccactcccgtccgcagctgagcggcagccagatgagcctgtcaggcgacgcggaggcggtgcaggtccgcggctccgtgcacttcgcgctgcactacgagccgggcgccgccgagctgcgcgtgcacgtgatccagtgccagggcctggccgccgcccggcgccgccgctcggacccgtgagtgccccgccggccaagcggggcgcggctgtcacagcccagcccaccattcacagggtctcggcctcctcgtcctcatcttcaaaatgggaacaacagcgttattgggaggcgtgcgattaagcgagacaatccctgtaaagcgcttagcacgaggcctggcacgtgttcgggatggtggctgggggagcccacaggcaggggagaaggctctgggagggcccctcctcacctcgggttctcacctccccagctacgtcaaaagctacctcctcccggataagcagagcaagcgcaaaacggcggtgaagaaacggaatctgaatccggttttcaacgagactctccgggtgaggctgtgaccacgatgcggttccccgttaatgaactggacgcccccttcctgcggggctaggtggcaagggcagccagtaacgtcattgcccggaggatcggcggagggggcccattaactcgttatccagtgttgtcagcctcgtggtgggcgtggtgatagtgcaggtccccattaatgcccttaggggctccccagaattccatcatggtaggaacgcggtaggacctgcctcagccaactcgcgcagcatctacgcgggccaccagcagtgctccactaaagctcacctcctgtcctcagtactccgtcccgcaggccgagcttcagggccgcgtgctgagcctgtctgtgtggcaccgcgaaagcctgggtcgcaacatctttctgggcgaagttgaagtgcccctggacacgtgggactggggctctgagcccacctggctccccctgcagccccgggtgaggcagccaggccgcgtggggagacctgcggcccgggtctcctgcatttaccccaccaggctctcccgcagccccctcacaccccgccttcgacagaacctcccctcaacctcttaacctcatggccccaggcgaagcccggccggccacggccccttccccgagggcgctaggaccctaggttctgcccctgcaggccccgccgtctcttgtagccgcaccccatccgggtctgcagaccccaccctcctgaggcccctttccattagcccctgctccacgataagcccgcctctcgcaggtcccaccctctcccgacgaccttccgagccgcgggttactcgccctgtccctcaagtacgtccccgccggctccgagggtgagtgacagccggagaggccaagctggacacgccctgaaaagcgggagactccagtccccgggtttgggggcggtggactccatccgtgtgcgggcctgagccgagcctctccgcaggcgcaggactgcccccgagcggggagctgcacttctgggtgaaggaggctcgggacctcctgccgctgcgggcaggatccctggacacttacgtacaatggtgaggagtgctggccctccgggcttcccattcttttgcctgcagtggagtgcccaacctccacaaacccttactaatcaacctttgatcacgcagcctgggctttcaccactgagcaggggtgaaggggacggtttgagcaaaggcctggagtcagggaagttgaggacacctttgaggagctgcatttcagcgtgactggcgcctataggacttgttgaaaagctgaggctgagggctgcaagggtccttccatagagaacctgggaggccaggctgtggggcttggctgggaacttatagttcagtgtaagcttctaggggacttctaggggtgcctccaggtgctgcccccactgttagagagtgaaatggaggtgggcgggtcacttctgggtgtccactctgatgcagccagaggctgcagtacagaggtactgtacttctgagcaacactgtattttgcagagggggttcccaggctttgaaaacctgggattacaggcgtgagcaacctcgcccggccaggagctgtaacttttaaagccaggagacctgagaggaggctggtgcaaaggtcccagggcagtgagggtctaaggccaggcaggcaggagccaggggacatggacatatgtgagggagaatgagtgggacgtggtgactggatgactctagggagtgtgaggggggtcacctgatgccaggccacctcccgcacagcttcgtgctgcctgatgacagccgggccagccgccagcgtacaagggttgtgcgacgcagcctcagccctgtgttcaatcacaccatggtgtacgatggctttgggcctgctgacctgcgccaggcttgtgccgagctctccctctgggaccatggggccctggccaaccgccagctgggaggcacacgcctcagcctgggcaccggtaagtgggacagcaccctgagacaggccctgggacaggccctgggagatgggggctcagtgtgtggccctggatacctctctgtcctttcctgagctttgatatctactgagaactgagggtggtaacgggggacagtgcataatctgggaccaggcaggtgtttgggggccccaaggtgtccagtgtgatcatgccctcaacccctgcccacccacatccaggcagcagctatgggctgcaggtgccctggatggattccacacctgaggagaagcagctgtggcaagccctcctggagcagccgtgcgagtgggtggatggccttctacccctcagaaccaacctggcccccaggacgtagccccaccaagcctctctctctggacccccatctcagggcctgcccttggctaaagtcaataaagtctattctaagagc

SEQ ID NO: 24095 - DNA, 4641 bp, Homo Sapiens
agcgcgctctgcggcgcggtccgctgtggaggcggcgcgaacggtcagggggcggccgatggctttgaggggccctgcgggcttggggcccggctctcgaaggccgttggacgaagcggtggcaggggccgagggccgcgaggcgccggcccttgtggcggcgggaggcgcgccagaggacgatgaagaggacgatggccgtggccggggcctgctgcgctgggacagcttctccgcctggctgcactgcgtgtgtgtggtgggcttcgacctggagctgggccaggccgtggaggtaatttatcctcagcattccaaacttactgacagagaaaaaaccaatatttgctatttgtcttttccagattcaaattcaggttgtcttggagatacccagttttgttttagatttcgacagtcttctgggaggagggtgtcgctgcattgtctcctggatcaatttgacaaagatttaccagtttacttaaagaaggatcctgcttatttttatggatatgtgtatttccgacaagttcgagataaaactctaaaaagaggctactttcagaagtccttggttttgatcagcaaactaccttatattcatttttttcacactgtgctcaaacagatagcaccagagtattttgaaaagaatgaaccttatttggaagcagcttgtaatgatgttgatcgatggcctgccccagtgccagggaaaacattacacctgccaatcatggcggtggtaatgaaggtacggattcccacatgtcatgacaagcctgggacaactcaaatagtgcagttaactcagcaggtggacacaaatatatctgttattttacctactgttcatgaggtggatattttcaggtgtttctgcccagttttccttcatagtcagatgctctgggagctggtgctgttgggggagccccttgtggttatggcgccatcaccatcggaatcatcagagactgtattggcacttgttaactgtatttctccattaaagtacttcagtgatttccgaccttatttcactattcatgatagtgaattcaaagaatatactacccgtacccaagctccgccctcagttatattaggagtaaccaaccctttttttgctaagacactccagcactggccacacattattcgaataggagaccttaaacctacaggtgaaattcctaagcaggttaaagtgaaaaaactgaagaatctaaagactctggattccaaacctggagtttatacttcatataagccatatttaaatagagatgaagagatcataaaacaattacagaagggtgtacaacagaaacgtccttctgaggctcaaagtgttattcttcgacgctattttttggaactgacacaaagtttcatcattccattagaaagatatgtggcaagcttgatgcctttgcagaaaagtatttccccatggaagagtccacctcaattaagacagtttcttccagaagaatttatgaaaacacttgagaaaacaggacctcagctaacctctagaataaaaggcgattggattggactttaccggcatttcctaaagtctccaaattttgatggctggtttaagacccggaggaaggaaatgacccaaaaattggaggcactccatctagaagctctttgtgaagaggacttacttctctggatccagaaacacacagaagtagaaacagtagaccttgtcttgaagctgaaaaataagctgttgcaggctgatcgagagcacttacctgtgaaacctgacactatggaaaagttacggacacacatagatgccattatcttagcattgccagaggacttgcaaggcatactgctcaaaacgggcatgacatgatatttgccaagattttccagccaaaaaggattatgcatcatgaagcatactgacatttcaaccagacgcacaaaggagatctctcagtggcagcggagtggaaaattgccatgaatgctagttagggtagaaagactgtattgtataaacagacctttttagtgcattactttttaaagtggatatctgtggtggttccactttaatactgaaacaccgaaaggcatttctatatttttaatcatgttctaaagtgctcttatgagagacttgtgggccatcagtattagtgatttcatactgcagtgctggcattgcagatatttttttaaattggtgctgctttgcccaatcatgttaaaactcagggggatataaaaataacattcacactggctatcttcttaagaacagaaagactgaactgtcctatggttagaaggaattgatgcttatgtagtgccttctgttgtcctacatgtttcacagttcagctgctagtcttgaagcttttccttagcttcattatgatacgtaattttataaggtattctgttgagtgatcattgtttaaaaaaaagtttcttgctacccattgtgtttattaatagacatgatgggtttttttcagttgtcatatagattttcattattttcccttccattttcaaaatttaatgttaccagtttctccaaagacaagaaggcatctagtattaatgatggaagagtttattttctcttaccctttactaatttaaacattaggctgggtgtggtggctcacgcctgtaatcctagcactttgggaggccgaggtggacgggtcacttaaggtcgagagtccgagaccagcctggccagcatggtgaagccccgtctctagtaaaagtacaaaaattggccaggcatggtggcacgcgcctgtaatcccagctacttgggaggctgagatgtgagaatcacttgaacctgggaggcggaggttgcagtgagctgagattgcacccctggactccagcttgggtgacacagtgagactgtgtctcaacaaaaataaaaaattaaataaatactaatttaaatattattaaatgtttaaactaatgaacttggctgcttttcaaagacattttaattataaatctcataatcagctatttttttaaactgaactattcttatttcaaaggcattcatgagttttttatgtgatacttatttgagtgatgataagattgatttctggcattatttgtttggtagcgttttatttttcccaacattaatgtttcttaaaacacttttcctactgttgtttgacatgggaactttcgcctgagtcactgtcatggttagcttttgttgttgttgtttttgtttctgttttgtttaaacaatactaccttgccaaaaatagaagaatgtgatttggtagagtagggttgtttggtttgtgtttgaataagagtatcctacagaagccactttttttttttttgagatggagttttgctcttgttgcccaggctggagtgcaatggcgcaatctcggctgactgcaacctccacctcccgggtgcaagtgattgtcctgcctcagcctcctgagtggctgggattgcaggtatgtgccaccacgcctggctagttttgtatttttggtggagatggggtttctccatgttggtcaggctggtctcggactcccgacctcaggtgatccgcccgcctcggcctcccaaggtgctgggattacaggtgtgagccaccgcacctggccagaagccactaactaaaataggcacacatgacacagcatgtggttaatagctgtgtcttgaattatcctctaaataaccaaatttagttgtatgtatttgtaaaggatatggcttcagaagctatcttttgttctctgtcgatataactcttaagggcattcctgacccaagaaagactccttgcgtttgtaactgtggtctaatacccaaatgtgccctgttcttatggatacagtctcttgaagcatacctcaaagtcatagagagaatatggcatttgaaagaaatcgtttgccttggatcatatgagttattttgtgaaacaacagctgacttttcagaaaaggagcaactacttttatatgctaaaagtatttcataactttctgggaaaccttatttaggtataaatggtcatcttattatttttcaaaaaggtatattttaataattgtacaatttatatacagtttgtgaccagaatttgtaagttgttggtgtcatatcaaggatcttttaaattatgccactacaggatgtatcatttcaagtctattttgcacagctaaacagtagcaaaagatgccaattagcatgataatggtgtcttcatttttactgtatttaactgaaacctaacacatgttgaaaaccatatcatacctagtttatctcttaatttcaaactatgtacttgtaaaaatgatgtaaatttgcactgggaacctgggaaagagtgactgataatttttggtgcgtgatttttagatttgtctttttttttttaagaagaatttgttactatgtaaaccctgacattaaatgttttatctctaccagcatcaggaggaatcactgctttaagggtattatgtaatgcctagtgccttctatttacagtgaaaaagaggttttgtgaaggcatttatggtcattaccaaaaactaaattaaaggccttggattttaaagc

SEQ ID NO: 24096 - DNA, 4512 bp, Homo Sapiens
atctgcttctgttttctccatcttagtttgcccaaagcttgctggccgctgtgtagggctggtgagtggctggggctgtctgagccatgaacaacttcagggccaccatcctcttctgggcagcggcagcatgggctaaatcaggcaagccttcgggagagatggacgaagttggagttcaaaaatgcaagaatgccttgaaactacctgtcctggaagtcctacctggagggggctgggacaatctgcggaatgtggacatgggacgagttatggaattgacttactccaactgcaggacaacagaggatggacagtatatcatccctgatgaaatcttcaccattccccagaaacagagcaacctggagatgaactcagaaatcctggaatcctgggcaaattaccagagtagcacctcctactccatcaacacagaactctctcttttttccaaagtcaatggcaagttttccactgagttccagaggatgaagaccctccaagtgaaggaccaagctataactacccgagttcaggtaagaaacctcgtctacacagtcaaaatcaacccaactttagagctaagctcaggttttaggaaggaactccttgacatctctgaccgtctagagaacaaccagacgaggatggccacctacctggcagaactcctggtgctcaactatggcacccacgtcaccaccagtgtcgacgctggggctgctcttattcaggaggaccacctcagggcctccttcctccaagacagccagagcagtcgtagtgccgtgaccgcctctgctggacttgcctttcaaaacaccgtgaacttcaaatttgaggaaaactatacctcgcagaatgtcctcaccaagagctacctctcaaaccgaaccaactccagggtgcagagcattggaggggttcctttttacccaggcatcaccctccaggcctggcagcagggtatcaccaaccacctggtggccatcgaccgctctggcctgccgctgcatttcttcatcaaccccaacatgctacctgacttgccaggccccctggtgaagaaggtgtcaaagacagtggaaactgctgtgaagcgctattatacattcaacacctaccctggctgcacagatctcaattctcccaacttcaattttcaggccaacacggatgatggctcctgcgaggggaaaatgaccaacttctctttcggtggggtttatcaggaatgcactcagctctcagggaatagggatgtcctcctctgccaaaagttggagcagaagaatccactcactggtgatttctcctgcccctctggctactccccggtgcacctgttatcccagatccacgaggagggttacaaccacctggagtgtcatcgaaagtgcactctcctcgtcttctgcaagaccgtgtgtgaagatgtgttccaggtggcaaaagctgaatttagggctttttggtgtgtggccagcagccaagtacctgaaaactcaggactgctttttgggggcctcttcagcagcaagagcataaaccccatgacaaatgcacagtcatgcccagccggctactttccactgagactctttgaaaacctcaaggtatgtgtttctcaggactatgagttgggaagcaggtttgcggtcccctttggcgggttctttagctgcacagttgggaaccccctggtagatcctgctatatccagagatttaggggcaccgtctctgaaaaagtgccccgggggcttcagccagcacccagccctcatcagcgatggatgccaagtgtcctattgcgtcaaatccgggctcttcacaggagggtccctgccccctgccaggctcccacctttcacccggccacccctcatgagtcaggctgccaccaatactgtcatagtgaccaattctgagaatgcgagatcctggattaaagactcccagacccaccagtggaggctgggagaaccgatagagctgcggagggccatgaatgtcatccatggggatggtggtggtctgtcaggaggggctgcagctggggtcacagtgggggtcaccaccattctggctgttgttatcaccttggccatctacggcacccggaagttcaagaagaaagcatatcaggcaattgaggaaaggcagagtttggttccaggcactgcagcaactggagacaccacttaccaagagcaggggcagagtccagcttaaatctctccccgaaaatggtttctctcatctccagtgtggtcattgctgaccactctgttttcctaagcattgaaatggcaagtgcaaccaaaagtaggtatattcgtgacttcttgtttaggtctctgggccaggaattcatactgttacatggataaggttgggattggggagagggaacagttgggactagaagcaaaagtgattctgggactaaaataggaagcagatgtcctttcccaatgtgtgttgctgtcttcacctgaatgcatttgtgtaaaaatagcggagggacaatgtgaacatttgtatttggaagctatgaatttactctgaagtttgcagttgtttccaatttgtgagctctaagagtttctgcctgtaagaactactctccttttattttgatttttaaaaaactgtctgaatttcacactcttagagcctggaagagccctgaaaagacacaagtcttgcctggctactgctttttaactttgagggctctatgttgacagactgttatctcctctgggtgacctcaaacatctgaaaagaaagatgttgcctgtgccaattccactttttccagctgccccttgatgaacactcccttataccagaccactcttggacttctgactggtgtcatcaagtcctcagaaaatattttaagttattttaagttattaaggaagggatgatttggagacaaggagtaatgaaagatgggtaaaaactggaaaagattctggtgctaagtactaccccttcatcttccatggatggtcattacctttcctgtcctcctgttctatgaacacacacacacacacaccccccccacatttcaataagtcttcattgttgtgggtccttacctttcctgtcctcctgttatatgaacacacacacacacacacacacacacacgcacacacataccacatttcaataagtcttcattgttctgggtccttacctttcctgtcctcctgttatatgaacacacacacacacacacacacacacacacgcacaccacatttcaatgtctgcatggttctgggggtaacaaaggcaagaagttaaagtaagaccacatttgagtattacttactctgtagaatcaaaacagagtagttaacaccaattatgcaaactacttttttttccagcagaaagggagctgacatgatcaaatccatgttttcaaatgaactgaaaaaggcatccagcaccacttataacacatttatttcagttccaggctgacagccctggggcatctagcaggatgcataattgtcatctggtgagagttgggactttgctcaattttaataccaatctctcctgattgtaattacctccactactttcatgatccccctacaatatttttttaaatgatatatttattcactgaatcaaatgtcattaatgagttatcttctgtggaggatgactgttctctttgttaatgttcacaatcaagatcttgggctgagaagaggcccttcacccaaggagtttgaagtatcacagcgtgtgggaaggtgggaaccaggatacccattcatttccaaccgagacacagagaagtgagtcacagaatttgagcccgctctcttgactgcccagccagagacactgatttctgtaacctcttcacttgatcctgcctcttaagcattaaaacattctcctaaacctctgagtgttttgtgggttctgggtgttttgtacattttagccaagctaaccacttgtctgcaagtactgactttcctatgaattctttgaagattattgagtcagaaaggaaaaatatagccccaaattcccaggcttttaatgcattacattaactgcctattgaaatgagaagttcttcacaaacttgtatacccactaacaagattgcacataaacatgcattaaagtatatactaagaaaccctctgtccaacggctcatgcatatgaagtccgaacatgggagtttgccaattgcattcatcaagtcgttttgcggagtcagatccctgatggaagagctcacaggctctgccttccaagtcctgggttcctaactggtgaccttagcctggggtctgtggggagaccaaccctggcttccaagaaaaccacattccatggactatcagaaatagacacagatttgggtgacaaagctggctctgtatttgcattttatttttgtgttcttgtcagtttgggaatgattaatattaaacatttatttgagaaac

SEQ ID NO: 24097 - DNA, 4315 bp, Homo Sapiens
ctgtcaggaactgactgcgtcatcgacttgcttctcggtgccctgctccacggctgctgctcccacctcacctacctcaacctggctcgcaacagctgctcccacaggggtctctccacaggaagggtcgagaggccccgccggccttcaagcagttcttcagcagcgcctacacactgagccacgtcaatctgtcggccacaaagctgcccctggaggccctcagggcgctgcttcagggcctctccctcaacagtcacctcagtgacctgcacctggatctcagcagctgcgagctccgttcagcgggagcccaagccttgcaggagcagctgggagctgtcacctgtgtaggcagcctggatctgtcagacaatgggttcgactcggacctcctgacactggtgcctgcacttggcaagaacaagtccctcaagcacctgtttttgggcaagaacttcaatgtcaaggccaagaccctggaggagatcctccacaagctggtgcagctgatccaggaagaggactgttccctgcagtcactgtcggtggcagactcccggctgaagcttcgcaccagcatcctcatcaatgccctgggcagcaacacctgcctggccaaggtggatctgagcggcaatggcatggaggacatcggggccaagatgctgtctaaggccctgcagataaactcctccctcagaactatcctatgggatcggaacaatacatctgccctgggcttcctggacatcgcaagggccctggagagcaaccacacgctgcgcttcatgtccttccccgtgagcgacatctcccaagcctatcgcagcgcgcctgagcgcaccgaggacgtctggcagaagatccaatggtgcttagtgaggaacaaccactcccagacgtgcccccaggagcaggccttcaggttgcagcagggcctggtgaccagcagcgccgagcaaatgctgcagcggctgtgtggacgagtgcaggaggaggtgcgggccctgagactgtgccccctggagcctgtgcaggatgagctactctacgctcgggacctcatcaaagatgccaagaactcccgggcggtgagccctccacaggctacccttcccctgaagtctggagaacccaagaaggccgaccatgctaagccatgacagccctgccctgtgcatctgccttcctagcccagggaccccagagacctagcaagtcctggttctggcctgctaatcataaccccttccttctccagctgtttcccagcctctatgagctgggccacgtgctggccaatgatgggcctgtgcggcagaggctggaatcagtagcaagtgaggtgtccaaagctgtggacaaggagctgcaggcaagtcctggaggagggaggaatccatggtgggaacctagtgttgactgaggccctaagcccagagctaaagtcagagctgggagacttctggagggccaggaggacatgcagagttgagaccacccacgctcccactgtaccaaggcattgctgcaatatcaggcttggatttttttctgctagctttgatgttggtccctgaactctgacctccctgctctggatttggatccttggactgactgcccctgtctgtatggtagggtggaaggagcactgaccagaaagtggggaagccttagtgtccaaggctctgccactaacagttttgtgacttaggcaggtccctcagtctcagcaggaggggctggaatagataaagtctcttctgctgtggtgccagccctgatcctgtcccccttgggcctctggcctccctttcccccatactaggtgatcctggagtccatggtcagcctgacacaggagttatgccctgtggccatgcgggtggccgagggacacaacaagatgctgagcaatgtggcggagcgtgtcactgtgccccggaacttcatccgaggggcactgctggagcaagcaggacaggacattcagaacaagctggatgaagtgaagctctcagtcgtcacctacctaaccagctccatagtggatgagatcctgcaagagctctaccattcccacaagagcctggcccggcacctgacccagctaaggacgctgtcagatccaccagggtgcccaggccaagggcaggatctgtcctcccggggccgaggccggaaccatgaccatgaggagaccacagatgatgaacttgggaccaacattgacaccatggccatcaaaaagcagaaacgctgccgcaagattcggccggtgtctgccttcatcagcgggagccctcaggacatggaaagccaactggggaatctggggatcccccctggctggttctcaggacttgggggcagccagcccacagctagtggctcctgggaaggtctatctgagctgcccactcatggttacaaactaaggcatcaaacacaagggaggccccgcccccccaggaccacacctccaggacctggtcgacccagtatgccagcacctgggactcgtcaggagaatgggatggccacccgcctggatgaagggctggaggacttcttcagccgaagggtcctggaggaaagttctagctacccccggactctgaggaccgtgcggccaggactctcggaggcaccgctgcctccactccagaagaagaggcgccggggcctgtttcactttcgccggccccggagcttcaagggggacagggggccggggtcccctaacaatgggactcctcctccctcccacccccaccccctcccccgactcaggagagcccccctagcccagaccccccaagcctcggcaataactcctctccctgctggagcccagaggaggagagcagcctcctccctggatttggtgggggccggggaccttccttccgccggaagatggtaagtgaggcagggggtgctgtgtcttccccttttcctgccccacacttaacccagtctcctaccccaccccaagcttaatgggagaatgctaggacccagggttcttgggaacattggtcatttcaattctcctctccttgagagtggactaagacccagtggccaagagcatgctgggagtgctatatgcgaatgcaggcgttggaaggactcttcagagggtctctgcagggcttccccgtggctagggactcagtgaggcaggggtcctcctgacaactccctcacagcctggagagcccccttcgactgggaactgctaataaataagagaccttgttctagggcactgaggggtcagagccaggggaggggggcccagcccctgggacagcacagcagccaagggttcacggtgttgcccttcccgtgttggaaagagccaagggttggagcttcgatgggaaacgagagggcccaggcccagaccaggagggcagcacccaggcctggcagaaacggcgctcttcagacgacgcagggcctggatcctggaagcccccaccaccgccccaaagcaccaaaccaagcttcagcgccatgcgcagagcagaggccacatggcacatagctgaagagagtgcccccaaccacagctgccagagtcccagcccagcctcccaagatggggaagaggagaaggaggggaccctcttcccagagaggacacttccagctaggaatgccaaggaccccgctctagctccatggcctcccaagccagtggctgtgcccaggggccgccagcctccccaggagccaggggtcagggaggaggctgaggctggagatgcagctccaggagtcaacaaaccccggctgaggctgagctcacagcaagaccaagaggagcccgaagtccaagggccccctgatccaggccggcggactgcccccctgaagcccaagaggacacggcgggcacagtcctgtgacaagctggaacctgatagaagacggcctcctgaccccacaggaaccagtgagccaggaacagactgacaactgccacaacaccctcctcagccctcgacatgtgcctcgcaaggactcagacccctatccacccccagtccccagggccccctgccagcccctgtcctacaggggcaagacggcaggaccaggcatgggggagctggaggcagggactagaacagagggagccacctggagagacggaggctgtcagtgcctgcctcgatacctctctctgcagagagcttctgggtgggggcttatctcctcccccaggagggtggatctctgtccctctatccccagggactctctcccctcttgtatagaataaaaaaacaaaatc

SEQ ID NO: 24098 - DNA, 4403 bp, Homo Sapiens
gtttgatatctacactcagtattgcaacaattaccccaactccgtggccgccctgacggaatgcatgcgggacaagcagcaggccaagttctttcgggaccggcaggagctgctacagcactcgctgcccttgggctcctacctgctgaagccagtccagcgcatcctcaagtaccacctgctgctccaggaaattgccaagcattttgatgaagaagaggatggctttgaggtggtggaggatgccattgacaccatgacctgtgtggcctggtacatcaacgacatgaagaggaggcatgagcacgcggtccggctccaggagattcagtcactcctcatcaactggaaggggcccgacctgaccacctacggggagcttgtcctggagggcacattccgcgtgcatcgcgtgcgcaatgaaaggacctttttcctctttgacaaaacactgcttatcaccaagaagcggggcgatcactttgtctacaagggcaacatcccggtaaccaggccctgccccatctcctctgccatcttctctccttcccaaaggatctgggctccccttcttgtctgcttcttggggctccagcaccacccttctgagatcaccctccctgcttccccaggctgtcaaccttgtgcttgactgtcctttccctctgcccctagtgctcctccctgatgctgatcgaaagcaccagagactccctgtgcttcactgtcacccactacaagcacagcaagcagcagtacagcatccaggccaagacagtggaggagaaacggaactggactcaccacatcaagaggctcatcctagagaaccaccatgccaccattccccagaaggccaaggaagccatcttggaaatggattcctattatcccaatcggtaccgctgcagcccagagcggctgaagaaggcttggtcctcccaggatgaggtgtccaccaatgtgcgccaggggcgccggcaatctgagccaaccaaacacctgctcaggcaactcaacgagaaaggtgagtgtgtgaggtggccagccattcccagtgagcgggggaggaggagggaggaggggaagcagccgacaacctggggtgtgacctgagggtggaggattgtcagaatagtgtagagggaactctgcctccattccccccagaagagggcctcgcccctggctggctgaggagaggggctggagctctcccccatgcacaggcctcatgccctttcctccggaaacaatgagagccgagcaacaggcacagacctgcgctgctctgtggcccctgggcccctgctctgtcagtcattcttttgaaagcccaggagactaggtgagggttctgggagcaggagcccccagtgaggacttccccagggagctgtccagaggtctttttcctgcttactgatctcttcccctcccctcccctgcccctcgcccgtgtgctgggggacccggtggtgatgtctgcagcccgagcagcaggaatgaagggaaaggggcgcagggagtctgaaagctccaggagcagcagaaggcccagtggccggtctccaaccagtactgagaagcgcatgagcttcgagtccatttcttccctgccagaggttgagccggaccctgaggctgggagtgagcaagaggtattttctgctgtggaagggcccagtgccgaggagacgccttcagacacagaatctccagaagtcctggagacacagcttgatgcccaccagggccttctggggatggaccccccaggtgacatggtggacttcgtggcagctgagagcactgaggaccttaaggccctgagcagcgaggaggaagaagaaatgggaggtgccgcccaggagcctgagagccttctgccaccctctgtgctggaccaggccagcgtcattgcggagcgatttgtcagcagcttctctcggcggagcagcgtggcacaggaggacagcaagtccagtggctttgggagcccgcggctggtcagccggagcagcagcgtgctcagcctggagggcagcgagaagggcctggcccggcatggcagtgccacagactccctcagctgtcagctctccccagaagtggacatcagtgtgggggtggccacagaggacagcccttctgtcaatgggatggagcccccaagcccaggctgcccagtggagcctgaccggtcttcctgcaagaagaaggaatcagcactctccacccgagaccggctgttgctagacaagattaagagctattatgaaaatgcagaacaccatgatgcaggcttcagcgtccgtcgccgggagagcctctcctacatccccaaaggactggtaagaaactccatctccaggttcaacagccttccccggccagacccagagccagtacctccagtggggagcaagagacaggtgggctcccggccgacttcgtgggccctgtttgagctcccaggaccaagccaggcagtcaaaggggacccacctcccatctcagatgctgagttccgcccatcttcagaaattgtgaagatctgggagggaatggagtcttccggagggagccctgggaaggggccaggccagggccaggccaatggctttgacctgcatgagccactcttcatcctggaggagcatgagctgggagccatcacagaggagtcggccactgcctccccggaaagctcctctcccactgaggggcgcagcccggcccacctggcccgggagctgaaagagctggtgaaggagctgagcagcagtacccagggggagctggtggccccactgcacccccgcatcgtgcagctctcccacgtaatggacagccacgtgagcgagcgcgtcaagaacaaggtctaccagctggcccgccagtacagcctccggatcaagagcaacaagccagtgatggccaggccaccactgcagtgggaaaaggtggcccctgagagggatgggaagagccccactgtgccctgtctacaggaagaggctggagagccattaggtggcaaaggtaagaggaagccggtgctgtctctatttgactatgagcagctgatggcccaggagcacagccctcccaagccctcctcggctggggagatgtcaccacagcgtttcttcttcaacccgtctgctgtcagccagaggaccacctcgcctgggggccggccctccgcccggagccccctcagccccacagagaccttcagctggcccgacgtccgtgagctctgctccaagtatgcctcccgcgatgaggcacgccgagcagggggcggccggccccgcggcccacccgtcaacaggagccactcggtgccggagaacatggtagagccacctctgtcgggcagggtgggccgctgccgcagcctgagcaccaagaggggccggggaggcggagaggctgcccaatcccctgggcctctgccccagagcaagccggatggaggcgagaccctgtatgtcactgcagacctcaccctggaggacaaccggcgggtgattgtcatggagaagggaccccttcccagccccactgcagggctggaggagagcagtggccagggaccaagctcaccggtggccctgctggggcaggttcaggacttccagcagtctgcagagtgccagccgaaggaagagggttccagggacccggcagacccgagccagcagggcagagtgagaaaccttagagagaagttccaggccttgaactctgtcggttgatgctgactcctgggggagggaggagtcatgttggaggttggggaagaacctgggcatccttcccctcaagcctgggctcatggagcccctgcccagggccctcaggtgggcggaaagtccatcccctccgcccttcaggaaggatgctcccgtgtgcaggggtctcctgcctgtgccatccactggggctcgagacaatttcccactcacctgtgaggccggtgtggctgcttcccttgtaaatagttgttctctggtaagaagccaaatatttaagctcacttattcccagagagaggaagctctgctcaggcctccagcgttggctggccatggccacagccagatggaggagcccatccccaggagactcaggcagtggcctggagaggctttgttctgtaacggtgccttttcttagggtccaggcaggaatgaagccaataatttattgctttccattctgtggtatgatgtgcgtgtgcgtgagtgtgtggcccctgtttattcccctcctgtcaagaatgaagtggattcagttcaggtacttttgagggttgttgtgctgaccctgtggttgtcgctgatgtacacacatttcattatttgccaatggtgcaataaccactgctgacc

SEQ ID NO: 24099 - DNA, 4443 bp, Homo Sapiens
gtctcaggaaggctatggaactagatctcaacctcctctggcccccggaaaacctaaccatgaagacttgaacttaatacagcaagaaagaccatcaagtttaccagttgaagtcttggcctcggaggatgcagcctttggactcaaggatctgtctggctccattgatgacctccccacgggaacggaagcaactttgagctcagcagtcagtgcatccgggtccacgagcagccaaggggatcagagcaacccggcgcagtcgcctttctccccacatgcgtcccctcatctctccagcatcccggggggcccatctccctctcctgttggctctcctgtaggaagcaaccagtctcgatctggcccaatctctcctgcaagtatcccaggtagtcagatgcctccgcagccacccgggagccagtcagaatccagttcccatcccgccttgagccagtcaccaatgccacaggaaagaggttttatggcaggcacacaaagaaaccctcagatggctcagtatggacctcaacagacaggaccatccatgtcgcctcatccttctcctgggggccagatgcatgctggaatcagtagctttcagcagagtaactcaagtgggacttacggtccacagatgagccagtatggaccacaaggtaactactccagacccccagcgtatagtggggtgcccagtgcaagctacagcggcccagggcccggtatgggtatcagtgccaacaaccagatgcatggacaagggccaagccagccatgtggtgctgtgcccctgggacgaatgccatcagctgggatgcagaacagaccatttcctggaaatatgagcagcatgacccccagttctcctggcatgtctcagcagggagggccaggaatggggccgccaatgccaactgtgaaccgtaaggcacaggaggcagccgcagcagtgatgcaggctgctgcgaactcagcacaaagcaggtacgccacccaggagcacgccccgggcaggtacgctgtgtgtctacccgtgaccacgtgactgcgcacatagctgcattgttccctggggtcacacagagcagtagaatgtcactgtgcttggccgttctttttgtgttaaatatattctgtagcatcgaggtcagagaactaagtgacaaaccatgttttatgatacatgaggaaggaatgtgagcggtgagcacatcagtcgtgggaggtgatttgaaatgcctgtgaatagtcattgcagcagcaaaccagatctggttgcacagggaagtgtctgcgtggtaccaattgaagcagtgacttttaagcaggaaatacgcttaggaacaatttaaaatctaaaacattcaaaaggaacacactccccacctttttttcaccctaccacaagaatcttcctaaaatacaaacttcgtatgtatacatacgtgtattgtgtgtttgtctaaatgtatatgtgtgagatttatatacttgacattcttatgttatattttatttttccaggcatatctatctgtccaaaccaaaatgtggtttaaaaagcaaatataatattttagaaagtttgagttgataaaaggctttagctacaattacttactcatttttaatcccgacttaaaaattaattttgaagtaaatacttgacctggataaaaataacataattaaaaatttataaggcaaaggtgaatatgttttaaaagcacatgtaaatatgttttaaagcaacgtactttgaaagatgtgtatcttaatgatatcttcagaagcaaagtagaagattccgatttttgtcaaagggaagcaaaagctaaggtgtgtgtgcgtgtgtgcatgtgtgtgcgtgtgtttttaaatgtgtcttttgttacttttcctctgaagctgctatctggggaatgtgggacccctccagtcttattgttttttccaaataataataaatttcccttgaggaaataaaatgaaaatcaatcattatctttctttctgtctccacattacaattacttaaaatcttctgaactccagcagtctagccctctgccgaacctacacaggctttagggaatatttttgtaaacctgtctgtgaaaactggtttggctgttgaaattgaagttctaattcaagtttaaatgaattgtccattgttgcaactcataaagcgcaagttattttctttttttaagtagaaagtatttgattgcatttggcacgcagcctttggagggacctcagaagatagccacagagagccaggcctgattttgtgtggttacaaagctacgcgtgccccctctctgagtcagtgtttatgtcatcctgtagcaatcaatatataaatacacatccatgcattgccattttccgtttctaatgcgtagaccattccaaagccttgccttcaacttactgcccattttagctcaccaggagtttaaatgggggctgtatatcttcttgtttgcttttaccaaagtcaaagctatactttaaaatggtaaatggagattagaattgagaatattacttttctctgcctgtccccaccctttcgttggaggcattttctgtaccccccacccctcaggcagcggcaggatgcagggtattcaacttgcctccatggtctgtaagccccgcacctatgtgtgggggtgacagatatacagggctcatgcttgtgcatcagaacaaatcccaagaagctgttcttctgttccactttaggccaccatacattaggtcgcctgcttatcccagccagtctggggctggcggacgccccatgttttcttcccagcaccccaactatggcaactctcaggctcccatggtgcaccagcctgaccagtacgggtaggtagcaacacaccccgacttcctgcgggacctgggcgttttctctgaaactgttaacgatcgtgccgtctggccgcgaaaggaacacccaaaccaagaaagcgaaacacctaacagaaaatccatctccaagggggttgtccttctgtccatttttgttggtgtgtttgtttcgttttcctttcgtattaacagtactgtggccgttcggtggaaacccgcatgcgtcctcaggccctgtctgtgcatggctttcggcatggctgctttccttcatgcctgagagggaaatagaaactttgatctgtgtcgaagacatgatgtcaccacctctggcgtcatttcccccattgttgtcgttgttttgtctaggaacctgtgttgtgcagcgctgttctcatgactatattatcactcctgctgctacagtgagcggctgccatacccacccccaaattaagagcacagcatctcatttgacaagagactcactgcagttgagctgacaggctattcataggacttaggaggagtttcattatatcaccaccaagcaaatgtctgtgccaaaaacttctattattttttctccagcgagtatcagaatattgaagtcaccaggaaaatacaacaaaataatccaacagataattttctgtctaaacacagtgttgccatattattctcaatttcaacacaggaattacatacagcaacaaaaagtatctcttctttcctactacaaaactgtgtaatatcaggttctgtcaccatgtttaggttagtaaatgctcttaaagtctattactattgagtgaattgctaaaaaaaataattattgctatcatcctgggcagacttaatcatgtttggtagttagttttagtagagacatgccccatctttggttaaaatcaaacagggaactatcacctagctttgtttaaacagtaaacttatagaactatgctttcactactggttatgaatgcctgacagagctttttagtagttttatattcagtttacatttatttagacagaacaaatgataattttggaatcgagagttctaaagtctgtaaacatggccctaaatgtggaccaacaaatatagaatcctgtaaacatcatccccaaagtgaaataacaaatatagaatgaggtaaacatggttattcttgggaaattggcttttcctctttcttactttcttgtggtaccttcaaggtcaattcatgagtcagtaggaagataacagtcggaggaagcaagcattcatcatctgcagctaatccataggatctgtccttttaccaactccagaggcctctttagacccacaaagctagtttgactgtgccttgccaaaccacattaagcagctgtgtaaaatgaatttaaatggcatgcatcagagtgaaatctcttccactggggcagaaaatcgatgttagctaaccagcacgaggagatcaaatctgtatttcagccagcagcatccagatagcttccttagagtacaacacctcctccttaattaaaaat

SEQ ID NO: 24100 - DNA, 4862 bp, Homo Sapiens
gtgcagtggcacgatcttggttcaccacaatctcgtctcgaaggctcaggtgattctctcacctcagccgcctgagtagctgggaccacagtttcagctgtgagttcaacatggaggcaaatcagtgccccctggttgtggaaccatcttacccagacctggtcatcaatgtaggagaagtgactcttggagaagaaaacagaaaaaagctgcagaaaattcagagagaccaagagaaggagagagttatgcgggctgcatgtgctttattaaactcaggaggaggagtgattcgaatggccaagaaggttgagcatcccgtggagatgggactggatttagaacagtctttgagagagcttattcagtcttcagatctgcaggctttctttgagaccaagcaacaaggaaggtgtttttacatttttgttaaatcttggagcagtggccctttccctgaagatcgctctttcaagccccgcctttgcagcctcagttcttcattatacctgtagatctgagacctctgtgcgttccatggactcaagagaggcattctgtttcctgaagaccaaaaggaagccaaaaatcttggaagaaggaccttttcacaaaattcacaagggtgtataccaagagctccctaactcggatcctgctgacccaaactcggatcctgctgacctaattttccaaaaagactatcttgaatatggtgaaatcctgccttttcctgagtctcagttagtagagtttaaacagttctctacaaaacacttccaagaatatgtaaaaaggacaattccagaatacgtccctgcatttgcaaacactggaggaggctatctttttattggagtggatgataagagtagggaagtcctgggatgtgcaaaagaaaatgttgaccctgactctttgagaaggaaaatagaacaagccatatacaaactaccttgtgttcatttttgccaaccccaacgcccgataaccttcacactcaaaattgtggatgtgttaaaaaggggagagctctatggctatgcttgcatgatcagagtaaatcccttctgctgtgcagtgttctcagaagctcccaattcatggatagtggaggacaagtacgtctgcagcctgacaaccgagaaatgggtaggcatgatgacagacacagatccagatcttctacagttgtctgaagattttgaatgtcagctgagtctatctagtgggcctccccttagcagaccagtgtactccaagaaaggcctggaacataaaaaggaactccagcaacttttattttcagtcccaccaggatatttgcgatatactccagagtcactctggagggacctgatctcagagcacagaggactagaggagttaataaataagcaaatgcaacctttctttcggggaattttgatcttctctagaagttgggctgtggacctgaacttgcaggagaagccaggagtcatctgtgatgctctgctgatagcacagaacagcacccccattctctacaccattctcagggagcaggatgcagagggccaggactactgcactcgcactgcctttactttgaagcagaagctagtgaacatggggggctacaccgggaaggtgtgtgtcagggccaaggtcctctgcctgagtcctgagagcagcgcagaggccttggaggctgcagtgtctccgatggattaccctgcgtcctatagccttgcaggcacccagcacatggaagccctgctgcagtccctcgtgattgtcttactcggcttcaggtctctcttgagtgaccagctcggctgtgaggttttaaatctgctcacagcccagcagtatgagatattctccagaagcctccgcaagaacagagagttgtttgtccacggcttacctggctcagggaagaccatcatggccatgaagatcatggagaagatcaggaatgtgtttcactgtgaggcacacagaattctctacgtttgtgaaaaccagcctctgaggaactttatcagtgatagaaatatctgccgagcagagacccggaaaactttcctaagagaaaactttgaacacattcaacacatcgtcattgacgaagctcagaatttccgtactgaagatggggactggtatgggaaggcaaaaagcatcactcggagagcaaagggtggcccaggaattctctggatctttctggattactttcagaccagccacttggattgcagtggcctccctcctctctcagaccaatatccaagagaagagctcaccagaatagttcgcaatgcagatccaatagccaagtacttacaaaaagaaatgcaagtaattagaagtaatccttcatttaacatccccactgggtgcctcgaggtatttcctgaagccgaatggtcccagggtgttcagggaaccttacgaattaagaaatacttgactgtggagcaaataatgacctgtgtggcagacacgtgcaggcgcttctttgataggggctattctccaaaggatgttgctgtgcttgtcagcaccgcaaaagaagtggagcactataagtatgagctcttgaaagcaatgaggaagaaaagggtggtgcagctcagtgatgcatgtgatatgttgggtgatcacattgtgttggacagtgttcggcgattctcaggcctggaaaggagcatagtgtttgggatccatccaaggacagctgacccagctatcttacccaatgttctgatctgtctggcttccagggcaaaacaacacctgtatatttttccgtggggtggccattaggaagaactccaaatcaaaatgctatgtaaatgtctatgggtgacagtctgctgatggtagaaacctttctttttagttcacaagtcagagatttggacggagctgacacaaagagtttggagctcccccatttctggctctcctttcaggggttccttccccaacccttttcagcagcggtggctgccccccattctgacccctgactcttccagccagaaagatggtggttttctaaaggaactttagctgtcctgcacaatgccgatctgtgtcttgcattttgggtaaaagccataaaaataagaaactcagcctgtggcctttctttcttccaaggctgggcttctttttttaagtgacttcatgcagtttgttgcttttaaaaatttgtccagaatcgttttctgcagaagcatggtctgttaggagcttactggccgtagcagaagcaattgtttcctgaattcttgacatttatctttgctgtattcatttagggcttgggagagtccgaagataattcagtcactgtcagattaataattctgtcaggacaaagaataccgttatgattatttaatcctttaaaattgtggtctccagagcttgttctcagaatggcccagaccaagccttaattgtgatagtgaatattaatggtcactttaaggagaaattataggccaagatgaaatgaacataaacctgtttgccctggctttcagtggaagatgatattagagaccaaaatctggttctgaaggtgtgtatcagccctaaggtgaaccagacttgggaaagattgtctttaaaaatcaatgagtttatgttttaacttctcagcttagttctatgcattgctctataacacacctagttaagttttatgttattcttgaactgtgattttttttctatttactttcatggtttggtgggccattgttatggactgaatgtttgtgtcccacccttcacccccaaattcccgtgttgaagccccaacctgcactgtggagctggggctgctaaggaagtaattaaggttacatgaagtcatggtggggctctgatctgctaaggttggtgtccttatagggagagaccccagagagcttgttccctccctccctgtgcatgcaaacaagagggcatgggagcacacagagagatggcagccacctacaagccaagaggagaagcctcacaatcaaactctcgctgctggcgagagtcttggactctgtcttggacttccagcctccagactgtgagaaacaaatttctgttgtttcagcttctcagtctctggtgttttgttattgcagcctgagaacacagctgtacgattatttgtcaaacagaaaacactgatacttaacaatgctaatgcaattatttatttgcttttcagtctctacaaaacgttctaaaacactaatctaaatattaacagtaaaatatttgcataactaatggaaactaagaaatcatatgaccaatatttcacttattggtaatcttactctactgatttccccccagactgtgatttttgaacttccttgcctttctcctgtctttctgtgtttattcatggaattccagttatctgggcttgaaattgcaggctctcctaacttaagcaaaatctgacagatcagcaaaatgagataaatgtttcttttttctttctgactgcattaaatcagatacaactcagcattaaaaagctatctttgtaaatgttgttactaataaattagtcttataagatccctggactttggagttgttgcaatgtctttgagagtaattctttaaaagtctaatttcgactggttgtatctctttatgatttattgccccactaacaacatttgaaacaatataatattttaaaatgtataaataattatgaatttttgtttagaacaaagaggattactgatatttgtttccctatgaatggcaaaaggtttagcttactactgcatttctgttttaaataaaaagttgagagtttgtgtctcattaaactg

SEQ ID NO: 24101 - DNA, 2360 bp, Homo Sapiens
cagatgcctaatgcagtacagaaactcctgttggtgatggacaagagagcctcaggaatgaatgactcattggagttgctgcagtgtaatgagaatttgccatcttcacctggatataactcctgtgatgaacacatggagcttgatgaccttcctgaacttcaggcagttcaaagtgatcctacccaatctggcatgtaccagctgagttcagatgtttcacatcaagaatacccaagatcatcttggaaccaaaatacctcagacataccagaaactacttaccgtgaaaatgaggtggactggctaacagaattggcaaatatcgcgaccagtccacaaagtccactgatgcagtgctcattttacaatagatcatctcctgtacacatcatagccactagcaaaagtttacattcctatgcacgccctccaccagtgtcctcttcttcgaagagtgaaccagccttccctcatcaccattggaaggaggaaacaccagtaagacacgaaagggcaaatagtgagtcagaatctggcattttctgcatgtcctccctgtcagatgatgatgatttgggatggtgcaattcctggccttcaactgtctggcactgttttttgaaaggcacacgactgtgctttcataagggaagcaataaggaatggcaagatgttgaagattttgctagagctgaaggctgtgataatgaggaagatcttcaaatgggcattcacaagggctatggttctgatggtctaaagttgttatcacatgaagaaagtgtatcatttggcgagtctgtactgaagttgacttttgatcctggtacagtagaagatggtttacttaccgtagagtgtaagctggaccaccctttctatgttaaaaataaaggttggtcatcattttatccaagcttgactgtggtacagcatggcattccatgttgtgaagttcatattggcgatgtatgtctacctcctggacaccccgatgccattaattttgatgattcaggtgtttttgatacatttaaaagctatgacttcacacctatggattcttctgcagtttatgtgttaagtagtatggctcgccagcgtcgtgcatctttgtcttgtggaggacctggtggtcaagactttgcaagatctggattcagtaaaaactgtggctcacctggatcatcacagctctcttccaattctttgtatgctaaagctgtcaaaaaccacagctcagggactgtgagtgccacttctcctaataaatgcaaaagaccaatgaatgccttcatgctttttgccaaaaaatacagagttgaatatactcagatgtatccagggaaagataacaggtaaaaatagtgataattctgattacaataaatgagtaacacttcaatacggttcatggtgactggaatagttaagtaaacttattctttaatagcttttattcaactcttaggttgacttttttgtttgtttttgagacggagtctcgctgtgtcacccaagctggagtccagtggtacgatctcagctcactgcaacctccgccttccaggttcaagtgattatcctgcctcagcctctcaagtagctgagactacaggcgcccaccaccatacctggctaattttttgtatttttagtagagacagggtttcaccatgttggccaggctgatctcgaactcctgacctcgtgatccacccaccttggcctcctaaagtgccgtgattacaggcgtgagccactgtgcccggccaggttgactttaaagtaaaaagtttaagtggaatttttagggttatatgtaattattttataatacatagacaattaggttatctaccttagtagtaaggatctaccttttattatttgtgccatagcccaggctgcagtacagcggcgcaactcactgtagcctgtatctcccaggctcaatcctcccacctcagcttcctgaatggctgggattacaggcacatgccaccacacccagttaatttttgtattttttgtagagatagggttgtgccatgttgcccaggctggtctcaaactcctgggttcaagccatctgcctgcctcccaaagtgcaagatctaccttttaaaatcatgttatttatctgttggaggacacggttctaacaattaacagttctatctttatggaacagcttttcacctgagtcaactatggattgtacggggaactggcaatttgtagcaagctgccagagttgtcaaaacggtgaacttaagagctgtcctcagtagaagctggaaataaaaatcaactcaagtccttcctaaaaaaaaaaaaaaaaaaaaaaaaaaaaa

SEQ ID NO: 24102 - DNA, 2357 bp, Homo Sapiens
cggggtgtctttgtgcccaccgttgcagatttccttaacctggcctggtggacctctgctgccgcctggtccctgttccagcagcttctctacggcctcatctaccacagctggttccaagcagaccccgcggaggccgaggggagccccgagacgcgcgagagcagctgcgtcatgaaacagacccagtactacttcggctcggtaaacgcctcctacaacgccatcatcgactgcggaaactgctccaggctgttccacgcgcagagactgaccaacaccaatcttctctttgtggtggccgagaagccgctgtgcagccagtgcgaggctggccggctgctgcagaaggagacgcactcggacggcccggagcagtgtgagctagtgcagagaccgcgataccggagaggcccgcacatctgcttcgactacaacgcgacagaagatacctcagactgtggccgcggggcctccttcccgccgtcgctgggcgtcctggtctccctgcaactgctgctcctcctgggcctgccgccccggccgcagcctcaagtcctcgtccacgcctctcgccgcctctgagcaccctgccccaccccacctccactcccacctcacccggcctcttcgcctttcccaccctcctgccccacactccccgccttagagcctcgtccctccctcactgaaggacctgagctggccaggccctgagagtctggtctgcgccttgggatggggagtcccaaagcgggacgccgcaggtgtttggcacccaaatcacatctcacctccgaactgttcaagtgtccccagacccttcttgcctgctgggctccccccagtgggatgggacagggaggccacacgcactggtgccaaaaccaggcctctgctgccgcccttcctggaggctgcctatgttgggggggaccctgcctcagctgacccggcctctctgccccacccaagcccaaacttggtttctgtgagaatagtggaggaaggtgagatggccagtttgaagcctgtgcctcccagcttaaatcctagcaggagagaggctctggggcagcccccatgggctcctgcccctttcaggcctacagccacatccccaagcccaccaggtgtcaggatagtcacagtgataccagttcagacactaccccatatacacctggaacattgaggatggaaactggactcacattcgacataccccactgggcacacgcacaaacacacacactatggggtggggtgggtgtaggggcttacaaagccttacacagggcgaggggttggtgggagggttggcacctgcacactccatctcctgctcaccacctgcctctaatctgagctgcagcctggctggtcctcccatttctaaagctgaatgtcaaacagtgccaaatgctggggcagggggtgaagaaccctctgtcccacccctagccaccagtgtcctccaagtgccccctcacctctccaggtgctcattgtaaccatttctcactagtgtcaggcccccagtgggaccacatgccactgcctgcacctttcggcagaggaacccccaccagacatcaccctttgccttagcaggggtgactttgtctctcctggctgggccatccttccgccaatctggcccttacacactcaggcctgtgcccactccctatctccttcccacccctacacacacactccctgcttgcaggaggccaaactgtccctcccttgctgaacacacacacacacacacacacacaggtggggactgggcagctcttcacaccattcattctggtcatttcccccaaaggcatcccagcctgggggccagtggggaactgagggcaaggggatatagtgatggggctcagatggactgggaggagggggagggtgatgcattaattaatggcttcgttaattaatgtcatgttgcttgtcgctttctcagtgtgtgtgtgtggtccatgcccactgctggtgccagggtgggtgtccatgtgcacccggcctggatgccagctgtgtccttcgggggcgtgcgtgtaactgtagtgtagtcaggtgctcaatggagaatataaacatatacagaaaaatatatattttaagtttaaaaaacagaaaaacagacaaaacaatccccatcaggtagctgtctaacccccagctgggtctaatccttctcattacccacccgacctggctgcccctcaccttgggctgggggactggggggccatttccttttctctgccctttttttgttgttctattttgtacagacaagttggaaaaacaacagcgacaaaaaagtcaagaaactttgt

SEQ ID NO: 24103 - DNA, 2354 bp, Homo Sapiens
acgcggcgctcgcgctccctccttaaatgagcctgggcgccccgcgcccgccacttcagtggatcccgcgccggggccgcgggcggagctgcctgccggtcccgcgccgcgcgtccgcactcctcggccctcgggcggtcgatgggacggggcgccgcggagcaggaggcggcgcccgtcggggtgctcgggccgcgcgggagcccactgtggggctcgggcatggcgggccgcaggacctgagctctcctcaggggagcggggaggcagctgctggccggcgatggggacggagtggggccgtcgccgccgcgccgagccgtgagcgccgagccaccgccgccgctacctcagcccttcgcgaagcgccgggcagctcgggaacatggccctggagcggctctgctcggtcctcaaagtgttgttaataacagtactggtagtggaagggattgccgtggcccaaaaaacccaagatggacaaaatattggaatcaagcatattcctgcaacccagtgtggcatttgggttcgaaccagcaatggaggtcattttgcttcgccaaattatcctgactcatatccaccaaacaaggagtgtatctacattttggaagctgctccacgtcaaagaatagagttgacctttgatgaacattattatatagaaccatcatttgagtgtcggtttgatcacttggaagttcgagatgggccatttggtttctctcctcttatagatcgttactgtggcgtgaaaagccctccattaattagatcaacagggagattcatgtggattaagtttagttctgatgaagagcttgaaggactgggatttcgagcaaaatattcatttattccagatccagactttacttacctaggaggtattttaaatcccattccagattgtcagttcgagctctcgggagctgatggaatagtgcgctctagtcaggtagaacaagaggagaaaacaaaaccaggccaagccgttgattgcatctggaccattaaagccactccaaaagctaagatttatttgaggttcctagattatcaaatggagcactcaaatgaatgcaagagaaacttcgttgcagtctatgatggaagcagttctattgaaaacctgaaggccaagttttgcagcactgtggccaatgatgtaatgcttaaaacaggaattggagtgattcgaatgtgggcagatgaaggtagtcggcttagcaggtttcgaatgctctttacttcctttgtggagcctccctgcacaagcagcactttcttttgccatagcaacatgtgcatcaataattctttagtctgtaatggtgtccaaaattgtgcatacccttgggatgaaaatcattgtaaagaaaagaaaaaagcaggagtatttgaacaaatcactaagactcatggaacaattattggcattacttcagggattgtcttggtccttctcattatttctattttagtacaagtgaaacagcctcgaaaaaaggtcatggcttgcaaaaccgcttttaataaaaccgggttccaagaagtgtttgatcctcctcattatgaactgttttcactaagggacaaagagatttctgcagacctggcagacttgtcggaagaattggacaactaccagaagatgcggcgctcctccaccgcctcccgctgcatccacgaccaccactgtgggtcgcaggcctccagcgtcaaacaaagcaggaccaacctcagttccatggaacttcctttccgaaatgactttgcacaaccacagccaatgaaaacatttaatagcaccttcaagaaaagtagttacactttcaaacagggacatgagtgccctgagcaggccctggaagaccgagtaatggaggagattccctgtgaaatttatgtcagggggcgagaagattctgcacaagcatccatatccattgacttctaatcttctgctaatggtgatgtgaattcttagggtgtgtacgtacgcagcctccagggcaccatactgtttccagcagccaaccctttactcccatcacaactacgaagaccttgatttaccgttaacctattgtatggtgatgtttttattctctcaggcagtctatatatgttaaaccaatcaaggaacttactctattcagtggaaacaataatcatctctattgcttggtgtcatttataggaagcactgccagttaaagagcattagaagaggtggttggatggagccaggctcaggctgcctcttcgttttagcaacaagaagactgctcttgactgataacagctctgtcaatattttgatgccacaataaacttgatttttcttt

SEQ ID NO: 24104 - DNA, 2146 bp, Homo Sapiens
actcattgctttggcgccgtctggggagcgcgagcccgcgggtggcgcgcggcgcatggtggcggctcctttcggagcgcagccgaacctctgacccggactccgttacccctgcccggcgcgccccggcggccggctggaggcagaaacagcagaagcgttaacagcagcagcggcggcggctgctccgccgccgtctccgcgggagcatggagtgcgccctggacgcccagagcctgatcagcatctccctgcgcaagatccacagctcccgaacccagcgcggcggcatcaagctgcacaagaacctcctggtgtcctacgtgctccgcaacgcgcgccagctctacctgagcgagcgctacgccgagctctaccggcgccagcagcagcagcaacagcagcagccgccccaccaccagcaccagcacctgggccccccgggagctggtgctggtggtccaggtgcataaccggcccgaatacctcagactgctgctggactcacttcgaaaagcccagggaattgacaacgtcctcgtcatctttagccatgacttctggtcgaccgagatcaatcagctgatcgccggggtgaatttctgtccggttctgcaggtgttctttcctttcagcattcagttgtaccctaacgagtttccaggtagtgaccctagagattgtcccagagacctgccgaagaatgccgctttgaaattggggtgcatcaatgctgagtatcccgactccttcggccattatagagaggccaaattctcccagaccaaacatcactggtggtggaagctgcattttgtgtgggaaagagtgaaaattcttcgagattatgctggccttatacttttcctagaagaggatcactacttagccccagacttttaccatgtcttcaaaaagatgtggaaactgaagcagcaagagtgccctgaatgtgatgttctctccctggggacctatagtgccagtcgcagtttctatggcatggctgacaaggtagatgtgaaaacttggaaatccacagagcacaatatgggtctagccttgacccggaatgcctatcagaagctgatcgagtgcacagacactttctgtacttatgatgattataactgggactggactcttcaatacttgactgtatcttgtcttccaaaattctggaaagtgctggttcctcaaattcctaggatctttcatgctggagactgtggtatgcatcacaagaaaacctgtagaccatccactcagagtgcccaaattgagtcactcttaaataataacaaacaatacatgtttccagaaactctaactatcagtgaaaagtttactgtggtagccatttccccacctagaaaaaatggagggtggggagatattagggaccatgaactctgtaaaagttatagaagactgcagtgaaaatcacagttacaaaagcgacagtcttctatttttgatatttgtccaaacaggacatacaattgaataaaagagtttaggaactggtttctgctttaatacaaaaacaaaatcttgtaaaaggtgtccaaatacatagtaatcttttccagttatgtctgattaagatttaaaactgaaggtttcattttgggagtagggttttaaagctcaatctgttatctgctaaaattgattattgttgatatgagagaagaggggaaattttatttaaattgcatttattaatctttttatctgaaatttgtacacttttccactttcaaaacctattttaagtacagcaaaatttatttaaaactgtcatagcagtaaaaagtattacgatgaaattgttagggtattaatggaacaaacccagtttcactctcttgacacacttattaggaagggattgcttcactggtttaataatttaaaagttatgtttgttaaacaccctgtcagaacagtcattttcagtattagattcctgtactattgtgttttgagtgtgttttggaaccttcatagaacacactttcttttggaatgtatttgattgataagaaagtttaaacattgttttcacctcaatgtagaaatacagtggttttgtttttttttttcttttagtgctgacaaaataaaatactcatttttgcat

SEQ ID NO: 24105 - DNA, 2836 bp, Homo Sapiens
aaatgaagtctatggaaaagaaagttatgggaaagaaaaaggtgatgaattctgttggattcaagatccagtcatattttatgtgacctgtgctgggtattttggagtcatgttttttctgaacattgccatgttcattgtggtaatggtgcagatctgtgggaggaatggcaagagaagcaaccggaccctgagagaagaagtgttaaggaacctgcgcagtgtggttagcttgacctttctgttgggcatgacatggggttttgcattctttgcctggggacccttaaatatccccttcatgtacctcttctccatcttcaattcattacaaggcttatttatattcatcttccactgtgctatgaaggagaatgttcagaaacagtggcggcggcatctctgctgtggtagatttcggttagcagataactcagattggagtaagacagctaccaatatcatcaagaaaagttctgataatctaggaaaatctttgtcttcaagctccattggttccaactcaacctatcttacatccaaatctaaatccagctctaccacctatttcaaaaggaatagccacacagataatgtctcctatgagcattccttcaacaaaagtggatcactcagacagtgcttccatggacaagtccttgtcaaaactggcccatgctgatggagatcaaacatcaatcatccctgtccatcaggtcattgataaggtcaagggttattgcaatgctcattcagacaacttctataaaaatattatcatgtcagacaccttcagccacagcacaaagttttaatgtctttaagaaaaagaaatcaatctgcagaaatgtgaagatttgcaagcagtgtaaactgcaactagtgatgtaaatgtgctattacctaggtaactgcatatatataaggaatgtattttgttaagaaggcttttgtgaaattcagaatttttctttttaatatatttcttccatggaagagttgtcatcactaaaacttcagtactgagagtaacatgactcagtagccacagaagctatgatttgtaaaatatataattgaatcagagtaatcataatgcaggggagacattcaaattagagacaagggagaagcaatgctgaggaagaccctagatagagctcattttactccacctaatcgttatatctggatatacccattttctgcatcttctttctcaacaataaaaaatgtaactattttgaatgcccacaaatcccattccagtgttactttctgtgaatgcagtaccatattctcattttcaatgacatttcaaccacaggcagaaaagactgtttactccttgacccaaagattgaaaaggattttttattgttcttagatgatggagtccatgcagtttcttagaaatcggtctcagtgcatgctgtgctttttcacatttgctctgggttatctgggaagtatcaggttctgggaggcaacagcattaagtgataagaaaaggagacattctggcaaagccaatctgcttaaaggcaaagtccagaacctggaacctagaggcctttctctctgcacgaaaaacaggtagtttgcagtctgagatatgggagagcttttaggctacacagcaacccaagggacctctcaccttttgctgagcttcaatcaggaagctatttgcctggctccagcagatgatgagataatgaggtagtgggttttttattactgttccattttgcaacatcctgcaacaccatcctgggagacaagagcattacccagcttggctttcacgggggagggttgtattcagtaaaaaagaatagtaaatataaggtcactgagattctaagtaagatagtaaatctaaggtcactgagccaaatccttttcaataggcatatattaacaggctgcttattttggcggaggttacatatggatgaaaatgaatcttagtcactgaatattcatatacatttcccccaaaaccttagacattcatagtagattttaattagttagctttctaactagtcagatttctgcccaaagtgcttagtcaatagtaattaagatatagcttcaaaaatggctttgcttttgatttctactcatattcgtatggctccagaaaaatatttttttcatatttgacaatgtcagctccactttagaaattttcaataaccagatgagaaaaaaattaagaaattgctcaagggaaacatttgtaaatggatttgaaagattgagccaaattctgttgtcagttctaagcatgcagttctcacctccatttagtcccccatcagaacagaggtcaggaatttagctggggagcctaaatttagttcagcttacctttgagaatagcatcaattcagactctcttttcattatgttttcttttctctttccctctttttaaactacattgtgttagagtcatagtctaggatcctgagagattttccattcttgtcaccattcacttgcattgtaaagattttctttgtctgttgttggcatagattcttttgtacatatttatttatttgtgtttatatatgtcaattggtttcctttcttagcttgatattgcctagctttgttgttttaattaactttctattagagagactgtatatattttttctaaatactttgtgaaatcatttttggtagcaatatctttgaatatgatgaataaaagtgactgtgagtgcaaatagaattagcagtaagaagctactctagctaatttgccattttacttaaatggaaaatgtttttcaaataaatacttatgttgttcatg

SEQ ID NO: 24106 - DNA, 4677 bp, Homo Sapiens
gttgatggacgcctggtccacacttgcatcaaagcgggtgcggtgcgctggctggccagaggccagacaggcaaagttggggtgaacacaaatctaaaagatctgtgtcctctcctatcggagcatggcctgcaatgcagcctggagccccatctgaacagcgacttgtgtgtctactgctgcaaggcgtacagtgacaaggaggctaagcagctgcaggagtttgtggctgagggtggggggctgctgattgggggccaggcctggtggtgggcctcccagaaccctggccactgccccttggctggcttccctggtaacatcatcctcaactgctttggcctcagcatcctgcctcagactcttaaagcaggctgcttccccgttcccacccctgagatgagaagctaccacttccgcaaggcgctctctcaattccaggctatactgaaccacgagaatgggaacttggaaaagagctgtctggcaaagttgagagttgatggtgcagccttcctacagattcctgcggagggggtccctgcttacatatccctgcacaggctcctgaggaagatgctacgagggtctggcctcccagctgtgagccgggaaaatccagttgccagtgactcctatgaggctgcggtgctctccctggccactgggctggctcactctggaactgactgctcccagctggcccaggggcttggcacctggacctgctcctccagtttgtacccctcaaaacaccccatcaccgtggagatcaatggaatcaacccaggcaacaatgattgctgggtgagtaccgggctctacctcctggaaggacaaaatgcagaagtctcactgtctgaagctgctgcctctgctggcctgagggtacagattggctgccacaccgatgaccttaccaaggccaggaagctatctcgagcccccatggtgactcaccaatgctggatggacaggactgagcggtcagtctcctgcctctggggcggcctcctctacgtcatcgtgcccaagggcagccaactaggccctgtgcctgtcactatcaggggagctgtgcctgccccatactacaagctgggtaagacatcgctggaggagtggaagaggcagatgcaggagaacctggctccctggggagagctggccacggacaacatcatcctgacagtgccaaccacaaaccttcaggccctgaaggaccccgagcctgtgctccgcctctgggatgagatgatgcaggctgtggccaggctggcggctgagcccttccctttccgccgtcctgagaggattgtggctgatgtgcagatctcagctggctggatgcattcaggataccccatcatgtgccacctggagtctgtgaaggagatcatcaatgagatggacatgaggagcaggggtgtgtggggccccatccatgagctgggccacaaccaacagcggcatggatgggagttccccccacacactactgaggccacctgtaacctttggtcagtctacgtgcatgaaacagtcctggggatccccagggctcaggcccacgaggctctgagccctccagagcgagagaggagaatcaaggcccacctgggaaagggagcccccctgtgtgactggaatgtatggacagccctggaaacatatctacagctccaagaggccttcgggtgggagccattcacccagctctttgctgagtaccagaccctctctcacctccccaaagacaacactggcaggatgaatctatgggtgaagaagttctctgaaaaagtgaagaagaatctggttcccttctttgaggcctggggctggcctatccagaaggaggtggctgacagcctggcctccctaccagagtggcaggaaaaccccatgcaagtgtacctccgtgccaggaagtaaaggatgccccacaaggcgggagagaaaaggcagggtcacgccatcaactccaccatggggctttggccgtgtgctcagtatctggagcctgaatcccgcttccaagcctgaccactagatggtggccacggtcataagaaaaaatggaacccctttctgtaaaaggtgccttgtgcttctttttattgtttttctgcctacgctattgctttccccaagagactcacttcacctcttagtcttccagagaggatctttcatcctgccatcctgaggcttctatttttgaccaatagctctaaagaccacgggttcccataacaacctgatatccctttctcatccctgccatccctgaataaggcttctaatttattatgctttaacaagttttcaaatagcaagcgagacacgctggaatagtggagagagccccaaaccagctttggttctatggaaaatcactccacctctctgtgtttctgtcttcacatccatgacatgaggatacaaatcttttcctcacaaagctgttgtttgatttctcctggtcccatagtggactgttaacggtgtccagtctagcgtgcacatcctgggtgctgaatctcacttcagtgttgacccccttggggttagcattcagtccttgtatatttagagaatgtcaatgttttcccagacatggtatcaataatggtagttgtcagcagtatcttagccctttctacattttttctcccacttctggaaggattcttgggtataacctaacccaaagaaaagtggcatgtgctgaaactgagtgtcacagagctgtgaggttgggtctttgggattagcttcattttccagggtttgccctttgcccttcaaccaaaggacaaagtcatgttaacagctgctactaagtctatatgcccattcgttcataccacaaaacaggcatctgactcctctggtcaccatggaatcaaggcactgtcaagtggtggggggtccacaggcacagggggcttcactctggaacaggattactgggtgcagcggatgtaatcctcacttaatcaacccacaccccagcatcccctgagctttctcttaatctcattctagcccatcttgactcttcggttagagggagttctcactggagatttgtctctgggattaatgagtgtatgcctagctactttctccagtttacttttagaccatattgttgtttgttttgaatatcattccttaggctatgttgagagtagagtggcttcccattaggagaactaatttagggcatgtcttttgctgaatcccgtcagcatatttaacaaattcccaattctagataatttccttttatttctctagtaccctttgccaggggctctacacatcaaaggtgttcatgaagtatttgtcaaaggaaagaacagtaatgacacctaacacataatgagtgattagtatgttccaggcattgcgtgagctatttactgtgagtgatttaatgttatcttcccagcagacctctgaggtaggtactagtatgatccccatttcgtacatgaggaaactgacactaagggacataaaataagttttttgaagtcacaaagtgaataaaaggaagaaccagggtttaattgaagcccatagcaatgaaaacattgtggaacttattcttcatgaatggtttacaatttaaacaaaatgtcacctagaaaatagatgaaaatatgttcaaccaggtctggatttttccaatgtttactactgaattttcattcaataacaagtttaacttccaaaaaggtgttggtatctgattttctgcctgcctcagaatgtgatttgtctgcctttgggtcatccagccttgggtagagaaggaatttgaactcaggaaattcaactccagaactgatgttcttttttttttttcatttaagttctgggatacatgtgcagaacgtgcaggtttgttacataggtatacatgtgccatggtggtttgctgcacctatcaatccatcatctagattttaagctctgcatgcattagatatttgtcctaatgctctccctcccattgcccccaacctcccgacaggccccagtgtgatgtttccctccctgtgtccatttgttctcatttttcatctcccacttatgagtgagaacatgtgttgtttggttttctgttcctgtgttagtttgctgagaattatggcttccagcttcatccatgtccctgcaaaggacatgaactcattctttttcatggctgcatggtattcaatggtatatatgccatattttctttatccagtctatcattggtgggcatttgggttggttccaagtctttgctattgtaaataatgctgcaataaaagtatgtgtgcatgtgtctttatagtagaatggtttatagtcctttgggtgtatatccagtaatgggattgctgggtcaaatggtatttttggttttagatctttgaggaatcatcacattgtcttccacaatggttgaactaatttacactcccaacaacagtgtaaaagcattcctgtttctccacagcctcaccaacatctgttgtttcctgactttttaatgatcgccattctaactggcatgagatggtaccccattgtggttttgatttacatttccctaatgaccagtaatgatgagctttttttcatgtttattggccacataaatgtcttcttttg

SEQ ID NO: 24107 - DNA, 5546 bp, Homo Sapiens
ggcaccgtggtctcatccgcctgcacagctgagtccagtgggagctgacgccatgaccctcaccctctcagtcctgatttgcctcggtgaggtttgaagagggggaaggaaggtccccgtcttggagggagctcactctaaagcgaggctctggtctatcagagaatctggtctatcagaggctccgagggaggagaggaactgctggggcttccaggggcaaatccctcacagggaactctcttccagggctgagtgtgggccccaggacctgcgtgcaggcaggtgagtctgtccccagctgtcccaggtcccttcttctcactggggacaagggcccaaccccgggcagctgggggtggagatagctgttctgggctgactgatggggacgtctggagggtcctggggctgagagctggaatctgagggatggggatgtcttgggatccagcctctgattccattctaggcaccctccccaaacccaccctctgggctgagccagcctctgtgatagctcgggggaagcccgtgaccctctggtgtcaggggcccctggagactgaggagtaccgtctggataaggagggactcccatgggcccggaagagacagaacccactggagcctggagccaaggccaagttccacattccatccacggtgtatgacagtgcagggcgataccgctgctactatgagacccctgcaggctggtcagagcccagtgaccccctggagctggtggcgacaggcgtgtctaggaagccctccctcctgatcccgcagggctctgtcgtggcccgcggaggcagcctgaccctgcagtgtcgctctgatgtcggctatgacatattcgttctgtacaaggagggggaacatgacctcgtccagggctctggccagcagccccaggctgggctctcccaggccaacttcaccctgggccctgtgagccgctcccacgggggccagtacagatgctacggtgcacacaacctctcccctaggtggtcggcccccagcgaccccctggacatcctgatcgcaggactgatccctgacatacccgccctctcggtgcagccgggccccaaggtggcctcaggagagaacgtgaccctgctgtgtcagtcatggcatcagatagacactttctttttgaccaaggagggggcagcccatcccccgctgtgtctaaagtcaaagtaccagtcttatagacaccaggctgaattctccatgagtcctgtgacctcagcccagggtggaacctaccgatgctacagcgcaatcaggtcctacccctacctgctgtccagccctagttacccccaggagctcgtggtctcaggtgagggccctgaccctgtcctgtccaagctcaaaggctcagctcaggccctgcccccaggagagctctgggctgggatggagtcgcggtgcgggggggagggtttgaggggggctcagccagagggagactcacccctcagaggggaggaggacaacgggggctccccaggcatgcccacacttggccccatctcctgggatgcaaatggtgaaaggtgagcagaagaaagtttccagagaagccacgggcaggtggagggacgggtttcctcactcagcaccaaagcgcctcgctccctttctgtgcttattcccaggaccctctggggatcccagcctctcacctacaggctccacccccacacctggtgagtcactgaggcctctgggctcggagggagcgtggtctccccccaggcagccctgagtctccccgaggatcctattcccctcaaagactcaagcgggagcttccctccagggagctgggcagagccagaggaggggccacaggctccccggggctctgaggctgggccggtgagggggcgggcgtcgaggcagagagagatgttgggtgttggggcccagcctgggggaggagcagccgggctgatgtggggagcagggcagccccagccctcacctccccgtcctgacccagcaggccctgaggaccagcccctcacccccacggggttggatccccagagtggtgagtgaggggctctgagtgggaggtgggcggagaccaggggaggcaggggtgggttctgtcgtaggttcaggctcctctggagatggtgaagtgcacaagcccttcccctgcctgggcctcagtttctccaagtgtaaaggagagaggcctgcattgatgggattcttcaggggactgtcctgtcccaccggcagcagtgacggtgacctggggcaggggaggggagcagggccgtggtttggggcattcaggctctttccctgcagctccggggctccgctcaggtgcagagaacaagggctgcgggtcagactcctgggttcacttcccagctctgccgcatcccaccgtgggcccaggcaggtcaactttctactctgactcagtttcagcagctgtaaactggctcagtcccatccagctcacagaactgctgcgaggcgtaagcaaaatcatgggacctggccctgtacacagctcggcaggggcaccgtcctcctgctaccctcagcccttcccagatacacacagagcccctatccagacaggttctgcatgggagtatgggaacttggcagagtgggaaacggacctggctgagctgggagtgagagcaatgcagggtccgtcctgcacaacccactccctctcccaggccctgctgtgctggggaagggaggatcctaagaaggacaccagccccagatggagacactaggacaggcccctcctgtcaaataggaaacaggtgtgcacctggtggggcagcaggaggacagctggggaaaacacaaagtccctggttcccttcccagacctgcttcttccaggctgaggagcctggggcaggcgattcccctctctgagcctcagtttgctcctctgtgaattggggggttggcaatcccatgttgcacaactgctgtgagggttggagctcatgaaggaaagacctagctcgcgcctgcacacagaaggtgctcacatcaatgacgtcatccccattcccaacgtcatcacgctcaaggtctgggaaggcacctgggggttgtgactggggtctcagtggccttcgtcctgctgctgttcctcctcctcttcctcctcctccgacatcggcatcagagcaaacacaggacatcgggtgagtagggaatgggggaacccgtgggccgaccgagggtgggctcggggcaccagccagagggaaaccaaacacaaaggaaagtcagcttagaaaaactgctccagaaattcccaggtgaaaaatcgatcgagaaagaagagaataaatgtgagcatgtgtggaagtgcttgattcttctgattttactttaaacttacgacgtatttaaagcctcagtgccagtgggcctccaggtttccttctttccgctcgagttgtgtgtgcagggcagctggttcgaattctcccaggcctgaccctctgtccatctctgtccagcccatttctaccgtcctgcaggggctggggggccagagcccaaggaccagggcctgcagaagaggtaattctgcatgaagacccaagactcccatccacccgcacagccccctcactgcccctcacactcccgtgtcctcccccagggccagcccagttgctgacatccaggaggaaattctcagtgagtgactagaagcggagggcacctggggtgggcaagggagcaccaaagtttctgtagcaatgggggcaggagcacaggctggggggggtctggggccaagggggaggcggtctgaacccacactgtgggacctcagggacatcacagtccctccctggatctcagccaccctagtgggaacagggcaagggctggcaggacggagaagtctcagagaaccttcccaggagatgaaccccttgctctggcccagcagatgctgccgtgaaggacacacagcccaaggacggggtggagatggatgctcgggtgaggccccgcccctgtcccgggcaccaaaggcctcctggtgccagatctaatccagcaggacttctctgtcctccttcccccggctctcagcatcgtcacggtggacccctccttgtccagcacgctgcctcccgcctgctgcgacctcactctcttctgctgtcctgggacctcgtgggcctcctcccgggtccccttcctgctcctcatcctctgtttggccgtctggttgttagagctctccccaggcctcaggaggatgaggaataaatgaaccgacccggtcccccaggctccccttcattcattcaaccagcgagtgttcccagggagctcactgtggatggggctccccatgggagctgcagacacagcagggagcaaagccgcccccgcctcctgagctcacctcatggtgggagacaaaatgcaaataaatgcatcgtgtccaggagtgcaacgtgctgtaaggaacataaaccagggaaagggcagagagtgtggggcagtggggccagtctgaatggaaggggagggctgtctgctcagctgtcatctgagaagcctggacagagtggggcacacgatcctctgatggacgagcccctgcaggcagaggaaacagccgtgcaaaggccccgaggcagcagcgagctcttgcgggaaggcccgtgaggctgcagccaaatgggcaaggtcagagtgaggagcagaggccagaaccacagggagggagcggccagaccctccacggccttagggcgtccctgagattccatcaggaaagggatgtaatcggatcaccccgggaacagtgaggaaaattgactccaggaggtcagggggactcaaggacaccccccaccactgtctctctccagcagagcccacacgatgaagacccccaggcagtgacgtatgccccggtgaaacactccagacctaggagagaaatggcctctcctccttccccactgtctggggaattcctggacacaaaggacagacaggcagaagaggacagacagatggacactgagagagtcctttcctctccaggcccccaggcctcccccacccccaccacgttccttccctctcactctcccccgctgcaggctgctgcatctgaagccccccaggatgtgacctacgcccagctgcacagcttgaccctcagacgggaggcaactgagccgcctccatcccaggaaagggaacctccagctgaacccagcatctacgcccccctggccatccactagcccacgggggacccagatctcatactcaacagaaggagactcagagactccagaaggcacaggagctgcccccagtggacaccaatgaaccccagccagcctggacccctaacaaagaccaccaggacatcctgggaactctgggactcactagattctgcagtcaaagatgactaatatccttgcatttttgaaatgaagccacagacttctcaataaatcaatgagctgagaaaactg

SEQ ID NO: 24108 - DNA, 5590 bp, Homo Sapiens
ttttaccacgatgtaaacaaacaaacaaaaaactctcggcattgcccccactccctggcagtgtctattgtgggaggagagaccgaaattctcaggacacacccaggcctcaagacttctcgcccaatccgtcaccacttcctggcgcagacatcggactgttaaggcccctccacttcccgctcaggttacagaccccagggcacatccccccatcctcacccgcctgcatgaccaggctgccccctgccccgcacacctctctctgagtagcctcctgtcttccctctggcagctgagtcagcttcaccacctcactgggtctggaacagccaactcctgacactttcacactcacagaggtggagcaggggcacgggggctgggcaccaccagtgtgtgggcagcacccaggcattaaacacagcagaggatggcgcaggcacccctgttctcctcccagagccaagcttcaggccatgtccagcgggggaggctgtgagtcacctctgcctcatgtgggtgatcataggagggtgtgagtcagctctgtccacatggttgctcatgggagggtatgagtcagctctgtcaatgtgggtggtgggtggtcacgggagggtgtgagtcagctctgtccacgtggttgctcataggaggttgtgagtcagctctgtccatgtggggtgctcacaggagggtgtgtgtcagctctgtctgtgtgggtggtcacgggagggtgtgagtcagctctgtctgtgggtggtcacaggagggtgtgagtcagctctgtctgagtgggtggtcacgggagggtgtgtgtcagctctgtctgtgtgggtggtcacgggagggtgtgtgtcagctctgtccgtgtgggtgctcacgggagggtgtgagtcagctctgtctgtgtgggtggtcacaggagggtgtgtgtcagctctgtctgtgtgggtgctcacgggagggtgtgagtcagctctgtctgtgtgggtggtcacagaagggtgtgtgtcagctctgtgtgggtgctcacgggagggtgtgagtcagctctgtctgtgtgggtggtcacaggagggtgtgtgtcagctctgtctgtgtgggtggtcacgggagggtgtgagtcagctctgtctgtgtgggtggtcacaggagggtgtgagtcagctctgtctgtgtgggtggtcacaggagggtgtgagtcagctctgtccatgtgggtgctcacgggaggttgtgagtcagctctgtctgtgtgggtggtcacaggagggtgtgagtcacctctgcctgtgggtggtcacgggagggtgtgagtcagctctgtctgtgtgggtggtcacaggagggtgtgagtcagctctgggtggtcacgggagggtgtgagtcagctctgtctgtgtgggtggtcacgggagggtgtgagtcagctctgtctgtgtgggtgctcacgggagggtgtgagtcagctctgtctgtgtgggtgctcacaggagggtgtgagtcagctctgtctgtgtgggtggtcacgggagggtgtgagtcagctttgtctgtgtgggtgctcacaggagggtgtgagtcagttctgtgtgggtggtcacaggagggtgtgagtcagctctgtgtgggtggtcacgggagggtgtgagtcagctctgtctgtgtgggtgctcacaggagggtgtgagtcagctctgtctgtgtgggtggtcacgggagggtgtgtgtcagctttgtctgtgtgggtgctcacaggagggtgtgagtcagctctgtccgtgtgggtgctcacaggagggtgtgagtcagctctgtgtgggttgtcacgggagggtgtgagtcagctctgtctgtgtgggtggtcacaggagggtgtgagtcagctctgtctctgtgggtggtcacaggcgggtgtgagtcagctctgtctctggggtggtcacaggcgggtgtgagtcagctctgtctctgtgggtggtcaccggcgggtgtgagtcagctctgtccgtgtgggtgctcacaggagggtgtgtgtcagctctgtctctgtgggtggtcacagtagcgtgtgagtcagctctgtctgtgtgggtggtcacgggagcgtgtgagtcagctctgtctgtgtgggtgctcacaggagggtgtgagtcagctctgtgtgtgtgggtggtcacaggagagtgtgagtcagctctgtgtgtgtgggtggtcacaggagggtgtgagtcagctctgtctctgtgggtggtcacgggagggtgtgagtcagctgtacgtcatgtagttggtcatctgtgtgttccacctgcatcctggggtagcctgttggccatttttgttgccactataaagccctgagtgtggctaggaagggggtgctgggtgggaccgtatgatcacgtgtgctcagtttggcatgtgtgatcgtcatgtgactgggctcacagaaaggagcttgtccctaatgatttccaaccttcggactgtgtcctgacctggcctgtagtcctgctgtctgggtttgcatggccccgagagcccttctgaacaaaggatgctgatggattcaagccagcttggtgggtgccgggccctccctcccacctcctttagtctttatgttgaccttgagctggggtggtcctgggaccccgaggttcgtgagcggaagggcttgcaggagggcacacagcaggggagctgggagagggggcttgtttgcctcagcattgggggagccgaggaaacgttcatgaaagcttctgaaagggaagcaggaaggattttcaccccagggctgcagcttcagggactacatgagggtatgggtggggatgaggggaaggcccacagggtgttattcccatctcatcgtcctcctctggctttgctttgtgttgcgaacccgcatcctgaggctgacttcagaatgttaagaaaggcagccctgagcctttgatcaccccaggagttccagaaggcaccagggagtcctctcgggtcccatgcccctcccagccccttggggtcaccctgatcggcctggccaaggtcgccagctgcctggggactggggagcagccacatgccctctgcaggggagtagttgccaggaaggtgcaggcggaggccctgctctccatcacagcggtcctgattatgagatcgtcactctcaagaggccaaaagttatgaccaaacttcaagagaaactcccagtaaagtagtatttccacagcagacagttgggatgcaggtccacccacagccagctctgagctgacacaggggccctggccagggttccaccctgctctgcctgcctggggccctggctagcctgcagataacatcaagtagtttcgtaatttccacacacagca[450 bp omitted]ctctcaggccaagaggagccctggggtgagcaacagccctgtggccttgctttcgggttcaggtggtgcagggagccaccccggacctccgtgaaggccagtgaaatggacaggacaaggtgcttggcctgcggctggagagcccatcttcttaccccctggccacatggttctgggaaggcactgacgctttgtaaaacttgcctggtgtggaaaatgatggcggtcatatgtagtaccttagaaggctgtgctgggagttaacgatataacatagcgcaaatgcctgacccctgggagaggggcagtgagagtttgttgaagttggcatgtgaagtcgaggctctcagtgaggtgcagacttttcctgtccaggaatgggagacaaggagctgtcattcactcaagcccttcgtctgccagcccctggcctgttatacaccccttttcaatcctgtaaggtaagtgttcttatctccaacttccaggtgggaagtctgaagctcagagagcctgggccaatggtacaggtcacacagcacatcagtggctacatgtgagctcagacctgggtctgctgctgtctgtcttcccaatatccatgaccttgactgatgcaggtgtctagggatacgtccatccccgtcctgctggagcccagagcacggaagcctggccctccgaggagacagaagggagtgtcggacaccatgacgagagcttgccacgaaatatgcagcttcctttccctgagaaaatggcaaagaaaattcaacacagaaggccagggagggtgtgtggaaacgattcacatgttcaaaagatttatatgtgtagaagaaagctgtgaagtgtgaagtatattttctattgtagaatggatgaaaatggaataaaaataatatcctttgctaggcagaataaataacttctttaaacaattttacggcatgaagaaatctggaccagtttattaaatgggatttctgccacaaaccttggaagaatcacatcatcttagcccaaggtgaaaactgtgttgcgtaacaaagaacatgactgcgctccacacatacatcattgcccggcgaggcgggacacaagtcaacgacggaacacttgagacaggcctacaactgtgcacggttcagaagcaggtttaagccatacttgctgcagtgagactacatttctgtctaaagaagatgtgagtcctaagcagacttaaagccaagaaaataagaagaggaaagagagagggcctgccttaaccacctgtggtgctgacttggacaattccaggtcaagaggaactgtctactttcgactttgtgtgatagtaactttttaagcagtggaccgggagcccaagactcagatgcagcaagctttgcaaggctgacgagagctgagatcttcagtggccgatgggtacagggctgctgggagcgtagccacgtctgctccaaggtggcttgaatgaggcagtgcccaagtccttttgactggctgaggtgagcctgtggctcagtcacactttgtccctctcgtaataagtgcatttcccagacagcagctccttggtgtcatgcaactgaggaacctaattgtctgggtgggttgttcccatccaacttccacctgtcacgaaggttgctttttcagatcagtctccacagctaccatcttgtcgggcacagagccgggcatcaacaagtgtatgttgaataaagaatgaattgatg

SEQ ID NO: 24109 - DNA, 5134 bp, Homo Sapiens
gagtgagaccctagtcacccttcagcagggcagagcagcttctaaaattctgggagccagcctggctgtgaaccccgaggagggtcaggaaggttgtgggatgtgtcagatgcctgcagctgcgtggaaacaccttgagtcccctgtggcctctggctcagggccctgccctcccctctggaaggcagctgggggcaggatggggcactaatggggaaagcctacccgaccccccttgtgttcctaggtgcccctcccagactctttttggggcaggcgatgtgttccatcgttgggatggtggaaggggtgtgcgagtaatatggaaaatgaatagctgtgctccaaatgggctcaccgggagagttgtggagcctatggagagagcattaatgtgctggcgccttattggtgctaatcacttaaaatgtgcgcctttgttagagctttaatgagagccacttaaactgtgcattaaaaagaggaactgcggagaggccgccggcaggccgggcggcaggcagtcatcattctcattgaaatgcttttagtgtggagaaaagttgctggattcggcaaacccctgtactttgcaaaacctcaccgtggtgtctgcgtggctgggtgtcagcagaagcaccgtggacctgctctcccgcctccccgtgcgcctgggcctccgtgtgctggtgctctcgcacacagctgtgccgccttccaccaatgacccaatgggtgtgtgtcccgtcctggaggcgcttgaggtctgtgcaggcttctagaagggccctcgggctggccgaggctgttggtcagtcctggcaggaggtggacgcctgtgggcttcctgtctgctgcaggcgtgacaccccacacctctgtcgtccacatggcagtacctctctaccgtcacagggcaggggacgcaggcgcagccgggagagagccggcagccctgttggggagcaggtcctagtctccgcagtctgtgctggagccgggcttcacccgggagtgcccctcctggtccacatctgacccccgtcctcctgcctcctgggccggcctcctgcccgttgccacttgcagagtgggtggtggagcaggaagtgcccgagatgaggcggtaagtcccctccctgaactgctcttcctggcttgggcccgtctggctcccctggtgttggttccgggggcccggctgcttcagggaagtccctttggcacagggattgtgttgcacactgaggggcgtgggcctcagcagctgctgccgggaagccggggcatccttaccttacccgccaaatgcacgggtcttcaccttgtgatttggaaacattcctgaactgtgctaattaggaagcttggtttattttttatttttatttttatttttgtagagatggggtcttgtgatgttggccaggctggtctccaactcttggcctcaagagatccatctacctgcctcggcctcccaaagtgctgagattccctgtgtgagccaccgcgcccagcctggctgtgaggtttgtgaaggcgccaagctgctggtgtgagtgcctgtttcccaggcgctgctttaagtcagctgcagagcgcactcctagacagacagccccacacacatgtacgcagcccaccatgctgagcacggcccaacaggaagaggttgtgagctccgaccacagctcggggtcaggcccactctgccacttcctggtggtgctggggccgagggtgagtcagttggtggcccgggcctcgatttcctcacctgtgcagtgacagtgaggacacccgctgtgctgtgtgggggggcaggtgcacagtctcattcatggccttgaaagcaggtgcccaagggggaggcagcactgctaactcctcaccgtccctggctggtctggttctagaacatcagctccgagaggagagcggccacactgcgtcctttccccagggtcgtgctctctcgttgactgagtgacgagagcggccacactgcgtcctttccccagggtcgtgctctctcgttgactgagtgacgagagcggccacactgcatcctttccccagggtcgtgctctctcgttgaccgagtgacgagagcggccacactgcgtcctttccccagggtcgtgctctctcgttgaccgagtgacgagagcggccacactgcatcctttccccagggtcgtgctctctcgttgactgagtgacgagagcggccacactgcatcctttccccagggtcgtgctctctcgttgactgagtgacgagagcggccacactgcatcctttccccagggtcgtgctctctcgttgactgagtgacgagagcggccacactgcatcctttccccagggtcgtgctctctcgttgactgagtgacgagagcggccacactgcgtcctttccccagggtcgtgctctctcgttgaccgagtgacgagagcggccacactgcgtcctttccccagggtcgtgctctctcgttgaccgagtgatgagagcggccacactgcgtcctttccccagggttgtgctctctcgttgaccgagtgacgagagcggccacactgcatcctttccccagggtcgtgctctctcgttgaatgagtgatgagagcggccacactgcgtcctttccccagggttgtgctctctcgttgaccgagtgacgagggcggccaccctgtgtcctttccccagggtcgtgttgtctcgttgaccgagtgacgagagcggccacgctgcgtcctttccccagggtcatgttgtctcgttgaccgagtgacgagagcggccacaccgtgtcctctccccaggatcgtgctctctcattgaccgagcgactgtgtgggctgtggtctggtggattttgtctggggaggtcggaggagaagtctctgcatagccgtgccctgtgagggacccaagtgtatgccatgggtgggcaccttgtcacacaagtaaccctggtccttcccctggtgaggaggcccttggctgcccctgctgctgggcagagacgagaccaggcatctgctcacatggtcactgcgcagaggccagagggtgtcaccactgtctgccacctgcagagctcacagcagggcactatggggcggctcctgcgcatctccttccccccgacctgcaggcactggggccctgagaaccaagggcagatctgggccgtgctctgtgctcccacacgcccgctctccatgggaggaaagagccagcctgcccagagggcagcatcctcgctgaccccggccggctgtggcccaggagactgacgtctgtcttttcggccctaggcttcttccccgggagctcgcagggctgcgacgccttcctgcggcataagatgaccctcatctcgcccatcatcctgaagaagtacgggatccccttcagccgggtgcgtacgggtggggcctgcacgcctgtgggtgaagtgggtaccgggtccaagcccaggtggccgcacataccccaggagataagctgtttaaccctggagaagtttctagaacagtgattagcatgccagaggagggccgcatggctcagcagttagcctccagctcttccacggggaagcgaagatggcagagcttgaatctggcggggtgttaacctcccctcccaaaccaaaccaaaacttcctcctgggtgtggccatcagaggcccctccgcaggggctgcaggggtggaagggcaggggcaggccctgctgacctggcaggaagctgccaaagaaacagagggcagggcccctcgtcccgtgcaaggtgggaacctggttcctaccgccccaggccacaccctaagtctcaggcacccccacggcccatgtcacccggccgtggagagaactgcctgtttagaagtgacatttcgggctctcctgcaccgtgaagactgtgaactcattcagttcactgcttcaggggctgctggtggaggctgtgatggaggagacctgaggccggggggtggggcctccctacacctgatttgatggacagctggggtttggtgtcccaggagcagagcaggctgtgctcagggtccagctcagcaactgcacccactcgaggcagttccttccccatggagaagcctttgtccatgggagagtctaggcctgtgtccccagctctgtccaggtgagaggcacgtgccaagaacctgcaaggcaggtctgggccgcagcccagctcatgaggttccacgggaagagtgatgtgcaggctcgggagcgtgctctgtggtgaggccctgagtgtcagccagccggaaattgcttgtgacatttcaatcaaaccgccaaagcatcagctcacacatcggggatccgctcttcctggcggggctgcaacccagaggccgcctcccagccgctgcaggcattcatcagacagcacagatctcgctcggagaagtgcgcatttccggcctttcctcttctcccccgtcttctggttggaacatcattcagtaccagcaaaaccagacagatcacggcattgttcagggaagtgagaagtactgattttctggctggtttgtctaaaaccttctccaaagtggtgcttcctggaggggggtgcccatcgaaggggtgggcaggcagtgagtggcctggactcccaggtcagcatctgtatcgcactgcagtttatctgtaaagttcctgaacctgagccaaaggtggctcaccaccagcctcagagcggctgctggcaccatgcatggtagcaggcggggtccaggcagtacggctgcgctccccaacaccgccagctggttgctggggccgggcgccagtttctccagaggctgccacagtgaagacccctgtcccactgcagcgaacagcaccctgtgccgcccggcctggggaccgtccttcagcctctcagacgccatgggcttgagatgaacgtcccttccagacagcagcgtgggtcccctcatctgaattcctggcagccttcaaacaagtgactccccacactccccttataaatctttgtaatggtatttacttctaggagaaaaagccgatcaatagcagagctttttaataattaaaagtgtgtacttctgt

SEQ ID NO: 24110 - DNA, 5072 bp, Homo Sapiens
aaatcgtacggggctgggacatgggagctgggcctggagcttgcctggcgggcggatgggtgtgggtggaggcacgttggggatcctggtgcagagtgggccagctgtggcctcggggctcgccaccgtggaggactccgcctgggcctaggcccccatctctaggaaatggctccttcctgcgtgcgcgcgttgtgagattactagtaagagccgcgcttgtgaagacgcagtgcccagttagtttgcgccagcctctgagttcagctcagaacacagatgatctcattgattcctcacgtcaaccttgggaaatctgggtaccctgggacgtccacacatgaggaccgaggctcagggacatcaagggactggcctggtcccagaaacagggagtaaaatgggaagtaaactcagtcccacgtctgcctgactccagagtttgggccactgaaccatgcggctgccatcttggagttctttgagctgtgaagtgctgtgcatcgtgtgattctgtgtcccttttgtgcaggtaccaggatttctatgcattcgacctgtcaggagccactcgagtccttgaatggattgatgacaaaggtggtatacctttctagccctgaaggagagggaatctcactcctgagctgggtttcaggagctaagcctagagggacccaacccactcttctgggcacctgagagtcacttgtagcaatttgatgccccatcagcactaatattcctcttattaagatctctgaccgggagcagtggttcacgcctgtaatcccagcactttgggaggccgaggcaggcggatcacctgaggtcaggagttcgagaccagtctggccaacatggtgaaaccccgtctctactgaaaatacaaaaattagccggacgaggtggtgcacacctgtgtaccagcagctactggggaggctgaggcaggagaatcacttgaacccaggaggtggaggttgcagtgagctgagatcacgacactgtattccagcgtggctaacaaaaaaagtcttcaggctgggcacttcaggaggctgaggcagcgggcagattgcttgatcccaggaatttgagactaacctaagcaaggaaaccctgtctctacaaaaaatacaaaaattagccgagcatggtggctcacgcctataatcccagctactctgaaggctgtggtgggaggatcacttgagcctggcaggttgaggctgcagtgagctgtgatcggaccactgcactccagcctggctgacacagcgagaccttgtctgaaaaagacacaaccaggagtctttgttgctggctatgaaagcctgaaaaagaatgaaattcttcatctgaaattacctctcagactttctgtaaaggaaaacaagggcttattcccagaaagagatttcaaagtgcgccatggaggattttcagacaggtctatctttgatctaaagcatgtgccacataccaggtatggtcaattttgtgatccagccatccacacaggatgggatgggatggctgcaaatgcctgggggtattctgcctcctcatctccattcccaccccctcagcacacaggcacatgtgagtgcacaagtgtgtgcacacagatacacacagatttagaatacaaagaaaccactgctgtggcttcatagccccccagagcccttggactaatgtaagtaacagttctaccggagttgctccagggaatagatacgggacagaaagatgctcttctattgctcttgggtgataattgctcagttgggagaggccaagagtctctgggtcaggttgtgtttggccccatacttgtgtcctctgtaggtgaccatcatgacacatggaagcttgggctcagtctccctaaagttgattgagcctgctccttatctgtgaaatgagggtggttggccttgatgatcttgcagtaagatgtcctgatatgggaagtggagtcccaagctaagtgtgctggaaaggggaagggacctgtgtggataagctccccatggtctggactgattttgtcttttctgaatagattgctggttaccagtggccttccaggttgttatctgcaggtgtggcaggttgcagaggacagtggtgagtgaatttgacttgatggggtttggggttctaggaaagtgtgactcatacacccctgtcccctaatctgagccagttaagaaggagactcaggctggggacagtctcatgcctgtaattgtagcactttgggaggctgagctgggtggatcacttgaattcaggagttgaagaccaccttgtacaacatggtgaaacctgtctctattaaaaatacaaaaaattagccgggcatggtggtaggcacctgtaatccctgctactggggagactgaggcaggagaattgcttgaacctgggaggcggaggttacagtgagccgagatcatgccactgcactccagcctgggcaacaagagcaaaactccgtctccaaaaaaaaaaagtagtagtagactcagagccaggtgggaattaatctactttaatgcagacaaggtgaattagcaaccatagcatggcatccaagccccaaatggagcttcctgtaacctgctcctggaattgagttcatccagagaactactctccctaggcaggggcagtggcaacagcagagcttaggctgctcaggtgagctcacctctttggcagcattaagcatatattaagagaagcctcagatgtagaatacagagaggagaacctccctgctaaccaagcaggtggagacaaccaaataaaaactaaaacttggctgggcgcagtggctcatgcctgtaatcccagcactttgggaggccaaggtaggtgggtcacctgaccaggagtttgagcccagcccgagcaacatggcgaaaccccgtctctactaaaaatacaaaaaaattagctgggcatgagggtgcacatctgtaattccagctactcaggaggctgaggcagaagaatttcttgaacctgagaggcggaggctgcagtgagctgagattgtgccactggactccagcctgggcaacagagtgagactctgtctcaaaaaaacaaaagaaccaaaacaaaacttgactcaaagccaaggatgttccattcagtgtaaaaaagatgtggactttcttgtccaccttacaagacaatgacatctgtaatgtgacctgtacttgctaggctttagcaagtcactcgaggtcatggaacatgtttttgaagaaataatatcagttcatgaattctgtacctgtttcttgtcgctgaaggggtaagtgacatcagcagcatgttcattccttttcttgtcttctacctgttctccacaaaagtataaaaagccagaattgctttttgggttttgagatggcattgtcttccatttgcaaaaaacagtttataagacaaataataaagaaattgaaatgtttctgatggtttcaaaaatgtaaacataagccagagtagttatgtctcaacatcatctcttgccagccggcagctccttttcttccttgatcttctaaatgtacaggggaagacagctggcagcctgtcatgtttcaaaccttcattaaagttctggattttggcctcttcgttttcccctagatgtcattaaagctgtcagcaccattgctgtgcatgagaaagaggagagtctctggcctagggtggccgtcttctccacattggcacccggagtcctccatggggcgaggctccgaagtctgcaggtcgttgatctggagtcccggaagaccacgtacacctcaggtaccgtggtactttgtcccttgcttgctgctccagccggcatcaccccccagcccaactcagccactataaaaactgagttcaactctctgtgccaggtgttggggatacacagtgaataagaggtaagccctggcctctaagggctcctatgctggggcaggattaggcagtcccagggaccagcacccaaccagctgagcagacaatggtgagatgagtgggaagggagatgtgatttattctgcctgggactggtgggaagggacctgtgaccagccagccctgccaaattgccagacccatctgcctccagccgcttgtctcctttgctgtcggtcttccagatgtcagtgacagtgaggagctgagtagcctgcaggtcctagatgcagacacctttgccttctgctgtgcttcaggccggctggggcttgttgacacccggcagaagtgggcaccgttggagaatcgcagccctggccctgggtctggtggagagagatggtgtgctgaagttgggagctggggccagggccctgggcccagcattgccagccttggctcagatgggcgtctttgtcttcttgacccccgggatctctgccatcctgtgagctcagtccagtgcccagtatccgtacctagccctgacccagagctgctgcgagtgacttgggccccaggcctgaagaattgcttggccatctcaggtactgccgagcaggatttcgtcttgttatctgatctctttcttccaggagactgttgggtgctcaggaaggagcctccagcaccatgataaacctggctccaggagttaaagttgctcacagagaaattcgaactctccaggttcttcagtggcaggccttttcctaccctggctactaaacttccacacattggcagcaggcctttcctagcctagcaggaattcaggtctcaggttggtggaggggcctgcagacagtaagacactgggacagacatcgggctgggtcagaaagaaaaggggacagtggctaacacggtgaaaccccgtccctactaaaaatacaaaaaattagccaggcatggtggcaggcgcctgtagtcccagctacttaggaggctgaggcagaagaatggcgtgaacctgggaggcggagcttgcagtgagctgagattgcaccactgcactccagcctgggcaacagagcgagactgtctcaaaaagaaaaaaaaag

SEQ ID NO: 24111 - DNA, 5320 bp, Homo Sapiens
gagccacagagcgatgggagagggaggtgccacgcactctcaaacatgcaggtcttgtgagaactcactcactagcacgagaacagcaaggggaaaatccacccctgtgatgcagtcacctcccaccaggtcgctcctccaacagcggggatcacaattcaacatgagatttgggtggggacacagatccaaaccatatcgttcctccctggcccctcccaaatcttacatcctttttacattgcaaaatacaatcctacttcccaacagtcccccaagtcttcactcatttcagcattaattcagaagtccacagtccaaagtctcgtctgagacaaggcaagtccttttcacctatgagcctgtaaaatcaaagacaagttacttcccagatacagtgggggtgcaggcattgggtaaatacaccagtgccaaaagagagcccccagccaaaacaaaggggctgcgagccccaggcaggtccaaaacctagcaaggcagtcactgaattgttttttggtttcttcttttttggttttttttttttttttttttgagacggggtcttgctctgatgcccaggctggagtgcagtggcatgatctcagcttactatagcctctgcctgcaagcaattctcctacctcagcctccctaagtagctgggactataggcatgcaccaccacacccagctaatttttgtattttttagtagagatggggttttgccatgttgtccaggctggtctcgaactcctgacctcaagtgatccacctgcctcagattcccaaaatgctggaattacaggcgtgagcaaccccacccagcccaataaatcttaaagccccaaaataatctcctaagacccatgtctcacttccaggctacactgatgcatggaggtggctcccaaggccatgggtatctctgctcctgtggctctgtagggtacagcccccatgctgctttcataggctgctgttgtgtgcctgcgacttttctaggtgcaccacacagtgcaagctgtcggtgggttattctggggtctggagaacggtggccctcttctcacagctgcagtagccagggccccactggggactctgtgtgggggctccaaccccatctttctcctcttcactgccctggagcagtggcctgagctctatctggagcccttttagccccagagcaacagggatgcaggggccagtgtccctcagggcagtggcccacaaaaccattcttccctccgaggcctccaggcctatgatgagaggcacttccatgaaggtctctgacacgcctagagacattttcctcattgtcttggcgattaatattcagctcctctttacttacgcacatttctgcagccagcttgaattcctccccagaaaattgtttgtttgtttgttttctaccgtgtgatcaggctgcaaattttccaaattttatgctctgcttaccttttaaatctaagttccggtttcaggtcatctctttgctcatgcttaacaaaagcaatctttgctccagttcccaataagttcctcatctccctccgagtctacctcagcctggacttcattgtccatatcgctattagcattttagtcacaacaatttaacaagtctttaggaagttccaaactttccctcatcttcctgtcttcttccgagctctccaaatcgttccagcctctgcctgttacccagttccaaagctgcttccacatttccagatgtcttaacagcagtgccccacttccctgtaccagttttctgtgttagtccagtcttgcattgctataaatgaagccagatttttctcagccactttgccaaccggggacctccgtggctggtgacacccccaacccaggcctgccacagaaggcacccacacactcgacccactgggccatgcttggcttatgcactggctcagcccacctgtgttatagcttatacctgcattcatcggttcccaagttcttgtcccgcgtccaagaagaatgaggttacactgacaattcaaagggtgaggagagtggagaagaattttattgagcaatgaaacagctctcagcggagagggtatgcgagggtgctgaaccgcccagagttgggtgtggctgggtctagggcttttctgggcacagaatggggaggggcaggctgtaggtagcactggaaaaggtaacctttggttggttaaaaagcattattcagaaagaaccagtgggaaagagtgggcaaacaggaatagaagttctcactccaggctgcaggtttcaggctgtttttggcttgaaggtggggtttcaccagggacccacccctgtctatctgggcatttgactgcttcctgttgctttcataaggaactacccaagatggtaatttataaagaaaagaggtttaagtggctcacagttccacaggctataaggaagcatggctggggaggcctcaggaaacttacagtcatgacagaaggggaggcaggcatgtcccacatggtggagcaggaggaagagctcacctacagcaaattatttaagaccgagcatttgtctctgttctgttccctctctggacgcaccctcctgcctccaccctgacttgccgtctcctgagcactgaagatatttttggcttgtccgatgtgactccacagacagcagaaacgcttgcttgatcagggcagcatcagggcaccacacatgcctgggcttgcacaacacagcgggagcactgccactcagcagcagctgctgctttcattaaacagttaccttgagaagaaaagataggtgtcgagggctgagagctgtgctagagtttcagggtccgagttggcaggaactgaagtcccgatgctcctcagcccttggctgtcctcagggctgccctctgcgtggggacaccaggccgcccctgcccagggacaccaggccgcctgctcctgctctgtgcatctctcacatcaggctcctcacccagcattgtttgggctatgacagtggctgtgacaagaccctaagacgggaagctgcgtgcagggcacttgagggcccgctgaggagaagccgcctgtgagggacaggactgggcagggaaggccaccagccatgcggtcacagcccaggactccgccagtcctgcaggagccctggagccaggcccttactgtccaggccacttgctgtacctggcccacagctacctcccctgcagccctgagtcctgcttgctgtgcccggctcaggctgagactgcagtgcttgtccattcaccatgaaagaaagaagaacaggaagggaggcaggaggaagtaagttagaggattaatccaaatgttccaactgtctaatgggagttccaacaagaagatatccagggaggaaattcacagtcaaatttccccaaaccaaaggtcatgagttttcaggttgaaagaacacccaaccaagaggagagaaaacagcattctaaatatcggaaggaaacgaaacctcgcctcaggcatgcgggctctgacgggcaggatggcggcacggagggctgctgtatccagtgaagtcagcagttcagatgaaacagataactcccttaaaagacacaaattgccaagactgacgcaaacactgaaacagactgaacagttctgagttaccaatttaaaactgcaaagcaaatagcaggcccaaaaggcttcactgataaattatctcaaacattgaaggcaaaaaataaaaccagacacagcaaagtaagtctctgatgaaacagagtggggaggaacacttcctaactccccgtatgggaccagcactaccctgaaatcaaaaccagacaagaaaacgagaggacagtgttcccaatgggcagacacacaaaatcctaaacaaaacgttagcaaattaaatccagttaatgcacaaaaagacaacacgtcatgatcaagcagcatttaagccaggaatagagggttactttcatattcaaaaatcagtctgtgtaattcaccatatttttttttttttggatggagtctcgctctgtcgcccaggctggagtgcagtggcacgatctccgctcactgcaacctccagctcccgggttcgagtgattctcctgcctcagcctcctgagtagctgggattacaggtgcgcaccaccatgcacagctaatttttgtatttttattagagacggggtttcaccgtgttggccaggctggtctcgaactcctgacttcaagtaatcctcccgcctcggcctcccgaagtcctggaattgcaagcgtgagccactggtaattcaccatatttacagaatgaagaagaaagatcatatcatttcaatagatacagaaaaagcatttgcaaatgtcaaaacccttttataacaagcactcttagcaaactaggagaagaaggaaaatccttgaacctgatgagggagtctctcaaaagctaccagatgacatcctgctcgatggggagctgctgggcgttttcctcctgtgaccaggaaggggcgcctgccctcaccactgccacccagtctcattcaacacagagtttgtcccctgttagaaaccgagacgttggttacacgtggaggttgggagtggctcaggcaggcagaggggcttctgggaacctggccatgttccctttcagtctgggcgctacttagagcagggggcagttgcttcaataaaactttagattcccacacaggccaggcgtggtgctcacgcctgtgatcccagcactttgggaggccgaggtgggcagatcacctgacgtcaggagttggagaccatcctggccaacatggtggggccccgtctctgttaaaaatacaaaaattggccaggcatggtggtatgcgcctgtggtcccagctggttaggaggctgaggcaggagaatcgcttgaacccgggaggcggaggttgcggcaagccgagactgcaccactgcaatccagcctgggcgacagggcaagcctctgtctcaaaagaaaaaaaaatctacacatccctcaccacactgtacataggacagctgggtgtaaattacatctccatttaaatgcctgtcatagttttatacaactataaaatatatacgtgccaaaataaatttgataggaacattggaaccaggtaaggtgacgcatacctgtagcacttcgggaggatcctttgagcccaggaagtcgaggcttcagtgagccatgactgcaccactgcactctggcccaggcaacagtgagatcctgtcctagaaagaaaagag

SEQ ID NO: 24112 - DNA, 5609 bp, Homo Sapiens
gcagctgtggggagatttcagtgcattgcctcccctgggtgctcttcatcttggatttgaaagttgagagcagcatgttttgcccactgaaactcatcctgctgccagtgttactggattattccttgggcctgaatgacttgaatgtttccccgcctgagctaacagtccatgtgggtgattcagctctgatgggatgtgttttccagagcacagaagacaaatgtatattcaagatagactggactctgtcaccaggagagcacgccaaggacgaatatgtgctatactattactccaatctcagtgtgcctattgggcgcttccagaaccgcgtacacttgatgggggacatcttatgcaatgatggctctctcctgctccaagatgtgcaagaggctgaccagggaacctatatctgtgaaatccgcctcaaaggggagagccaggtgttcaagaaggcggtggtactgcatgtgcttccagaggagcccaaagagctcatggtccatgtgggtggattgattcagatgggatgtgttttccagagcacagaagtgaaacacgtgaccaaggtagaatggatattttcaggacggcgcgcaaaggaggagattgtatttcgttactaccacaaactcaggatgtctgtggagtactcccagagctggggccacttccagaatcgtgtgaacctggtgggggacattttccgcaatgacggttccatcatgcttcaaggagtgagggagtcagatggaggaaactacacctgcagtatccacctagggaacctggtgttcaagaaaaccattgtgctgcatgtcagcccggaagagcctcgaagtatctaacatttggctggggagcattgagggacctcctggctggtgcatggcgccaggactagagtgaggccggagaggttcctaggatgcaaaattgaaggaggcatccctctcaggtgctgactctggccttgcacaaccctgagaatgatgcctccttagaggtggctcctcaggtgcctggcttgcctcaccctagttctggccctgctgctaggccaaggggaggggagctaatttagtgaataccaatcctctgccagaccccactcattgccagggtcatctactgatgtaaagatacagaagctcagggaaggatcggagttgatgtccaaagtcagcatacttggtttcaagggaggtgctgtatgtgttagagtggagcgggaaatgatcctaagctagtgagagacagccaggaacagagaggaacatgcaggcaccagaaccaaaaatggagggttttctgatcagaggttctggattctggcaaacagtgtgcatcaaggccagtgctgtgtaggagaggaaagacttgattgtgttgacagagagaggttgataagtgaggggttaaagttaaaccataacccagttagcaatcaggatgtggcctgtggactttgcctgtcgctagggccttcaggagttggctgtggttggctgggggtggggaagatggggtgaggatggaacatacctcatacctcaggccagagacctaagtctgtggaggcaccttgtctccagctggagaggggagcacggcaggtctgtgtgcttccttctcagaagtccaattcacagagaaaatcgagccattatgggggctcatgcagcttctccacccacaaacatatctatgtctcccccattcttatctctgccctgccatcctgaggcagaggaaggtcccttctgctctgggcttatctggccccctgtgcccaggtggtatccttctcaggaaccttacaacatggctctttgagctcactttctgttggtttctaccattcaatggatacgtttgctcaattctactacttaattactccagctccattctatgtctttttttcttcagctccattctgtgtctttctttttcttaagattgttttcctgagatacaattcacataccatacaatttgcccatttaaagcgttcagctcaatggttttagtacattcagagttgaacaaccaccaccacaatcacgtgtttctttctcaacatagccaaatagcttgctaaaggtctgtgtttggtatcttactgtctcatctcccattaactcctcagtgcactgcattctggcttattctacctctactccagcttagatcaccaatggcactgcaattatccatcctcagccttctctccttcagtagcatttatatgcactctatgttggacacagttccacacacacccatggatatacttagtcaactctacacaagttttccacaaatccttcatatgcaacatgtctaacctacccctgcacacccctcctcagcccatctccccaacctcagttgtctaactagatgcctgggggtgtgcttgattctttccctttcctagacccctaatctaacaggtcaggtcaacaagtccttgactcctactacagactcttgaagttgtcttccttccagtctgtcactgccgccttagttctggctgtcttcatctctgtcttgaactgtaggcctctaaccagtctctgctttctctctcagccactgctcctcattcttcacgcggctcttggtgccatctttctaaatcacattaagaactttctcttccactgctaataatctttcaatgttgttttcattgcctgcagaaaaatgccagattcttggttgagatagtcaaggtccttcctgacttggaccctgtcatctctccagcgaaattctccagcacacccacaaatgccacttttgtgccagacccgttgaactctttctagtttctaaaatcatcatcctgtcaggcctccagatctcatgcagaacatcccctctgtccttctccatattgtcttcccaacaaactggatgtttcctgtaagtcttaggttaaactttagaacttttgctggcaaattctcacttgctgcatatagaattggacacccttttttctgtgcccctctgttccccatacagacttctgttgtagcgcctacagcagcctgtggttttctgttgacgtgtttgtcttcttccttggaagcagggaccacacatcatcattcatctctgaatcccctgtacctagtgctgtctggccctgaggaggtgtttgctttatgtatttagaaagaaccatgcagatgagtagaaggttccatatgggcagaagtacctccggaggctttacttggtatcgtcactgtggggctgagtcttgcggcatgagttcttttgaagacaaccacttgccctaaggaagatcagcagcctctcaaatgcctgttatttctgggtccttgttaagccaaattttagaatagaattgttgatgtgaaaggaaactttactagaggtgaactgctagcctcttctcccacccaccttaatctacattttagggtaaacgagggggttagactttggttctcaatctcatggagacagtgtccctagtgtccagatatggggtggagtctggccttcccctccgcttcgtggcctggctggtgctacttggtatagggctgtggggctctcagctctttgctaaagtattgagaccctctccttgcttttctactttcccaagcactggtgaccccggcagccctgaggcctctggtcttgggtggtaatcagttggtgatcattgtgggaattgtctgtgccacaatcctgctgctccctgttctgatattgatcgtgaagaagacctgtggaaataagagttcagtgaattctacagtcttggtgaagaacacgaagaagactaatccagagataaaagaaaaaccctgccattttgaaagatgtgaaggggaggtgaacacacgcttcagcctaaaacactaagtagatgcaggcctgggccgttctcatacccccgggaaccatatcttacccattgtatgtcgcagcttgcaggccagtgcttggcacagagcagggactcaggaagcctttgtcactaaagtaagagcctctgcggagtacagtgcatggggtcggctgggacagccccaggcagcagatcctggtattgggctgaggaaagagcactgcgcttggagtcagtaagatctgccacctccctgagtctcatcagcaaaatgaggataaagataaagatactatagttgcccagcctgcttgacagggttgttgtaaggttcacataagatgatgatatgcaaatgctttgtaatctaggaggtgctatttgtctaaagtctaatggagaattataatacatccaggagttaaggagttctaatgcttaaaatgaaatagtctaagatcttagcaagaaaggattaagaaggacttttctctccatattgattttgtaatggagttataaataattgcttctagagactgagaaattgattggttttctttaactcctattctttcttttctttctttaattttaaaaaaactctttgaatagttacctttctctattttgggctgtttttgtcccaagagtaggattttttcccagtagagtgcagtggtccaagaatgggccactggatgatactgctttaccaacgagtgacaggaccatgaacctcacagttgtgaggttcaatgagggctggccctgccacataaatcctctgagggagatgatgacaattcactgctgattaatgccattctgcctttactgtaattagaaggaaataaccccagaatacaaggaatttagcaagataaggaacccctgctgctacctaaacatccatctaaacaaagatgtttggcttttgaagcaaagagtttggttcttaagactgtgttctttgacagttaattttcaagaagactgaagactgaattatcattgttgagaattctctaggtctcagtaaccctctgaaccagcagtttgggtggtcgatgcctagcaaataggagtgggtggccttttctctggtgtataagattcatctaatttttaggaatttttgtaccattttccccctctagaaacacatttactccccaataattgtacgggaggtgatcgaggaagaagaaccaagtgaaaaatcagaggccacctacatgaccatgcacccagtttggccttctctaaggtcagatcggaacaactcacttgaaaaaaagtcaggtgggggaatgccaaaaacacagcaagccttttgagaagaatggagagtcccttcatctcagcagcggtggagactctctcctgtgtgtgtcctgggccactctaccagtgatttcagactcccgctctcccagctgtcctcctgtctcattgtttggtcaatacactgaagatggagaatttggagcctggcagagagactggacagctctggaggaacaggcctgctgaggggaggggagcatggacttggcctctggagtgggacactggccctgggaaccaggctgagctgagtggcctcaaaccccccgttggatcagaccctcctgtgggcagggttcttagtggatgagttactgggaagaatcagagataaaaaccaacccaaatc

SEQ ID NO: 24113 - DNA, 6245 bp, Homo Sapiens
gaagaatatctctgctatgggcctgtactgtggtcaatacaaagatatgaactttcccgtcttctccaagagcctatcttcagtgcttcagtactgccagcaagggtgcatccagctatatgtcagaatggttttcaagctggacgaggaagataaaataactgcacaacttactcaaacccaggacaaattcagagagtcaaggatggaactttgggctccccagaggctgccccagacacgagggaaggccacagcaccctcaaaggatccagaccgagggtttcggagagatggacatcatcggcctgttcctcactcttggcacaatggagagaggtttcaccaatggcaagacaaccgtgggagcccccagccacagcaggagcccagggcagaccatcagcagcagccccattatgcatccaggccaggggactggcatcagcctgtgtctggagttgactattacgaaggtggttatcgcaatcagttgtattcaaggccaggttatgagaattcatatcagagctatcagtctcccacaatgagggaggaatatgcttatggaagttattactatcatggacacccacagtggctgcaggaagaaagagtgccaaggcaacggagtccttatatctggcacgaagattaccgagagcaaaagtaccttgatgaacatcattatgaaaaccagcacagtccatttggaacaaatagtgagacccacttccaatctaacagtaggaacccttgtaaagacagccctgcttccaactctggacaggagtggccgggggagctgtttccagggagcctgcttgctgaggcccagaaaaataagccatcattggctagtgagtccaaccttctccagcagcgtgagtctggtctcagctccagcagctatgagctcagtcagtacatcagagatgccccggagcgggatgatcccccagcttcagcagcttggagtccagttcaggctgatgtctcctcagctggtcccaaagcacccatgaagttctacatccctggtcccaaagcacccatgaagttctacatccctcatgttcctgtgagtttcgggccaggaggtcagctggtgcgtgtaggtcccagctctcccactgacgggcaagcagcccttgttgaactgcacagcatggaggtaaagaagacccagtgtccctggaatgctggcacactgcttacccaactactcctaacatgcttaccttgctttcctgtgcctgagccggggcatctccaggaatgggatgctcttgcgggaaactgggccatgtaccccctggattaggagggtgcgggaatgggtggggctcttctctgaaagaattgatgctacagttgtgtttttcctgagatgtcaatgtctcatctttagcaacaaaattcacttttttctttctgctttctccacaaggccttgagccatatcctagccccacggccttggggtctgacactagacttgactgaaaggggcctagggtggccacagtcttaaacacaaaatctgattgttttattccaggttattcttaatgattctgaagagcaagaggagatgagaagtttctcaggacccttgattaggtatagtgctgtaagagctgctgagtaagggcttttgaaacctagaaaatcttcctgcccagatcagcattttggagatttgttcttggtttccttggaaaaaaatatctgtccttgttggagtggaattctctgtgctgcaagatagaaccagatgtggcctgagtcattttgacaagccattcaatagttgaaggacagaaagaaaaattagcatgacagtttagaaatctaaaaccagttccattatgcagaggctgcatggttggaagttttagcattccgtgtgcttgatagatgttagtagaaaagtggagcatcgcctgggaagtcactgacaagtggatcatagcagaaacaattcttgtaacagtggctttttcctggagaggtaaataagatcggcagtgttcaagttacagaacagtgtgcaagtgagccctctgcagtactgaactaggactgcttttaaatgtctagttatatttctgataaatgtaactcagggcatctttgttgaggagagagtccttgctggatgacagcccacgtgggtctcaggctcaggcgtcttactgactaggaataccatggtggacaggtcagttagccctctctgaaccttagttttccccttgagaaatggtataacacctgctctccctacccgaggcttgtctatgagtctcaagtcagattatgcacatggaaagtatcatcactactatataaatgtattcctcaaatggcatttgacggttccctcaagtaaaaatgagtgttatctctttcttacaaacaggtatacagatatggggcaaaaaagcgagttgggtattcaaacactggggtactaagcctaacttggctttgatgttattggataatcttgagcaaatcataatgccaatcatattgatcacttaatatatgccacacaattttctaattcctttttgtatggaggtaggtccttttactgtccctattttaggggacaaagctgaggctcagaggaggtaagaaacttgtctaaacagagaagtggcagagccagatttagatccagggttgtctgactccaaagtctgcttttacttgctttcctgtgcagtgacttcaggtctctgagcctctgtttcttcatctataaagggggtgcatgagagaatctctgaaatttcttcttgttctataagaaaataactatcctatagctatagactcattaccttagccctggcttgtcagatttctatctcaatcacagcccagccagcacttgcacacttaggaggagcctggggtccgaaacagggaagtgtctgcctgctcactctttgctccctaaattttttccatgtagggaagatgtacataaggtggatattatgacgttttgccagcagaaagcagctcagagctgcaaatctgagacactggggagcagagactcagctctactgtggcagctcttggttctcctttgtcgccagaatgggtccatggtggggtctgacatcgctgagctgctaatgcaagactgcaagaagctggagaagtacaagcggcagccccctgtggccaacctcatcaacctgaccgatgaggactggccagtgctgagctctgggaccccgaacctgctcacgggagagatcccccccagtgtggagacacctgcgcagatcgtggagaaattcactaggctgctctactatggaaggaagaaggaagccttggagtgggccatgaagaaccacttgtggggccatgctttgttcctgtccagcaagatggacccacagacctacagctgggtcatgagtggcttcaccagcacgctggcgctcaatgacccactgcagaccctcttccagctcatgtcggggaggattccacaggcagccacgtgttgtggagaaaagcagtggggagactggaggcctcacttggctgtgattctgtcgaatcaggctggggacccagagctgtatcagcgtgcgattgttgccattggggacaccctggctgggaaggggcttgtggaggcagctcacttctgctatctcatggctcacgtgccctttggccactacaccgtgaagacagaccatctggtcttgctgggcagcagccacagtcaagagtttttgaaatttgcaacaactgaggcaatccagaggacggaaatcttcgagtactgtcagatgctgggccgccccaaatccttcatcccttctttccaggtgtataagctcctttatgcttcccgtctggcagattatggcctcgtgtcccaggctttgcattactgcgaagccattggtgcagctgtcttgagccagggagagagcagtcaccctgtgctattagtggaactcatcaagctagcagagaaactgaagctgtcagatcctctggttttagaaagacgcagtggagacagggacctggagccagattggctagcgcaacttcggaggcagctggagcaaaaggtagcaggagacattggggatcctcatcctactcgctcagatatttcgggagccagaggaacaacaacagaaaacactttctaccaggacttttctggatgtcaaggctactctgaagcccctgggtaccgctcagctctgtggctgacacctgagcagacctgcctgctccagcccagcccacagcagccctttcccctccagccgggctcctacccagcaggagggggtgcagggcagacagggacaccgaggcctttttactcagttcctgagacccatctaccagggactggcagcagcgtggcagtgacagaggccactggaggaacagtctgggaggaaatgctgcagacacacctgggccctggagagaacacagtgtctcaagaaacttcccagcctcctgatggccaagaggtcatttccaaaccacagacaccattggctgctagaccacgaagtatttctgagagttccgccagttcagccaaggaggatgagaaggagtcctctgatgaggctgataaaaactctccccgaaatactgcccagagaggcaagctcggagatgggaaggagcatacaaagagctcagggtttggctggttcagctggtttcgatcgaagcccaccaagaacgcatcccccgctggagacgaggactcctcagacagccctgactctgagcaggagacccccagagcatcttctccccaccaggctggcctgggcctctcactgacaccttcccctgagtccccacctctgccggatgttagtgccttctccaggggcagaggtgggggtgaaggccgaggatccgcatccagcgggggagcagctgcgggcgctggggttggaggcttgtctggaccagagagtgtttcctttgagctctgctccaaccctggtgttcttcttcctccacctgccttaaaaggggctgttcctctttacaacccatctcaggtgcctcagctgcccacggccactagcctaaatcggccaaatcgcctaggctcagcgtcgctatcccacccagccatgctgagaataaacacacgtcccaggctcatctcccaggactgaaactttcttgctctctttttctcaatctcccagcccctctctaccatattgggaccctcaagaggtttgtgctagcccgatgcctccaccgggcacttagaaggcaagaggacaggatctctcaagacacagcacaattcagtctcttaagattaacttcacaatgatggaaattatttcatcaggtggaaagtctgggtctaatagcagactgcacatgagcagagtgacatggtggtggcacttatggtggtggcttgagagccttggggaaattagggccctaacagctagaatcaaagatgataccgcagggccctgtagcaagaaatgggaagcagggggaggggcaggggctcagaacaatattctagaccaactttgactacttcctgtcttagtaatagaccaatacatggctctatttagcaaagtttttatactgaaacttgattattgctgccctttataatttcctcttcaatgatatttcagcagtttccctcttggtcctagttttgtgcacatttttttgaatgtggttcagattaattatatttctctcactttcttagctggtcctattttttcacattctggcatgtggctatcaagttagattgctgtaggcatcatattgtcatggtaactactgaacctaatgatgcagatggatggcacatcagtataataaatgatggaaaacggttcctaaaaattcatccctttcataagaggggaagaatgagtgcctgatattgttaatacctccctttctacctcaggcctttgcaaattgatgttcagagggtcactggagtgagagggaggaggggggcgtcttggaaatttccatttctcttttcaaacccaaaataggaatgactcttgctgtttgtcagatttgctgaaaattgctcctcacaaagaacatttttttttgtacatgtaattgtaaatttaggtttagtacgttaatgttctatagttctgatgttgataataattaaacccagataattttatagc

SEQ ID NO: 24114 - DNA, 5753 bp, Homo Sapiens
cctggctcttaaaagagttttgcttaatttataaatcccccaactacggcagctaaaagaggcctttctgcatttgctgataggaagtcagggagatgggaggggtgcctgcttgggaaagcttgtccctcccctgggatacttggcctgtgtctctcccctgtgccagccatccctggcttggggctctgcggagttcagcccagcaccccccttccagtgacctggtctcctctctccctcgcctacccgccttgcccagcctgggctcttggtgggggttcccggaatggtgaaggggctacatgaagctcaccagctctatggcaggtaacaaccctccccctggggaccagggacccccgtttgcatctctccttgggtggccttctcctacttccctggattcttcctttcccaactccccctcctaatatccccttcccttgccaggactctccttcccaggaacccccctccccccggacccctcctcattcccccaggacctcctccaccccctgctctccggcccccccaggctgccatggtcccaagtcctggcctttgcagcagctgtggcccaagatggcttcaacgtgactcatgatctaggtcagtggggcctggggatttgggagagacatgaggttgatggagaagggtagaatctttgagatttggagcccaagccagagaggccctctcttccagtttgctcctcagaccccctccccaccttatcccaccctcacctggaggcggcctcaaacgagggggtctgggaagggcccttagacatccctgcctcgcacttaacaggctcctgggggtcagggcacttagggtgggccactcagcccccatctaccccatctattgcgcgtctcatccggtccagtcctggcgtcccgccctgcccagcctcccgtccctgcccctagcccgtgccctggctgaacagctgccacccaacatgtccgagcgcttccgggagacgttcctgccatcgggccgcccgccactacctggctcgttgctgcatcggcccgacctggctgaggtgctggatgtacttggcacctccggcccggctgccttctacgcaggtggcaacctcacactggagatggtggccgaggctcagcacgcagggggtgtcataaccgaagaggacttcagcaattacagcgcccttgtggagaagcctgtgtgtggcgtgtacagaggtgacctctcccccggctcccagggtcccccctcaggagaagcctcccagtccatggccacatcgttttggcctagagactcctctccatttcacaggagagaaactaaggcagtgagctacctgggcagtcaactgttgaagcaaaccagagtcagcccaccttctgaaaagtagctgtggggtcagttaccccaagtatttaggatattggggggtggacctggtcaaagggtccaacctggaagttggggttctggccataggttttcttgatttgggctctgtgttgcctctgccctttccccagcagcgctgtcactgccctgtacttcctaagaatttttaagacaaagtccatccaagcttcacagtagaatgaacctttcaagacagtcatagacccagctcctcatagtgccaaaaagaaattgaggcccgaggagggaatataacaactggccaaactcaagaaaaccaacagggaacccagaaaaccaagcttatgacatgggtggggtccatgtttactgaacccaaggtggtaggtgctggatttctcagaagattctcaggttctttcccttctaggagagccagatcacatcaagccccaggaaagggtttctctgagttcaactttccaggcctcaatctccaacctgattcctctgccagaggcagtggaatatgaagcaatggaaagagcctatcagctgggtgcagtggctcaggcctataaccccagcacattgggaggctgaggcaggaggatcacttgagcccaggagttcatgaccagcctgggcaacatagtgagacaccgtctctataaaaaatttaaaaattacccaggcgtggtggtgtacctatagtcctagctactcaggaggttgagatgggaggattgcttgagcctgggaggtcaaggctgcagtaagcatgattgtgccactgcactacagcctgggtgacagagtgagaccattatcacacacacacacacacacacacacagaaaagaaaaaagaacaagcgtagcgttggagctaggaagacctgggtttgagtaccaactgtgccatttaccttgaacaagctacttcccactctgagccttggttccctccttaaaatggaaataataatagtgcctacatcttaggatgcccataaggatttgatgagatgatgtaggaagttgccctgatcagagcatgcactgaatatagattttccatttccccttcccagcctgggttgtctcaacaatgctagtaccttgagtgctctggattccccttgtctctctgtaccacagtttctggacctatcaaatatgtgtgataacagtagccacagtgaggactaaatgagttaatgttagtgttatgcatcagctattattcctttgatgtccaaacatctagtaacagaataggaagagaaggttgctgctgccaagaagtttggggctggatgagaccatcaggagtcatggataatatcctggcctatgggagagctaaaaggagacacatgacaggccaggaatatgaacatctggtcacctgtttctgctgtgctctgctgatagcctgcagtgtgactctggggcaagccacagccctcttgagccttagttttctcaaatggcagaggaaactgaagaccagtgttctgagttcaagtcctggccctgcccttgacttgccatgtgaacttgaatgagtctctttgcctctcaatgtttcagtttccccatctgggtgagggagttcagcgcagtggtctcagtgtgtgatggtggaatgtggagatgggatgtgggatgtgaaggtgccttgacccctaccctgccatcagtcacttcctgtcctttcaggccacctggttcttagtcccccacctccgcacacgggccctgccctcatcagtgctctcaacatcctggagggcttcaatctcaccagcctggtatcccgagaacaggctcttcactgggtggcagagaccctgaagattgcattagccctggccagcagactgggagatcccgtctatgattctaccatcactgagagcatggatgacatgctcagcaaggtggaggccgcctacctccggggccatatcaatgactcccaggcagcccctgccccactcctgcctgtctatgaactagacggagctcccacggctgcccaggtgctgatcatgggacctgatgacttcattgtggccatggttagctccctgaaccagccctttggcagcggccttatcaccccctcgggggatcctgctcaacagccagatgctggacttctcctggcccaaccggacagctaaccactctgcacccagcctggtaggatttgcttccctgctttcctggggaccctgaggcctataggtaggaggtgcaatggcatggctgcccctttctccctactttctccagaatcttctagtataaggaagcctaaagaagaggttcacctcatccctagccctgctaagtctgggacatggagcctggtgggtctgaagaacccttgtcccattctgtcactgtcttactgtgtgaccttgtgaagatcttgccctctctgggcaatttcttcacctgtacaatgagggttttggctcctatttgatgttttgggcattttccagcactagcggtctgtgactatgtgagcttgagctgatggggctcagccctatggttgggcaccaaagagggacccaaggaggaaggatttaataatttttatctagttaaaaatcagcactcttacaccccgccatctggggccccagcagggcaaagacacatagagatgatcagggtggggttatcctgttcttccccattgccatctttcttggcttggtcctttctcctgtgacccgtagcagcctcatagctcagtggatgtacttatcactcccccatccaccccacccatccaggcaccctacccatttcacagatagcaaactgttgtctgggaagggaccagtctcccaggaaaactgggcctgtggaagatgtagaagagggagagcagttggaagggttgtggaggggccctttcccggtcttgtcccaccccacctgccccttgtggtctctgtcctctaacaacaggagaattcagtgcagccagggaagcggccactctctttcctgctgcccacagtggtccgacccgcggaggggctctgtggaacctacctcgctctgggggccaatggagctgcgcggggcctcagcggcctgacacaggtgaggtttacgccatggttggcctttttcagccgggagccaagctgtggcctagactgcagatgcctgtcatatctgtggcttgtttccattcctcatgcggcaaacatgggctgaggctgttttgtgccaggcgcatcctgggcaatgtggacatgggctgcgctgagtttcttagtgaaaatggagccctgatgctccctgtctttcccggttgcaggggaaatggcagggtcagtagattgaaaagtggggttagcatctgggtggcctgggttctgttaacctcaagtcccattatacctctacccagcatctgaatagacaaccagccctctttagggtgggatttgaaaggaagggcctgcttttctccagaacacctcagaatggctccatgaatgtcttgagaacctgatatatatgccaggcacctattttggcaggtggtgagttaacgatcttaagttctggaatcagacactcctgggttccggcccaagtgctaccaatttgtaactgtgtgatgctggagcattcacttaacagctctgaacctcagtctcttcatctttaaaatggaaataataacaatagctaacatttaaagagttcgtactaagtgctgggcactgtgttatgtgtgttaaccattttaaccttcccagttctggagagaatccttatttctattttatagatgaggaaaccgaagcccagagaggttaagactttaggtcaagtaccttcagctagaaagagcagggaggcagtttggttccagagcctacgcacactcctaaccactaagttaaaagcacccacattgtgccctagaccactcctagctattaaccttgccctatccagagagaaaagaagggagccccgggctagattaaagagacttggttctagtggtgtatcttccctggcttcctctaaactctggagtaagtcattttccttgctggacttcactttccctctctgtgaaatggaaacagtcatcacaggcctgcctgtcttccagggctgttaggaggctcagatgacacccggtgtaagaattctcaagactaaggagcctggaccaagggtgagagctgaggaatcctggaccatcacccctgggacagccctgatttttctgtaccttggctaccacaggttctgctgaatgtcctgaccttgaaccggaacctgagtgacagcctggcccgcggccgc

SEQ ID NO: 24115 - DNA, 4333 bp, Homo Sapiens
ggctggctttctttccacgagcatggccagatgacgaggctcacccgcagcactactcacacctccaggaagggaagttgatggcagggttctggctgcagccaggcctgcgggagcttcctccctgatctctctcactcaaggggaaagctcagggctgggcatgaaggctggggaaaggcagggaaggcagagtccccccaggctggtcaaggccccgatagccccatgtctccctgagggggcggctttccccatgaagagggtcctggtcaccaaggcatgaggacatgcccaaggctggcccatcacaacaggctccagctcttgtgcacatgtgtgatcttcttgtcccaccaaaggcgggaaaaagaagtgcgtggcctcctgccccagatttggtggtagggtcagtggtgctgacctcagtgctgtgtgataccagccccccagcctttgcctggttcatgtcccacatcgcctatcggtccccgctccttcagtctgggaccttggcctgctcagtccttctgtggggagccacatccattcacagtgactgttgagtctaatgacagacacccaagtgctgcaaagccagagcagcagcccctgaaagggtgactctggggtctcaccccatccccactcctgccctgtcctctggtgagggcttccctcctgctgcctcagactgtcctgtctaccctcagagaccctgttgggaggcttccctccaacaaggcaccgtccccagaggagaagggagcccagcactcctgggactgtggggtccttggtccactcaccactgccacatgcctcagggagccctcagagcaggggctgagctggggccccagggttcccatgccctgggcgagcatggtgccctcttacagcctgggctgcccgagtgttccaggcatcctgtcattcagcagagatctttcctcggtgccttctctggattgggtgggctgctgagctctggggctgctgcagtgaattatttaatagatgggtgcttccctgctctccagggtccccctctgggagagccagcacaggagctaaccagtcagaggagaaggcggtgtagaccaactggtgcagggagaccatgggggtgctgggcaagacagggacttggcggaacacatgagatgaggtagctgggaggttgtctttaagctgagacctgaagggtgattgatagagagccaggccggctgcagcgtgggaaagcctgcgcacctgtccccaaaccccagcggtccctcccatcccacccaccctctgcaggctcgtggaggagttcatgctcttggccaacatggcagtggcccacaagatccaccgcgccttccccgagcaggccctgctgcgccggcaccccccgccccaaacaaggatgctcagtgacctggtggaattctgcgaccagatggggctgcccgtggacttcagctccgcaggagccctcaataaaagcctgacccaaacatttggagatgacaagtactcactggcccgcaaggaggtgctcaccaacatgtgctcccggcccatgcagatggcactgtacttctgctcggggctgctgcaggacccagcgcagttccggcactacgcgctcaatgtgcccctgtacacacacttcacctcgcccatccgccgctttgccgacgtcctggtgcaccgcctcctggctgccgcgttaggctatagggagcgactagacatggcgcccgataccctgcagaaacaggcggaccactgtaacgaccgccgcatggcgtccaagcgcgtgcaggagctcagtaccagtctcttctttgctgttctggtcaaggtgagccctccagcctggtgcccctcacctccctctggctcccgaccctcctgggcacctgctcaccaggaggcctcgaggagcccagggcagtgccaggaggtgccatggctgcagcactgtccctgcaggagagtggccccctggagtcagaagccatggtgatgggcatcctgaagcaagccttcgacgtgctggtgctgcgctacggcgtgcagaagcgcatctactgcaacgtgagtgccctgggagagcccgggggcgggcagggcagcccaagccatcccgcactggaggggcacaggctgtgatgggtcacactccacccctcgctcccccagccctagcacaaagcccacctgatgggccttgctgagacgcccagctctcccacctgggatggtggctccaggcccagggtcaggcctggcccccttccccaaggacccaggaaccagagagcaggcccctccatggccagtacagctcggcagggtgtgcaggctttggggactgtgtttataggaacgtgaaggaatgaaaggccagcgaatggtccgtggccgctttggaaactgtgtcccctgaagacaaggaagagagctgtccctggctcggctcctgccctgagtgactgttgactcacagttctctctccaaggggacatgggcctgtcctaatgctgccttaggggcttggctccagctggccctggggtctgcaggtcaccacctgcctctgtgcctggctttgaatttcctaacatccagagtgccctgggagtacagtgtccagcccgttgtgtgcagtaaacgtggtgttcataaccgggagctgggcagaagaggaacgacagagtccccctgcggaccctgggggctctgtatcctgaagttcaagcctagctcaccctgctgtgggcccagccctgcctgcactgacagatggcaccagcagggggcgcagcgctccgccgccacagttctctgtccccacctcagtgcagtcagccctggaccccccaccacttgccccccatagcacacagagccacgggccttcccagcccccacccctggcccttggtcactctcacctgctgcctcagctgaaggtggcctggcagggcctccctgaagctccctccagccaggcaagggtgggccagggccgagggctgggggccgcctccaagcattgaagccctccaggggtggaagggcaggcagcagcatccagagctgaggcctgaggcttggtgtttgcactccaggcactggccctgcggtcccaccacttccagaaggtgggcaagaagccggaactcacgctggtctgggagcctgaggacatggagcaggagccagcacagcaggtcagaacccctctgtgtcccagccccctaagtcctgatgacccctctcctgcctcctgcggtgcccctcattccttcatctgtgtcccctgggctcccccagcactgcagcctcccgggtggggttttagggccctcccagctcacccagaccccctcctgtgggtcctgctttctggcaccaccttcccttccttgggggcaaccacagtggagagaggaggggctctgcctgtcccgctaatgcaggggtgctggccttctagggtcctttagagaacctgatgaaagctatgagtttacacccaagaaattgtctggaaccgttttcaccaacagtgtgccctgaacgcggacccaggccctcaggttgtgtttcataagccttgggagcgctcaggatgcatctgactccccaactctgccctgacccagggcattcttcctggagggggcccccattacagacaggcgagcagaggcttccagaggccgaaggaggggccaggggtcctgctgcagggatggaggcagagctgcgcctcgacatcaggccctgccatccttgtcccctcacggctgggctctgcacaggtcatcaccatcttcagcctggtggaggtggtcctgcaggcagagtccacagccctcaagtacagcgccatcctgaagcggccaggcacccagggccacctgggccctgagaaggaggaggaggagtctgacggtgagcccgaggactcaagcaccagctgagctccaccagccgcctgccccgcctgccccgcctgcctgtcccgccacactggctttaggacctgttgacacggaggggggtttttaatttggtttttaacaactcaggggtttgtttttatttttatttaatttttgcagctcaacttttaaacaaactgcaggggagagggtggggctggaaggaaggctgaggcctggtcagcagtgaccccagcagagcaggccccagtcctcctgggaggctggccccccttttttctgggccctactgccctcctctgcccaggaaatgggggggtttcagcaactcagtgtcacagaataaaatcaagtgtggagtgcc

SEQ ID NO: 24116 - DNA, 6655 bp, Homo Sapiens
gtctcccgagaacctcaccccccggtattcccctcaccctgaagtaagggagtctccctcttcccctcagctcctaaccaaggtgctcagtaccgcggctagggtgcccagcgggaggctgggtagttaccggaggaggcagagccggtcgcacgcctgggtcccagcggaggcccagtcgactctcgacccgggccccagcctccttgcgtggcgaaggtcgtgcctcaggtctcctggcgaacctggccgcccggaagcggagagtgactcctccccttcgtcccctcggtgcccgccaggcggcgccgtcggctgggcccggattcccctgcggcttcgatccctttccactgggtattgagattggcgaggggagaggcgcagaaacggcgtgtaagagagcctgactaccaattggaataagtttccctcctgactgttcacatgtacaggcagcattagcatttcctgcctgtacatgtgaacgttcctatgctctacccctcgaagatcctgattcagtagatctggggtgggacctcatgaaacggcgtctccctctgttgtccagactctagtgcagtggttcaatctcggctcactgcaacctccgcctccccgattcaagcgattctcctgcgtcagcctccccagtagctgagactacaggtgcccgccacccatttttgtatttttagtagggacggggtttcgccattttggccaggctggtctcgaactcctcacctcaggtgatccgcccgcctcggcctcccaaagtgctgggattacaggcgtgagccaccatgcccagcctggaaataggaggagagtaatattgcgaggggttggctgtgaaatggtttatctccaggaaggtttccgggaggaagtgattctagctgggcttgtattcagggaccagaatatccactggttctttgccccacagtaatgaatttacttccccacccctatcaggatgcagaaagcctcagtgttgctcttcctggcctgggtctgcttcctcttctacgctggcattgccctcttcaccagtggcttcctgctcacccgtttggagctcaccaaccatagcagctgccaagagcccccaggccctgggtccctgccatgggggagccaagggaaacctggggcctgctggatggcttcccgattttcgcgggttgtgttggtgctgatagatgctctgcgatttgacttcgcccagccccagcattcacacgtgcctagagagcctcctgtctccctacccttcctgggcaaactaagctccttgcagaggatcctggagattcagccccaccatgcccggctctaccgatctcaggttgaccctcctaccaccaccatgcagcgcctcaaggccctcaccactggctcactgcctacctttattgatgctggtagtaacttcgccagccacgccatagtggaagacaatctcattaagcagctcaccagtgcaggaaggcgtgtagtcttcatgggagatgatacctggaaagaccttttccctggtgctttctccaaagctttcttcttcccatccttcaatgtcagagacctagacacagtggacaatggcatcctggaacacctctaccccaccatggacagtggtgaatgggacgtgctgattgctcacttcctgggtgtggaccactgtggccacaagcatggccctcaccaccctgaaatggccaagaaacttagccagatggaccaggtgatccagggacttgtggagcgtctggagaatgacacactgctggtagtggctggggaccatgggatgaccacaaatggagaccatggaggggacagtgagctggaggtctcagctgctctctttctgtatagccccacagcagtcttccccagcaccccaccagaggtgaggcctgggatgttcctcatctgttctcccagtaatcagcccatgttaccattacagcatcctcatgaatacctctattttaggcccccaaatccatgatcctgggtatcctccactctcatttcttacctaggcccctatgtctgccatcccaaacattgacttcagctttgtgatgaatctgttgaccactgtcattttcctttaggagccagaggtgattcctcaagttagccttgtgcccacgctggccctgctgctgggcctgcccatcccatttgggaatatcggggaagtgatggctgagctattctcagggggtgaggactcccagccccactcctctgctttagcccaagcctcagctctccatctcaatgctcagcaggtaggtaagcgggctgggtttccaggtgacagagctagggtgggcatgaaagaagcataatgaaccactcttttgtcctttgactagtcttagtcccaccttccatacctatccctcttccgttatccctcccttccccgattctggacagagtttgggtccttgacttccaggtacccccttttgtaatacctattcttgcctctgccccaatttatgtctctgacctgttccccttggcctctgaccttttctctgccaggtgtcccgatttcttcatacctactcagctgctactcaggaccttcaagctaaggagcttcatcagctgcagaacctcttctccaaggcctctgctgactaccagtggcttctccagagccccaagggggctgaggcgacactgccgactgtgattgctgagctgcagcagttcctgcggggagctcgggccatgtgcatcgagtcttgggctcgtttctctctggtccgcatggcggggggtactgctctcttggctgcttcctgctttatctgcctgctggcatctcagtgggcaatatccccaggctttccattctgccctctactcctgacacctgtggcctggggcctcgttggggccatagcgtatgctggactcctgggaactattgagctgaagctagatctagtgcttctaggggctgtggctgcagtgagctcattcctcccttttctgtggaaagcctgggctggctgggggtccaagaggcccctggcaaccctgtttcccatccctgggcccgtcctgttactcctgctgtttcgcttggctgtgttcttctctgatagttttgttgtagctgaggccagggccacccccttccttttgggctcattcatcctgctcctggttgtccagcttcactgggagggccagctgcttccacctaagctactcacaatgccccgccttggcacttcagccacaacaaaccccccacggcacaatggtgcatatgccctgaggcttggaattgggttgcttttatgtacaaggctagctgggctttttcatcgttgccctgaagagacacctgtttgccactcctctccctggctgagtcctctggcatccatggtgggtggtcgagccaagaatttgtggtatggagcttgtgtggcggcgctggtggccctgttagctgccgtgcgcttgtggcttcgccgctatggtaatctcaagagccccgagccacccatgctctttgtgcgctggggactgcccctaatggcattgggtactgctgcctactgggcattggcgtcgggggcagatgaggctcccccccgtctccgggtcctggtctctggggcatccatggtgctgcctcgggctgtagcagggctggctgcttcagggctcgcgctgctgctctggaagcctgtgacagtgctggtgaaggctggggcaggcgctccaaggaccaggactgtcctcactcccttctcaggcccccccacttctcaagctgacttggattatgtggtccctcaaatctaccgacacatgcaggaggagttccggggccggttagagaggaccaaatctcagggtcccctgactgtggctgcttatcagttggggagtgtctactcagctgctatggtcacagccctcaccctgttggccttcccacttctgctgttgcatgcggagcgcatcagccttgtgttcctgcttctgtttctgcagagcttccttctcctacatctgcttgctgctgggatacccgtcaccacccctggtaaatatctcagctctgattcacttaaagacaatagtgatgtgagttcggcccctcttgttttcaaggaggtgttgctcctcatgttcctgagcttgacagagggtcccatgccccacacaactaggaaggtcttcttggtgtcctctctcttacctgccatagccaagcaaattgatccctcctgttggttcccagggttcatggagaggagagacaaggagtcctctaagactccctgtggaaatgctgcatcctcatgagcacatttcttgattttccagtgatggaagtagtaaattgtgaatatataatggcactgagctgtatgtgtttgagagaaagaaagagattggccatagcaggattcagataagcctgatggcgcttttgtaccacagagagaattagaataacagaatgttgactgtaaggaggttgggctgataggcatttgagtgtgtatgagaattgatactgaagtagtaggagtatatgattgtggagcagtagcctatggattagggaataagaagtgactgtaacgtggcatatcttttcttccaggtccttttactgtgccatggcaggcagtctcggcttgggccctcatggccacacagaccttctactccacaggccaccagcctgtctttccagccatccattggcatgcagccttcgtgggattcccagagggtcatggctcctgtacttggctgcctgctttgctagtgggagccaacacctttgcctcccacctcctctttgcaggtaccccctcctccttcacttgcttccattgtttactctggctttgtggaaagaaaggaaacccctggatttgaatggagagatatgggtttgttggatctttggcaccccttggcctaggctaattggaacctgagccagccagggtggcctgttgattccagccataccctctcttgaggcagtaggttgcccactgctcctgctctggcctttcctgtgtgagagtcaagggctgcggaagagacagcagcccccagggaatgaagctgatgccagagtcagacccgaggaggaagaggagccactgatggagatgcggctccgggatgcgcctcagcacttctatgcagcactgctgcagctgggcctcaagtacctctttatccttggtattcaggtgggtgtaggagagagatcagggagttggtgttttttctctgtgtgtgcatcactttctttcagaccttcaaaaccgtgggagagagccttgactgagtttcacataagtgaagtggttgcccaagcccagtggcctcaaatggcagttctgagacttgaacctgggtctccttaatcctagtcctggatcatttcccctctacaacctagatctggaccccgctagttgcatttgaggattactctatcagtggacagactggaaaaactgaggtgatagccaggattttcttcccaaactgtggtcatggatcctcttcctttcctccagaggcagatgtggcactgatatcttcctccatcctgggggcacagcctgagtgttagcattgcagatggatactgacttgcccaaagtcacatagtgagtcagtgcttggggcagggcaggaagtaggtctcctaactcctagcccaggacatgcaatattttttccactgacatgcactattctcctgcttccattttttacaggggcctatagaaactctccttttgctccgcttcctcctctccttcacaagtaacgtggcccctcctctcctcctctagattctggcctgtgccttggcagcctccatccttcgcaggcatctcatggtctggaaagtgtttgcccctaagtgagtagatttgcttgagaagtagaggtggtggggagggagaaacttggaacaaagtatgaagatcctaaacatccaggatggccaaggttttgcctctacagggaaaaggcagtagacctactctgttgcctgagattctccgcctttctttgcaggttcatatttgaggctgtgggcttcattgtgagcagcgtgggacttctcctgggcatagctttggtgatgagagtggatggtgctgtgagctcctggttcaggcagctatttctggcccagcagaggtagcctagtctgtgattactggcacttggctacagagagtgctggagaacagtgtagcctggcctgtacaggtactggatgatctgcaagacaggctcagccatactcttactatcatgcagccaggggccgctgacatctaggacttcattattctataattcaggaccacagtggagtatgatccctaactcctgatttggatgcatctgagggacaaggggggcggtctccgaagtggaataaaataggccgggcgtggtgacttgcacctataatcccagcactttgggaggcagaggtgggaggattgcttggtcccaggagttcaagaccagcctgtggaacataacaagaccccgtctctactatttaaaaaaaagtgtaataaaatgataatataat

SEQ ID NO: 24117 - DNA, 5592 bp, Homo Sapiens
cagagtgagaccctgttgcccaggctggagtgcagtggcgccatctcagctcgctacaacctgggcaacagagtgagaccctgtctaaaaacaaacaaacaaaaaaaaatgtggtaagatacccatcatatgaaattcaccattaaaaaatagcagggagcatcgtgaatgcgaagtattgatgaggatgatggtgatgttccagaaccttctctgacaccagcctggcgccccccccccccccagccttacctttcctggcttcatggtgctcatcatactgtactgcaaatgctggtttcctccttctcgccagctagacccgtggtaccccacagggagggaatggcgactcacccaccaggcgcttaataagtgtttgttggccagtggacctcctacgctccctggggagagggactgggactgggactgggactgggacgtgtgtacacacctgcagcctacaagactcggtggggagggtgcacagagcctcgaccctgtaagagaggcgatcgggctgaggaagacggggccactggggctggatggatgggacggacatgtggagagggtgggttcgtggatttgttcacccgttcatttattggtttctatgcatccatccatctttcacgccttgagcgtgcgttctgggcagggcctgtaatgggcaccgaatgagtaacatatcgtctctcccttcaaggtacacgcagcctgggtgggtgaggggagagacggtagggtgacatgggaacagtttgggggttgggaagcgctcttgttaaaaattcaaactttgggtcccctctcagatttataaacctaaacgtttggctggtggacctaggactccgcgtatccaggcaggatcctcccctgattggggtgcacgatgacgtcagaacacctggataacgtgataacttgtgggccaggggctttggaacctcaaagaatgttataactttttggtcaggggctttggaacctcaaagacctccgcctgggagatcggggacagctcccggaggaggtgacatctgagtgttaaacacatccgtgacaggcaatgagaaaataaggtgggtcccctgtgctgatcggccctaggggccgcggcggctgtcccggccgggcagcgtcgccttccgaggtgtcttggcctgcggggcactcgtagccccccgctttcccaggtgaggcacgtcgtcgcccagcgacccaggttggagtccccgcttcagccgccgcggcggatgcggcggccaggcttctccgggccagggcagcgttgcacgtgtggccccgctgggccccgagcagctgcggcaggtcctgaagcgggtgacgaaggcgcagctgctgccgccgcggcccatcaggccgccctccagcgggaccctggcgccgagcccccgtgcccgccacgcctgctgccgccccaggtgaggctccgggagcgacgtggggaaactgaggcccggagggggccgaggccccgcggcggggttagctgcttggccggggtggcccagtatccggccccagtcaagactcagggtgtcccgaagctgagccccttagggacggcgttcggcccccacctgccaccaccctggcgttttcaccccaggagcctcacttgaggagccgatgctcacgctgggccctctgcctgggacgccgtcgtgccctctctgcctccacagccctgcccggggctcccctttgctgcctagctcgtctgacacgcctttgaccactcgttcagcctctgtggggcactcagagacggggttgcccgcactcccacctaagtgcaggaggtgcggccttcaacacactcgaagaacgaacatcaggcaggttctgggagggacagggggccgctttagagtgggtggggcccgtaggccagacgctgcccctgagacctgaatgaattaaaaggaaccaactgagcttttcaggtctcaggcacagcaagtgccacggcccagcattttcttctcttcattgctgcttctcagcattttctttctctctctctctctgtctctgtcactgtttttgcatacagatactatgcttttggggtgggtactctcattgtccttccaggggtcctacacggcgtctgtaaaattccatctcatttcattgctggcgctgtaaataaaattagtcttaacccaaaattgccaaaagaagagggctttttccactagaagagatgcgttagagaatagaatcagcgatcttcactcctgagttttttcgacttcactcgtgattttagctgcctggggttgttgtatccagttcatcatcaagagtggagagttgtcttgctaaggtttaggaaggcaagtatgattctgcccaaatgccacactatctagaggtgtgaccttgggcaactcgacctttttggactgtggtctgggtccgaaggctgcaagacgccatcccgggacagccatctgctgagcctctgctctgtgccgggcagtgttctgggttgcttagctcgcagtagtgtttttgtaccagcattttgcagggaggttgagtggctttgtccaagatccctcaggtgtggctgctctccagagcccttgttctccccagcacaccctgctgtatgtggccacagctttttgggtttggaatggagtcaaaaaatgacatacttttcataaagtaaaagcaaacttagtcaagatcaggcagcatgatgggacttattctgtagctaatctgatggagacgtataaattctacctccaataatgtacctttgtagcacattctgcgaatactttttcagccccagctgtgtcgtggaagccacgaagtcaaaccggatgtgtactttgcccctcagtagctgatgaactaacaggagataaaacatgacccagatacctgctaatcaaggcctgaaagctagtgatgaagaactaaatgtagttagagaaagggagattgtttctggccgaggaaatcacaagcagcttggttgaagaagtggtgtctgaactagatttgaaagggtgagtctgagttgaaaatgcagaagaggagaggcaggttctggagcaggtggcggggtgcatttcaacaaccacagcagactgcccagtggttcgctgtgggggatggtgtggatcagaagcacagaccagtggacacacttgggtcagatggaggcccctgtctctccgcatcttccctcttcccaccccccagaaatgtccagttccatccaacatgccaaccccttttcatgcatccatgcatgtacacatttttctttgtactcagaatgccctacctggcaaaaattcccagccttcaaaacgcccctcagagatcactgcttctggtctgttctgcctctttattgcacctgttgtaccatgatgacatttttcccgtctgcctcacctgtctgcattccttagggaaacttgtctgccttcgaaatcgtcagcggagcttttgaaagggcagatcgggtctccgacccaggagatcgattcagcaggtctgcggggactgaggcatggcagggaaactgcccaccatctcaagggtgaggctaggagttggctagtgtgtatgtattccatccagaaatatttagtaaatgttcaccaaacaaaataaaaacacacaagaaagcatgaggcgtaatacccacggggtaagccagtcaggatagaggatgaatacattattaggccggctttgctgctgtggttatcctaaaacaatagggtttaggttgtgtgtctgtgtgtatatgtattttgttgttgttttggggttttgttgagacaaggtgttgcattctcacccaggctggactgatcacggctcactacagcctcaaactcccagactcaaacgatccttccccctcagcctcccgagtatctggggctacaggcatgtaccatcaagcctaattttaaaatgttttgtaggcggggctcggtggctcacccctggaatcccagcactttgggaggcggcggcgggtggatcacctgagatcaggagtttgaggccagtctggccaatgtgatgaaaccccgtctctactaaaaatacaaaaattagccagtcacggtggcgcatgcctgcaatcctagctactagcgaggccaagtcaggaaaatcgcttgaactcgggaggcagaggtttcagggagccaagaatgcaccactgcagtccagcctaggcaacagtgagactctttgttttgggtttttgtgtttttttttaacattttgtagggacagggtcttgctctgttgcccaggctggccctgaactcctggcctcaagcaatcctcccacctcagcatcccaaagcactgctactgcaggtgtgatttgtgtttggcccttagagagagattctgtgtgattggtagtaaaatgaaacagacatcgttcttgaaggatatgcacagccaatctagttgtcatttgatttgcacgtagcccaggaatggggactcccagggttgtggtgccacctcggtacacttgacctctgttatttgtactagtgtataacaagagccagacgagagacacactccagcctgatctcagtgagggtctttattctgtcctgtttgacatttttattgactttctactgtttgagggtcacaccagaaggttgagtccaaagagggccagttggtggtcccaaataagtggttctcaaccgaggacagttttgccccacaaggggcacttggcaatatcttgtcaggactcgggatcactactagcatctagtgggtagaggcagagatgctgctgggcatcctccagccacccatgtcaaaggattatgttctgaaatgttggttgtgaaatcatgctctggatgacgaggtttgcctctttttctccctggaggaaaatgctcattatttctgctctgtgagggcaggagccttgtttcttttgcttcctgaccttctcccctaagctgtatgagaactgtttctctgacacctgtagcagtgtctcatgcacatggtcagtactcaataaatatttgtgggatgttgtcgaaggtagctctcccctttggtaggtgttttgctattacagacagtgctgccttgaacctcatagaacataacatctttatggccatctaagtttttttaattttggaatccaggaagtagaattactgggtcaaaaagcacatgtatttgaaattttgttagatatatttgtaaaaagttgttgaggatattcagcccggccgggcacggtggctcacgcctgtaattccagcacttcgagaggctgagtggggcagatcacttgaggtcaggagtttgagaccagcctggacaacatggtgaaaccctatctctactaaaaatacaaaaattaaccaggcgtagtagcacgtgtctgtaatcccagctacccgggaggctgaggcaggagaatcacttgtacctgggaagcgcaggttgcagtgagctgagatcatgccattgcactccagcctggacaacagagcaagaccttctctc

SEQ ID NO: 24118 - DNA, 5657 bp, Homo Sapiens
ctcaagcagctggtggcctacgtgcagcttgaggcagggaaagtccggaggttgacagaaatcctccgagtactggtccagcctcaagcagctggtggcctacgtgcagctcaacatgccaggctcagacctggagcgccgtgcccaccttctcctggcccagctggagcactcggaacccattgaggcagagcctgaggctctgtcaccagtgccagctctaaaaccaactccagagctcgagctagctctaacaccagctcgagcacccagcccagtgccggctccagccccggagccagagccagctccaacaccagctccaggttcagagctagaagtagctccagcaccagctccggagctccagcaggctccagagccagctgtgggactagaatcggctccagcgccagctctggaactagagccagctccagaacaggatccagctccctcacaaactctagagctggagccagctccagcgccagttccatcattacagccttcctggccttcacctgtggttgcagagaacgggctgagtgaggagaagcctcacctcttggtgttccctccagatctggtggcagagcagtttacactgatggatgcggaactgttcaagaaggtggtgccctaccactgcctgggctccatctggtcccagcgggacaagaagggcaaggagcacctggcgcccaccatccgcgccactgtcacccagttcaacagtgtggccaactgtgtcatcaccacctgcctcgggaaccgaagcacgaaagccccagacagggccagggtggtggagcactggatcgaggtggccagggagtgccggatcctcaagaacttctcgtcactgtatgccatcctctcggccctgcagagcaactccatccaccgtctgaagaagacgtgggaagacgtttccagggacagtttccggatctttcagaagctgtcagagatcttctcagatgagaacaactactcattgagccgggagctgctcatcaaggagggcacctccaagtttgccaccctggagatgaaccccaagagagcccagaaacggccgaaggagacgggcatcatccagggcaccgttccctacctgggcacgttcctcaccgacctggtgatgctggacactgccatgaaggactatctgtatggcagactcatcaactttgagaagaggaggaaggagttcgaggtgatcgcccagatcaagctgctgcagtcggcctgcaacaactacagcatcgcgccagatgagcaatttggggcctggttccgggccgtggagcggctcagcgagactgagagctacaacctgtcgtgcgagctggagcccccatccgagtcagccagcaacaccctcaggaccaagaagaacacagccattgtcaagcgctggagcgaccgccaggcccccagcactgagctcagtaccagtggcagctcccactccaagtcctgtgaccagctcaggtgtggcccctacctcagcagcggggacatcgctgacgcgctcagcgtgcactcggccggctcctctagctccgacgtggaggagatcaacatcagcttcgtcccggagtctcctgatggccaggaaaagaagttctgggaatcagcctcacagtcatccccggagacctccggcatcagctcagcctccagcaacacctcgtcctcctcagcctccaccacgcccgtggctgccacacgcacccacaagcgctctgtctcagggctctgcaactccagctccgcgctgccgctctacaaccagcaggtgggcgactgctgtatcatccgcgtcagcctggacgtggacaatggcaacatgtacaagagcatcctggtaagccggcgggggtggcctgggtgcctccctccactggcggcaaatgcaccctgaacacagtgcaccatccctgccctcccggggtctaccttgtagttggcggggaaggacagatgtcagccaggtacagaaatgaagaaggtagtgatcagggacaaggctggcctgagggcagagggggaggaaaggagcagccgtgcaaagcccccaggagctgaaggggcggtgctgtaggggaggtgaggtcagggaagtatccagggcctggccacataggccctgagccctgccaggacctcgactttctcggggaggaagacaggagcaatgatggctggcttctctgtctggcgtgggctggtaccagagccgcaggggtgttggttaggaggccgctgtggcaaccaggctgggagccctggaaggggccagcagggtcagagtctagacaggatttggagacagcagatgggaattgctcacagaatgggtttgcctgggggctctttcttcatcctccaggtgtcctgcgacagatgaaccatttgtaacccccaccctctgtaccccagccctgggtcaggtgccccattattcacacacgctcctgacccctcattgccaggagctagcatggttgtcattaagcagtcacctgtggccctatgtccgagttccgcctgtgctctggccctcagggtcaaggtagcaggggcctggcctatgctgaccacactgagcatcctggccggcccctcctttcttacctccagggcttggactagggactgtctgttccccaggctcagtgatgctgttatcctggaggggcaagtgcttctcaaggaagtgtgggaggagggaacagtctcttacaggagaagcagggtaggcactgctgggacagacccctcctcattccatggaggcctcacatggggaacagaaggacggaggcctcacttggggagtaggagaatgtgacaaggccctctccggacccagcacctggccagaggctgtgagtgcctgtgcttggtgctgaggggactccagagggtccttggccactgcactctgggggagccgctccagggtcttttccctgatggtccatcccccgccgcgatgcaggtgaccagccaagataaggctccggctgtaatccgcaaggccatggacaaacacaacctggaggaggaggagccggaggactatgagctgctgcagattctctcagatgaccggagtaagtcagaagaccagagggcgatggcagagggggcaggtccacaccactccccagccccaggttggaagcctttggccccagaaaattcaccagcagagtgtgggtagacactgtggacagggcagccctggctgcccccattgtctgcttgctgtccccagcaaccactggacctccccagtgtgtgcccttccctaggcgtgaacaggcagttcaaagctcacatcagtgaggagcaaagagaaaaggcatttttcactgggacaggttagccacgtggcccactggaagggacgctttctggctaagacaagaaaacatgtgctctacaaagaatggtgacagctgtggaccaaagtgtcaagtgttaaaatccatgagtgtgtgattctaaaagcagaacaggctactaggaggccaactcagtattctagaaactgggaaagtgtcaagaaccagtgcaggctcagagtggggtatcctgggcctggagacgctgggcaagctccttaagccctctgtgcttgtcttctcatcccccaaatggaaatgaaagtagccagtgtgttcatcatatatgtaaaaatctatatgtatgtatatatgtgtatatatatgcatgtatatgtgtgtgtatatatatgcatgtatatgtgtgtgtatatatatgcatgtatatataaagcatctatgtgcaccataaaagttaactataaatactatcatcgctgttttctttccagtgagctgaacaccaccttcccaccattagcccagacagtaagcaatgactcctgtgatccctagaagttacagtctaaatcctctggcagcttcttgcaccatttcggttaggtgggcagggtaggcgggacccccatcttacagaaaaggaagactgaggcctagagaggttaaagatgacgaaaagccacacgatgtcggcaggagcacaaatcgagcccagctctggtttatagcaggctgtgggccagaggagatggtgggaaatggagccaaaaggaagtgcttgccgggtgccagggttcaaggagtacaggcctccctggaacgggcgccagagccctggggcaggcctgtcctttcctggtccttggatcccttgtcctgagtagggcaggattctgggaggtgacctggattctagaaagcctgttccaggtgggcagccagcactgcagtatgggcaggacggggtgaccctctgccagctcaggccaagccggggggttctggagtcagtccctgtttaaacaagagtcatcaggttttgtgaggacctcagcagagtctgtcctcaggcaggagtcattgagaggggtccttggagttctggagctgtattggaggggatctgaggtctgtggctcaagacagtccttgtatgggctctcaagcggtaggggtatcctgcagggcccccaggagcatccctgatcacccctctgcccctccccaccagagctgaagatccctgaaaacgccaacgtcttctatgccatgaactctaccgccaactatgactttgtcctgaagaagcggaccttcaccaagggagtgaaggtcaagcacggagccagctccaccctccctcgcatgaagcagaaaggactcaagattgccaagggcatcttctgagggcatcctcccagggtctggctggctggtagccaagcacttatggaccagagtggcccaggccagctgggcgccttcctcccacctgccagcccagggtaccccagactccagtttcatcctgaacctctcccgctgctgggattgacgcctgccattggtcaggctgacctggcctcccgtggaccactcgctgccttaggtgcccttctgctctctggaaccagaggactagctgacttttgccaaggagcagtgccaacgggcatggcatggtggccctgcctgcccccgggcaccacctctgtacacttccctgacaccttcccaggtgtggggtcactgccacctgtggcccatgggcaccccagagcacccactgtgaccactgcagttctctcatgcccacaggcactggcctgtgaccttcgcaggggtcccggcccctcccaccactctagcctttctcaggctgcaccaaagattccatcatcagggccaactgagagtgagggagtctcacccaccgcttaccccagccctcccctgggagcagagagagaaaccctcttcatggaccagactctgcacccggtgagtgaggacagtcccagctgagtcccatcgatgttgaatctcatgccactgcaagtgccattcaccactgcgtcctgggctttacgagaccatgcaagacgggggttagtgaggaaggaggatttggggtgggggtggggtgattgaatatttgtataaaaagcaaaaagaaaaaaaaatgtttgtttactgattggggaggggcaatatttatttgttgtaaatagcaaatgctagacttgaatattatattaaaatcctgtttctact

SEQ ID NO: 24119 - DNA, 4837 bp, Homo Sapiens
attttttgtagaattgaggtcttgccatgttgcctaggctagtggtcttgaactcctgggctcaagtgattctctcaccttggcctcccaaagtgtcgagatgacaggtgttagccaccaagcacagccagaaatgagtcttaaagtggacatgagattggggtttaagccacactaagctggatttgtaatcattgaaagtaatctgagagctatgggatctgctccttaaaagatgggagaggagaattttaagagatagggtctcactgtgttgcccaggctggtcttgaaccgtggcgctgaagcagtcctcctgcctcagcctcctgagtagctggggccagacctgtgttttttgttttcttaatgttctgtgtttagccaggtgttctgtgccaagtgtgcctgctctttgtagacacgagagcccttttggcttgttgtgggttttaaggcgttaagtaaaagctctagcttcgcaggaaaccagtccacaaactgccctagaatttcttctgacatttggcatgctggtgtacacagacacatttgaaatttgttagataacttttccttcctttactgtcctccatcaggcaggcgccggtttgcctgcagtggggttggtggacgtgggctgtccttgtctcagaagacatccgaggggagtggtatgccggaagattgaatgcggagcgccggccccgcacgtgaatgacttagagccccaggtcttcagggacaggcagtgccttcacatctggctctgatatgtgttcaggctgtcttgtagggtaatccggtcccctaatccttagacctccaaattcaaagcagatcaatgccctgtgggtttaatttttttaaatcaattttattgagagatgatgtctatttaataaatgtaccctctttgcatgtacagttctatgagttttggcacatatatgtacctatgcagccagtaccctcatccaaatcaggagcacatccactctcctcccagaaagcccctcaggccctgccgagtcagcccccagcccccagcccccagcagtcggcttccatcacatgggctgctttttcctgttccagacatcatggatacgaagcagaccctggtttcttttgctcagcagttttgaaacttattcatgatgtacaatagtagattcttctttttttgttcccaagtggtattcctttgcacaaatataccccagtttgtttatgcatttaccttgttgatgcacatttgggttatttcctggtttggggtattacgaataatgctgatgtgaacgagttcttcttttttctttttctttttttttttttttgagactctcgttctgttgccccagctggagtgcagtggtatgatctcagctcactgcagcctctacctcttgggctcaactgatcctcccacctagcagctccctagcagctgggactacaggcatgtaccaccacacccggctcagaactagttcttttaaatttttttttttaattatttttcttgtaaaatacagaaaacacgtcattttagccatatgtagggatacagttcagtggcactagcactaaactataacacaaatacgcacgaggccttctgaaggtgtttctctagaatacacgtgaatccttctgaaggtgtttctctagaatacacgagtccttctgaaggtgtttctctagaatatatgtgagtccttctgaaggtgtttctctagaatacacgtgagtccttctgagggtgtttctctagaatacacgtgagtctttctgaaggtgtttctctagaatatatgtgagtctttctgaaggtgtttctctagaatacacgtgagtccttctgaaggtgtttctctagaatatatgtgagtctttctgaaggtgtttctgttcccttaggtagatctaagagtggaattgctgtcatatatgagtgtacgttttaatttataagcttgcccagcctgggcaacatagtgagaactcgttgctataaacatattgaaaaattagcctggggctgggtgtggtggctcatgcctgtggtctcagcactttgggaggccgaggcagggcggatcacttgaggtcgggagtttgagaccagcctggccagcatggtgaaaccgtatctctactgaaagtgcaaagttagcctggtgtggtggtggtgcttgtggtcccagttacttgggaggctgaggcaggacaatcacttgaacccgggaggcggaggttggagtgagctgagatcgtgccactgcactccagcctgggcgacagagtgagactttgtctcaaaaaaaataaataaattagcctggtgtggtgacgcacacttgtaatagtcttagctactcaggaggctgaggcaggaggatcgtgtgagccctggagttggaggctgcagcgagccgtgattgttccgctgcactccagcctgagcagcacagtgagacctgatctcaaaagagaaaactgtttgctcaagcagccccattgttgcatagtcccatcagcaatgcatgagagttccaggtgctccacatctttgccaacatttgatgttgtcagctttccgtcttttaattaatcagctttattgaggtgtaatttgtgtacaaaaaaacccctttaaagtctgcaatacagtgagtgcggacaggcatgccggcctgagaaagcatcagccctcgcagcctcgccctctgcaggcctctcacactctgcccccggcctggcatgtcactgtggactcatctgccttgtctagttttcacgtcaatggagccacacagggcaaactctcctgtgtccggctgccttctttccatgtcttctgggtgagcttcggccacgtggttgagtgcagttgctccctccttccccgcgccgagtggtctcccgtgtgtcaaggctgcagtgcattggctccactccagatgggctttgggatggtttccatgttgggtgactctcacagggctcctgtgaggagtctcagacgcgtttggtcaacacaggtgcccattgctgttgggacgtactgaggagtggaagctgggctgtagggcctgtgtagatgctgccaacccgttctccaaagcagtcacacagtttctgtcccacaggagagagggagagtcctgtttgttctaagtcctgccttccttttagccatgctgatggctgcaagcttgtttctttgtaatagccatagaacatttctattctgtcagtaaccattccccagtgggtggatttttagtttggatccagtttatttataataaatacagggccgcaatagatggcctttctactccttttctgttattgctgacacatagtcctctcggtcctcagtccagtgtgggtttccctgggctgaagtcaaggtgttggctgacacacagtcctctcggtcctcagtccagtgtgggtttccctgggctgaagtcaaggtgttggctgacacacagtcctctcggtcctcagtccagtgtgggtttccctgggctgaagtcaaggtgttggctgacacacagtcctctcggtcctcagtccagtgtgggtttccctgggctgaagtcaaggtgttggctgacacgcagtcctctcggtcctcagtccagtgtgggtttccctgggctgaagtcaaggtgttggctgacacgcagtcctctcggtcctcagtccagtgtgggtttccctgggctgaagtcaaggtgttggctgacacacagtcctctcggtcctcagtccagtgtgggtttccctgagctgaagtcaaggtgttggctgacacacagtcctctcggtcctcagtccagtgtgggtttccctgggctgaagtcaaggtgttggccagggctttgctttttgcaggccctacaggaagatgttctcttgctcgttgggaggttggcagaattccgttcttgctggtggtaggactggcagtagcaccttgctgggtgcaagccgagcctttcccggcttctccaggccgcctgcgttgttcacggagggcccttgcccatctgcagagccagcactggcgggtgaagtccctctcatgctttgactctccttctgtctcatctgtagctcagccaggaaaggcggttaaggacttatgtagttaattggccccacccagataatcccggataatctcccacctcgagatccgtgcaccttaatcctgtctgcagagtcccatgctagcaactcagcagcaaacagcccctgcactgtgccctgcaggaacatggctgctggtggcaggccggcccagacagacagactaccacctgagccaaggaacctccactcaggtggccgagggtcccacttccgagccgagggtgctacgcaggctcagcagccagcctccctcggctgccttacagcaactctgctgacagtccctgggcagattggcctccatgggcaggggcacaggtgccacgtccactccccagaccaccagcacgttgatgactgttgaaaacaaagtcgcctgggcacggtggctcaaccctgtcatcccagcgctttgggaggccgaggtgggtggataacctgaggtcaggagtttgagaccagcctggccaacatggtgaaaccccatctctactaaaaatacaaaaaaaaaaattagttgggcatggtggtgggtgcctgtaatcccagctactcgggaggctgaggcaggagaatcacttgaacatgggaggtagaggttgcagtgagctgatattgcgccaccacactccggcctggacaacgagagtgaaactgtctc

SEQ ID NO: 24120 - DNA, 4441 bp, Homo Sapiens
actttgaattgctaaaagtggcatttttcctatgtgcagtcactcctctcatttctaaaatagggacgtggccaggcacggtggctcatgcctgtagtcccagcactttgggaggccgaggcgggcggctcacgaggtcaggagatcgagactatcctggctagcacggtgaagccctgtctctactagaagtacaaaagattggctgggcgtggtggtgggcacctgtggtcccggctactcgggaggctgaggcaggagaaaggcatgaatccaggaggcagagcttgcagtgagctgagatcgcgccattgcactccagcctgggcaacagtgttaagactctgtctcaaatataaataaataaataaataaataaataaataaataaataaaaataaagcgagatgttgccctcaaacttcacctggccccggtcctggtttgctaatggctgtgggtgggggttgctgtgggtgatgactgactggatacaaaatcctaagtggcttcatgaaattttgcctaggactggactgtctttcttttaactatgaaatgatggttctccctaacgtctcctcaaaggatacaagaaagttgttgttgctagtagaccgaggggtgggaatcactgaaatggaaaatctagatgacagtgctgggtaagagaaaactagaacagctcagttgaagacaacctttactgcatgttgacgctgatttaggcaatagcttcctaaaaatcatgtataaagttagttagttagacatgaaatctcttccccaatgttgatacctgcccacaaaatattctcaccttcagagtataaggatcattcttaaagccaaatattcagttcaaggcacatacgtcatctgcagttgtaaatttgcatttaatatttcacaattcctgtaagagaggctagtcaggagggacaccctcaagtttaaatccccacacttacttacttactgctcatccgtcactttcgctaagtgagattaataattcagtagctggtccagaacgcacagcttgggaacgcagaggcccaggcctcatgtaatttcccactcccgtaactgaacgtgctgacccatgttgatgtctgccttcatccaggtggcaaatcagacatgctacgctgcccccttcaaacgagttcctcgtgttaggggcaaaggtcacagccaaactctgccactgacagccagtgccttggcctggatcctctctgtggatgcaggcctacccctcctcagtccagcctcatctactagaccagcttggccattcacttttcggatgtctgtgagcacaggactgcagactgaactctcactcaagttcttccatttgccaagcccgaggccttttccggctaaccagccctctctgcgctgtcttgtctcctgactcccaccctcaccattcacagaccatcacgacacagaggatgccaagttcttttagtaattcaccagctccatgcagggacatcacagggctgccctccatgagcagaggaggagggctgcctggcagagcgtttcacactccaggttagccagaaagagcatcttcatttttgtttccacacaacacttctctgtgagcctgttggccaacaagtggcggccgattgttggaggagccagccaaccatcttgtctaacttcagagtcttcagggctagaatatgttcaccccagaggcttagatgaagcacatttgcggctactcgggcagatggtctctgcaacaggaagggaagctgtagctagaacatctgttaacacagtctcaacccaaagcctgctttgttagtgagggtcttcccttctctggtcccaacccaattcttcctctaccctatctcctactgatgcccttcactcaggtgacaaatactgcctgtcccctacccgtgctccaagcttttccatgtgtacacctctgcatggggcagcatgcattgttgaaatagcctttccccctgggtggaaagcctagtgcctcttgtgcacagctatctggtcccttgaaccaggtaagtagtctcctctatcatttcataactggttgcagctgttattctaaccttcactgcgcaccaagatagcaggccacgtacagagagcagttaacggagtggcagaacagtgctgggatgcaggtatggctcagctctttgcactaagcctgcccctgagccagctgccactccaattatggcttcggataggtctgcctttgcattcctttatattaatttcacaatgtccagatctgctctcaggagatgttttccatctctctctgatcagttctcagctgcttccatgagctacatctccattaaacatttctcaaaaatgcctccttttctctctctgaatagccttttttttttttttttttgagacagagacttgcactgtcacctaggccagagtgcagtggtgcggtcttggctcactgcaacctctgcctccggggttcgggcgattctcctgcttcagcctcccgagtgcctggaattgcgggcgtgtgccacgacgctcagctaatttttgtatttttggtacagacggggttttgccgtgttggccaggctggactggaactcctggtcccaagtgatccgcccgcctcggcctcccaaggtgctgtgattgtaggtgtgagccaccgtgtctggcctctgaacaactttttcagcaactaaaaaagccacaggagttgaactgctaggattctgactatgctgtggtggctagtgctcctactcctacctacattaaaatctgttttttgttctcttgtaactagcctttaccttcctaacacagaggatctgtcactgtggctctggcccaaacctgaccttcactctggaacgagaacagaggtttctacccacaccgtcccctcgaagccggggacagcctcaccttgctggcctctcgctggagcagtgccctcaccaactgtctcacgtctggaggcactgactcgggcagtgcaggtagctgagcctcttggtagctgcggctttcaaggtgggccttgccctggccgtagaagggattgacaagcccgaagatttcataggcgatggctcccactgcccaggcatcagccttgctgtagtcaatcactgccctggggccaggacgggccgtggacacctgctcagaagcagtgggtgagacatcacgctgcccgcccatctaaccttttcatgtcctgcacatcacctgatccatgggctaatctgaactctgtcccaaggaacccagagcttgagtgagctgtggctcagacccagaaggggtctgcttagaccacctggtttatgtgacaggacttgcattctcctggaacatgagggaacgccggaggaaagcaaagtggcagggaaggaacttgtgccaaattatgggtcagaaaagatggaggtgttgggttatcacaaggcatcgagtctcctgcattcagtggacatgtgggggaagggctgccgatggcgcatgacacactcgggactcacctctggggccatcagacagccgtttccgccccgatccacgtaccagctgctgaagggcaactgcaggccgatgctctcatcagccaggcagcagccaaaatctgcgatcaccagccaggggcagccgtctgggaaggagcaagcaaagtgaccatttctcctcccctccttccctctgagaggccctcctatgtccctactaaagccaccagcaagacatagctgacaggggctaatggctcagtgttggcccaggaggtcagcaaggcctgagagctgatcagaaggcctgctgtgcgaacacggaaatgcctccagtctctgtgcgcgatgccctgttgaaccagatggtccacgccttccagcagctgcagcagcatcatggcggcgaggcgggggctgggtgtgttcacacaaagtctgcagtggagaggaagccacgatacttcactggggccatgaggagccagaggtgagcaagccaaagggaagcaggaacaggagatgcgaggaaagaacagcatgtggacagtggaaccacgttcctacaagttcaagaatcagtaactgatggaaattcccgtggctcactcctgtaatcccagcaatttgggaggctgaggcaggcaattgcttgagcccaggagttcgaggccagcccgggcaacatggagaaactctgtctctacaaaaactacaaaaattagctgggcatggtggcatgtgcctgcagacccagctacttgggaggctgaggtgggaggatcacttgagcccagggaggttgaggctgcagtgagccaagatcacgccactgctctccagcctgggcaacagagtaagaccctgtctcagaaaaataaaagaaaatttgagtttgc

SEQ ID NO: 24121 - DNA, 4467 bp, Homo Sapiens
gcttaggcctcacatgatgttaatagtaatgagagctgccatttttccaaagcctgcagcgtggcaagcactttgcacacttgcttcactgattcttgcgctagttctgtgagatgtgactatccccatttcacagatgaggaaactgagccccccaaagaggcgaagggacttgctgaagatcccccagccaggatgtggccccagatcagtgtgatgcaaaacaattcctgcctcctgttccctgttctgccacgttctctctgcaagggagcagatctcacccaaactggggccagcacaagctttcactccaccaagaaaccttttggccggctgcttatgttgacccctctggccaaagggctctggcaactgcatgtgccatgtgtcgcatgtcctgacttgccagatcttggagcccacgagaagctttcctgccaaatcaaaggctgagaggtgggcacagctgtggggcacctggggaggcacagcagccaagtggggaggcaggtgacagggactccgagagactttagcccctcggctcctcaaggtggtggttgaggagacagaggacccaggtgggctaactcccacctgggaggcctgaaaccctatggggcaggtgcctcagtaattacagagtcctggaacctgacagcagaaaggacccttcacttgatggataatagtaacagtaggaggaataataaggcccacagagaggagacacttctccaaggctgcacagccgggtgggcctgctgactcccagcccagtgcaccccaactttatagcttcgtgggtttccctggcaggcttgatggcagctaattggccccagtgccatcttgcccagcttggcagctatctcccttctgagacggcaagttctgggcagctcatgggatggtcaggagtcccacgggcatcttggcaggcagctgaattctttacagctcagccctgatggacgtgtttgagcttgagacctggcaggagactggagctctgccttagagggcccagccagccctgtgggcaccatgctctaaactgaacttgacctcaatccaggctggagttggtttatccttggcaaaaatgtgacttcctatttctgagcgggaaggggcttagctgacttataaagcaggctcagaagttggacatcaaacggatcgtgcagtgcactatttggatgagataagtgtaaaggaattagaagcacacaggccagattcctctctgtttggggcagagtatggcgtgagacgtattgagatggagcttgaggttaattaaagatgaagcatttgggtaaacagtccaggcacctgaccgtgtgcccagatctgtgccaggcactgagccaagaaggtaaattaatgcagcttgtaattactgagcacatgcaatgccaggctctgtattagagctaaatctaaccactctccttggcccagaggaactcattatcaagatgggacaagcagtgcaatgctagattacgtcgtcctggcccctaacttcaggaagattcagccttagtctttcccagatccctcctctgggcatattaggggatcctaaactctcccttaccctaattcaagtgtttaaagaaagatggctagactaaccgatggagtagacatgtacctacaggagagcaagagccaatgtggtcagacatctgttgccaaagttcactgatctctgaggaccaccagctggccagggtctgaaatgaactcaacttgctgacttatgacccaaaagacttgaggcacatatgcaggaatctgcatgtctggggcacttgaattctctcatcctgggccagagaaccaccattccataagcagcaacccacacctttgacacgatctatccaccactaactgacatttcttccagaaacgttctttgtgcccagcctcataaaatgctcctgttgctctgagaaatttgtgtgcacttcttagacttttctgtttgactgtgaggcaggcaggaaagatgaaaggtctgagacccagcaggtaaagtgatctgcttaaggtcgggcagcatgttattgtggccctgggtcctctacctctcacgaaagctgactgtgtgatgaagggctctctggggcatgttggaatggccatgtccccaggtcttcctccagtggtgggtctgatgcaccagcagccagatgaagacagggagagccctgtcatccacagtggagggagaagaatcaggctgccagggagctgcaaagggctgctgaggatgcctccagtcctgagagtcaaagatctgggatctaggaagcatggaaccttgtgctggttatgaacaaatttgtccttgcattgaaagaccctaagcatattttcttcatgctaaataatgtgttatctacaacttcctggcctcggctagacctggacaagcctaggtgctcaggccccttgtcccacttgcctaatctccagcccagggccattgtcacagtggatcccaaagaggagggaaagtccttctaccaaaaggaaagtctattgaaaatgctgtgaaggacaagagaagttctccagggaattgcagctttgatggcatcctgtgtggcagacagcagaattggggctggtgatagtttttcagtgactgtgagataagaaccagagtcctcagcctcaccctgaagtgtccgctagacccttcgtgacccaaccctgctgaccagccacgtctctcatgtctcttaccctgtgcctggccagcgtgatgtgcagtcatctctagaatagacaggatgtttcacacatgctgctccctacccctggaaactcccttctctcccctgtaactgctcatccattgaggatcaacacagatagcacttcctccaggaagccccctcccattcctttgtgctttcttagcatctatcacaatacccactgcccagtgttgtgactatctagtgtgtatctgctcctctcggactgtgagcagcttaatggcaggggtcatgtaaatttgtttttgtaccctcatctgacacaaaggtggtgctcaacagatgtgtagagagagaaaggaagggaaggaagctgaaggaaggggaggaagaaaggaatgaaggcagaaaagaaggagagaggcagaccttagttccaccagtggcataatttccaccaagccaaagctgtctggggatggcccggagcccccaagggtggcaggtttcccatcgggagaggtgtttgagcaggggcagtgtgcccactggctgaagaagtggtaggagagttgacatcttgccaagggcctggtgtagatgacattgagggtccctcctggctctgcaatgatcaagttctatgaacattgttatttttccagaaattcatctgagcagccaaaaaaaatcaccccgctggctgtctaaaccagtaaggttcaggaataagtccagcctccccactccacccacaaccaccaccacccctcacagcgcccccttcaatgacccagctgggcttgactgctgcctttgggtgggggaacttctgaaaggtggaggaggagtgaactggaacccaggcctgcagcccagcccagagctccttcccgctctgccccactccctgaccccaggggaggaaagggttcacgagaactgattgaccccctacttggctctttccagggagcatcggctatcctcaccctttctccaagtgggagctgggctcttcctttccggagatactctggatactccttcactttgctggatgaccttgggcaagttcctgtccctctctgagccttcacttcctcatctgtcaaatgaagaccttgattcctgcctgggcagttctagggctggagggcaggggtgacatggacaatcttgggcctccatggagatgaggtgcttggctttcttcccaggacccacaggctgccatgggattgaaagcatgtggaggtgggaaaggtgacagagtagcatgcctccaaggcccccttcatcccagtcctgctgtggggaaagtgggctttgaacgggatccaagtctaagatgtttccggtgagctgccagggacaaagggctctcagacatcttgggtccccagtggctggggtgggcaggggctgattcagccaaaggaggctctagcccagaacagaggaagccagagcccctgccccattcttgagcctcacagagcttgtccccgagttgattcactgtgcaacacaggcttcagattcatgtatttgaaaggtattcatgatgttgttctcttatcacctctgcccctcacctctgtgaattatcatgaagagtcctttaagagtataaatagaagacaaagaaagatgctattaatgttattttgccaaaaatatttttgtagcataatatattaataaaagatattatgaattc

SEQ ID NO: 24122 - DNA, 4450 bp, Homo Sapiens
gtaaagtggtggcacctgaccggagcatgtagccacctatgacttcctgagtggggtggtgtggggagggccctgaggagtctgtggtcctaggccttggatttcatcagggctttcctgctccttctggttgcctcagtcccaggcaagatagggtcccagaatcttacagcccagaggccacctgttgcaacttcttttttacagatggagtcatcagaacccactgtgaggaagtgacttctccttgaggtcacccagacactccaaacagagcagagcaaaagcgcctagaacttgaaattttggacctgtctccaacaccctggggatttccaccaggaagccttcagtcaccatccaggggatttttatcgccacaaagggtaattcctgctccatccctgctgtgactcagctgtgacgttgaaccacacaagccagagagaagaagataaagtcatcagagctcctactcaccagagagtgaggcccaggccaggactccacaaggctggtcccctgccctggagcaacttaaacaggccctctggccagcctggaaccctgagatggcctccagctcaggcagcagtcctcgcccggcccctgatgagaatgagtttccctttgggtgccctcccaccgtctgccaggacccaaaggagcccagggctctctgctgtgcaggctgtctctctgagaacccgaggaatggcgaggatcagatctgccccaaatgcagaggggaagacctccagtctataagcccaggaagccgtcttcgaactcaggagaaggctcaccccgaggtggctgaggctggaattgggtgcccctttgcaggtgtcggctgctccttcaagggaagcccacagtctgtgcaagagcatgaggtcacctccccagacctcccacctaaacctgctgttggggttcatgaaacagtggaaggcccggctgggctgtggcctggagtctgggcccatggccctggagcagaacctgtcagacctgcagctgcaggcagccgtggaagtggcgggggacctggaggtcgattgctaccgggcaccctgctccgagagccaggaggagctggccctgcagcacttcatgaaggagaagcttctggctgagctggaggggaagctgcgtgtgtttgagaacattgttgctgtcctcaacaaggaggtggaggcctcccacctggccctggccacctctatccaccagagccagctggaccgtgagcgcatcctgagcttggagcagagggtggtggagcttcagcagaccctggcccagaaagaccaggccctgggcaagctggagcagagcttgcgcctcatggaggaggcctccttcgatggcactttcctgtggaagatcaccaatgtcaccaggcggtgccatgagtcggcctgtggcaggaccgtcagcctcttctccccagccttctacactgccaagtatggctacaagttgtgcctgcggctgtacctgaatggagatggcactggaaagagaacccatctgtcgctcttcatcgtgatcatgagaggggagtatgatgcgctgctgccgtggcctttccggaacaaggtcaccttcatgctgctggaccagaacaaccgtgagcacgccattgacgccttccggcctgacctaagctcagcgtccttccagaggccccagagtgaaaccaacgtggccagtggatgcccactcttcttccccctcagcaaactgcagtcacccaagcacgcctacgtgaaggacgacacaatgttcctcaagtgcattgtggagaccagcacttagggtgggcggggctcctgagggagctccaactcagaagggagctagccagaggactgtgatgccctgcccttggcacccaagacctcagggcacaaagatgggtgaaggctggcatgatccaagcaagactgaggggtcgacttcgggctggccatctggttaggatggcaggacgtgggctgggcccacaaaggcaaagggtccagaaggagacaggcagagctgctcccctctgcacggaccatgcgacactgggaggccagtgagccactccggccccgaatgttgaggtggactctcaccaaatgagaagaaaatggaaccaggcttggaaccgtaggacccaagcagagaagctctcgggctaggaagatctctgcagggccgccagggagacctggacacaggcctgctctctttttctccagggtcagaaacaggaccgggtggaagggatggggtgccagtttgaatgcagtctgtccaggctcgtcattggaggtgaacaagcaaacccagagggctccactaggacttcaaattgggggttggatttgaagacttttaagtttccttccagcccagaaagtctctcattctaggcctcctggcccaggtgagtcctagagctacaggggttctggaaacattcaggagcttcctgtcctcccagctcctcactcaccttcagtaacccccactggactgacctggtccacagggcacctgccaccctgggcctggcagctcagcttccccaacacgcaggagcacacccagcccccacatcctgtgcctccatcagctaaacaccacgtcacttcatgcaggtgaaacccagtcactgtgagctcccaggtgcagccagaggcacctcaagaagaagaggggcataaactttcctcttcctgcctagaggccccacctttggtgctttccagaatcccgtaacacctgattaactgaggcatccacttctttcagcagactgatcaggacctccaagccactgagcaatgtataaccccaaagaaataatttttagaatctctttcgaagttttcctaaagtgtatggtttgggagttgtttgtactgagccaggtttgaaaaggccattgctgagtttgaggtggtgccaccagttttgcaggtggcatcagaggctggcatgctggcaggaacatcccctcttagccccagtcttctcttttctataatgagacccaccccagcttgcctccctccctggcttctctgaccctcaaaggagatgccacgcaggacagactggagagagaagcctgggcaatactgcccgcctgtcatggcctggtggtggcccacacctatcttctcaccttggaggccacacccaactttccaaagaccctgagtcaagtcaggaccctactactctcccctgctgctttcctgacagcttactcttcctccacctgctgagcctgtgccagactccattgctcaaatcgttagggttgcttctataaaaatgggtcagtagcccttcctgttctctccagcccagcatacaggaggatcaaaggaggtgacggagcatcgtggcacggcagtctcaatgggtcagaaacccaggccagctgggctctaagcctggcatcctgtcatgcttagtccttcagctgaagatcagaggaagcctctcccttgccctctccagctctaggggttttcaggaggcccaactgcaataatggagcactagtgcttttatgtgcaatggtgtcgtccatgcacgacagcagcaaacattctggggctgctttttattgttcccacggctgacagcgtggcagcggagactgtggaggcagtggagactgacttcttcctgctgacagctggatgtcacacatgaaggtctggcctagcgagtgatgggtctaggccctgaaactgatgtcctagcaataacctcttgatccctactcaccgagtgttgagcccaaggggggatttgtagaacaagcccccatgagaaacagctgttactctacacttttgattgcctatttctgatggcaagagatacatactctcttcaaagagcatgagatgcagccattctttcagcaaagcttcattgacacctgcacctgttaactgtgttcgacattgaagggagaaaggcaagatgtgcactctggactcaagaaactcttagttcagtggaggaaatgagcagataagtagatcattatgattgagagtaggagaagcttagagaaagcacagaaccccagatccagctggtgaaggagggaaggcttcaggcctttaagctcagcctgagaatattgtgaaatgcagaggatggggaaaagggaagagtaccgacttgaaaacggagagctgtcttggctgagggcagggtctgtgtggcaggatgggggagggagtcagaagggtcagatgaactggagtgtagacagcatcagatgcagcagtgcccaccgccccccccccaaccccccgccctgcccacagagcacctgctggtaaccctgggcctattgaaagcaggatgagatgataatttaagacactgaatgatttcttttccaacaaagctctatgttaagtgc

SEQ ID NO: 24123 - DNA, 4801 bp, Homo Sapiens
gaggtccagtataatcaacctgccactaggtagctggctgatcaccccgaggaatggtgccatatcaaggactcagtgttggtctctgcagctggcaaattgggcactcagaagtggccgtagccaggacagccttggtgagtggaagtccatgttgttgagctcatatgtaacctccatctctgccactatgatcattttgttcatgggcccattgggtgatgacgggtggctggggaaagaggctgagtagtatccacagaatgggtcattccattcacttgattattaaaatcctcctctgctgaggtcaccttttggtgagcactcacatgggatacaaataacttcacagtttttgaccactcagaggggtccatccacatcttccccacatttctttgtcaccaattttccaatcatccttcatccaagtccctgaccatccagccaaactcttggctacagcctatgaatcagtatataattgcacatctggccatttctccttccatgcaaagtgcacaaccaggtgcactgcttgaagttctgcccactgggaagatttcatttcacctctgtccttcagagatgtcctagaaaagggctgtagtgctgcagctgtccacttttgggtggtgcctgcatatcgtgcagaaccatctttgaacaggccctagtcttctcttcctctgtcaactgatgatagggaactccccatgaggccgtgggtgcaggctaggggagagaaggcagggtggcaggagtggagaccatgggcacttgagccacttcctcatgtaacttacttgtgccttcaggatgtgctcgagcgcaatcacgtatataccacttccatttgatgatagaatgctgctgtgcatgacccactttatagctagattggttagaaggcacccaattcatgataggcagttcaggttgcatggtgacttgatgacccatagtcaaatgttcagtttccagcaaagcccagtaacagacaaagagctgtctctcaaaaggagagtagttacctgcagaaggcggcagagccttgctccaaaatcctagaggcctcctctgtgattcacctatgggggcctggctgagggctccaaacagcatccacttcaagcactagtggatctgctgggtcatatggcccaagtggcagagcagcttgcacagcagcctggacctgttgcagagccttctcctgttctggaccccactcaaaactggcagcctttcgggtcacttgataaatgggccagagtaacacacccacatgaggaatgtgttgcctccgaaatccaaataggtccactaggcgttgtgcctctttcttggttgtaggaggagccaaatgcagcaacttttccttcaccttagaaggaatatcttgacaggccccataccactggatccctagaaattttactgaagtggaaggtccctgaattttagttggatttatttcccatcctctggcatgcaaatatctccccaataagtccagtgtcttgctcactagatccactcagcataatgtcatcaacgtaatggaccagtgtgatatcttgtggaaatgaaaagtgatcaaggtctctccgaataaattatgatacaaagctggagagttgatatacctctgaggcaggacagtaaatgtatattgctggccttgccagctgaaggcaaattgcttcagatgggccatatggacaggaatggagaaaaaggcatttgccacgtctatggctgcataccaggtaccaggagatatgttaatttgctcaagcagtgaaaccacatctgatacagcagctgcaattggagtcaccagttggttaagcttacagtaatccactgtcattcaccaagatctatgtcttctgcgcaggccaaatgggatcaccatccctgcgtctttcaagtccttgatggtggcattaatttctgcagtctctttaggcatgcggtattgtttttgatttactatttttctaggtagaggcagctctaatggcttccatttggactttccctccataatagccctcaccctaccagtcagggagccaatctgggggttctaccagctcctaattatgcctatgccaattacgcattctggcactgggaaatgaccacaggatgagtccggggacccactgtacccactgtaagtcgcacctgagctaaaactccattaattacctgacctccataagaccctactttaactggaggactacagtgacgttttgggtcccctggaatcagcatcagctcagagccagtatcctgtagtccctgaaatgtctgatcatttccctttccccagtgcacagttaccctggtaaaaggccagaggtcttggggaaggatgggagaaagattcactgcataaattgttggtaatgtagtgggatccttcctcaaggggacccggcctccccttcattcaaggggttctggatctgtaaactggctcaagtccggaaattgattgaggggccatgattctctatttttagaattcaacttagtattttgtccatttgacctagaagttttctgctgatataaattaagtagaaatgcattaggcttcctatcagtttcacttctaggaacaccatgattaattagcaaatgccagagctctacaggagtcagattattctgattgccactttgcctctgctgcccattgtggtagctatgcccacttgcctttgatggttgagtgctgccacttagttggcccctgcaactttgcaatccaattattcccattgtagttaaatttagtagttgagtgactgtgcttcccaccatgagatctgacatacagagaagagcaattacagtgcttttcacagatgcaggtgctgccctcagcaatctgtttcacaaggcattggtcaagggtatatcttctggaccttcccagctgtgatgagtaggtctaaagggactaatccactccaccaccccaatctccttaagcttttggatcccttcctctacatcaaaccaagggagatcaggcatttccaggttgctcacagtgggccaccttttaatccatatttcaggtaaccaagcaaataaactattagaacctttcttaactccccgagctgcaacattaaaagcagagtcccggccaggcatggcagctcacgcctgtaatcccagcactttgggtcgccgaggtgggcggatcacaagatcaggacttcgagaccagcctgaccaacatgatgagaccctgtctcttctaaaaatacaaaaattagcccggcctggtggcacacgtctggaatcccagctacttaggaggctaaggcaggagaatctcctgggttcacgccgttctcctgcctcagcctcccgagtagctgggactacaggcacccaccaccacacccagcaaatttttttgtattttttttaatagagacgggttttcactgtattagccaggatggtctctatctcctgcctgactttgtgatccacccacctgggtctcccaaagtgctgggattgcaggcgtgagcctccgcacccggcctcagaggtttttttaggagtgttttccacttaatagtgggaattgggccgggtgcattggctcatgcctgtaatcccaggactttgggaggctgaggcaggcagatcacgagatcaagagttctagaccagcctggccaacatggtgaaactccatctctactaagaatacgaaaattggtcgggcgtggtggcatgtgcctgtggtcccagcttctcgggaggctgaggcaggagaactgcttgaacccaggaggcggagattgcagtgagctgggattgtaccactgcactccagcctgggcaacaaagcaagactctgtcttgggggaaaaaagtgtgagttaaggacttgctgtgtgtcagggactgccttgggggctggaggcacatcctcgaacaagacagggtcctttccctctagatgcttacattttaaggacagaagacagggaaacaaacagagagaggtgacaggaattactgttagattggatatggagttacaaatgggaaagccaaggacaacttactcatttggcctgagtggctgtgtggatggtagtagtggttattggtctggtggacagaacaggttgggagttggatgatccacattctgttaagtttgacgtgcttgggagagatgttatctagagttttacatttcaaagtcttcagtctctggatggcatttaaatctttgggactgggtgaggtcagctaattattgaatttagatagaaaagataggagtgctagagaccaggcctacctgactccaagccctggggcccaacatttggaggttgggtagaggaggaaggtagaagcagttcagggcctcttgtgtttgtatcgtaccttcatacacgtaagggttaataaatatcttttaaaataatgctaagtgccaggtgctgagagatgagagcactcttcagggaccacctcctcctgcgaagtgcatggatgcccaccaccctcactgctttgggtcaggcagcctccgtctagactctcatgtccttctgtgtcagctggttgacttgaatattgatcaagagtcagttttgtttgtagcaaaccctgttttggtcagtaggacttgttgtaattgcgtaattaaaatgttatgttatctgattaaatcagtattatttttctacaaaaatatgttaaatactttggaaagcttccaaaggcaagcctc

SEQ ID NO: 24124 - DNA, 4379 bp, Homo Sapiens
gactcctccagggacttggtccctaggtccccagatggggagactgaggccgtggctgtgtgtccctctgagagttggagcggggctgggcccgaattcgaccccagcaggattctctctcatttctgagccccggaggtggcagagcggcagactcgggcaagtgaaccctagggctgcaggagcccaggccccgacgccggcgcagaggggacggaagggcccgcccccagcccagcgtgcacagaggccatagccaaggccttaaggctcatccaaccggggactcatatcccccccaccggcagcccggcgccccagcctctacccgtgcccgccgagatgctgctgccgtggtcggtgtcatcggagcgggcccctggggtgccggagccggaggagctgtgggaggcagagatggagcggctgcgcggctctgggacgcccgtgcgcgggctgccctatgccatgatggacaagcgcctcatctggcagctgcgggagcccgcgggggtgcagaccttgcgctggcagcggtggcagcgccggcggcagacggtggaaaggcgcctgcgggaggcagcgcagcggctggcccggggccttgggctctgggagggggcgctctacgagatcgggggcctcttcggcacaggaattcggtcctacttcaccttcctccgcttcctgctgctactcaacctgctgagcctgctgctcaccgcaagcttcgtgctgctgcccctggtctggctccgcccccctgacccaggccccaccctgaacttgaccctccagtgccctggtagccgccagtccccgcctggcgttttgaggttccacaatcaactttggcatgttttgactggcagggccttcaccaacacctatctcttctacggtgcgtaccgagtggggccggagagcagctccgtgtacagcatccgcctggcctacctcctcagcccgctggcctgcctgctcctctgcttctgtgggactctgcggcggatggtgaaggggctgccgcagaagactctgctgggtcagggctatcaggcgcctctcagcgccaaggtcttctcctcatgggacttctgcatccgggtgcaggaagcagccaccatcaagaagcatgagatcagcaacgagttcaaggtggagctggaggagggccgtcgcttccagctgatgcagcagcagacccgggcccagacggcctgccgcctgctctcctacctgcgggtcaacgtactcatcgggctcctggtggttggggccatcagcgccatcttctgggctaccaagtactcacaggacaacaaggaggagtccctgtttctgctgctccagtacctgccccctggggtcatcgccctggtcaacttcctgggtcccctgctgttcacatttctggtccagctggagaactaccctcccaacacggaagtcaacctcactctgatctggtgcgtggtgctgaagctggccagcttggggatgttctccgtctccctgggtcagaccatactgtgcattggcagagacaagagcagctgtgagtcctacggctacaacgtttgtgactatcagtgctgggagaactccgtgggggaggagctgtacaagctgagtatcttcaacttcctcctcaccgtggccttcgccttcctggtcaccctgcctcggaggctgctggtggaccggttctcaggccggttctgggcctggctggaacgggaggagttcctggtccccaagaatgtgctggacatcgtggcggggcagacggtcacctggatgggcctcttctactgccccctgctgcccctgctgaatagcgtcttcctcttcctcaccttctacatcaagaagtacaccctcctgaagaactccagggcatcttcgcggcccttccgtgcctccagctccaccttcttcttccagctagtgctcctcctgggcctgcttctggctgcagtgcccctgggctatgtggtcagcagcatccactcctcctgggactgcggcctcttcaccaactactcagcaccctggcaagtggtcccggagctggtggcccttgggctcccgcccattggccagcgtgccctccactacctgggctcccacgccttcagcttccccctcctcatcatgctcagccttgtcctgacggtgtgcgtctcccagacccaggccaatgccagggccatccacaggctccggaagcagctggtgtggcaggttcaggagaagtggcacctggtggaggacctgtcgcgactgctgccggagccaggcccgagcgactctccgggccccaagtaccctgcctcccaagcttcgcgcccgcagtccttctgccccggatgcccatgccctggctccccgggccaccaggccccgcggccgggcccctccgtcgtggatgccgcgggactgcgttccccttgccctggacagcacggtgccccggcctccgcccgcagattccgcttccccagcggcgcggagctgtaaccccgacccctgcctccccgaagcctccctggggccccttcaggcctccttactccatcttccagacccctggcgaccaccgcccctctcagtggctccagggcctccctcagaggtccccaaagatggacacacaaccccaggggcagcaggaaaaacatatgggaattttctttctatattttaatctcatccctttaaaatgtctattttttattgtgttttttataatatacataatctattagtatagtatctcttgaatgcgattttttctagaatgtgttctgctgatttgttttagagccatgagtgcaatttatacacatacatctattgggaatgctcagaagttgtttactgatggaagtgccttcagaagagtccgggaaccacttcctaaggaaggaaagagctggccacagttagagcaagcctgcctggggccctgctctgtgttccagctgcaaactgcctgcatcatcccttcctgttactcttccttcacctgagacagtcgaggccacagcgtcagccagggccagagctgggatttgaacccaggcactcgggctccagagccacactgccccagtgtggggcttagtggcggctcctggccctgactgaggggctgactgaagcctggtgagagcgtgctgggtcagcctctccctggcgggaatcctctccgtccagtcttctaacctagcagcctcacgtccacagagctgccttgtgaaactcagcagagccctggcttcctgcagagccgtgttctcccagcctgcttcatggctccctggttgagccaagcttgcggatccgtggggtgaaggtacccgcaccgcctgggccttagtggtatgtacgggcctgcatcgtgagcagcgggcgggggcccaggcaggtgaggcagctggccacaagggcagggcccggcccccctcccaaggctgtgtctcatattcttgagcctgttcgagtttccttttccaagcctcctgttctcccacccccacccctgccatgctgcagtgactaaatctgtggttctcatccttggagaacacctgagtagctgctacaagctggccacagcccagcgactctgatgtggttgggctgggtgtggccagcagccagggcatcgggacttttcgaagctcccaggtgactcaccggcagctggggatgagaactgtcaggagggaaggtcagaagtcccaggatgcacttgaaaagcctctagctccaccagtgaccagctcctggctggactcctggtctggactcagcatcagggaggctctggcctctcgccctcagggctgggggcttcttcacatggtcatcaaagacttggccagttccgcctctcccgcggccgtccttgtctcacccagcatcacgacgcatcagttcaccaacaaacacgattcagtgctgctagtgctgggtcctgttctgggggctggtgatgaggccaagagggaaagagggagctctgtgttccatcgagggggcgacaagcctggaccagatgaaagtgactcatgttgttaattagcggcttagggccaaaggtggcccctggaccagtggcctcagcatcacctgggaaaaggttagaaatgaacattcccaggccccacctcagcctcctgaatcagagcatccctttggcaaaccatactgagaaacaaccacgtgcatcaccaagcgctgtgaagaaggcaagctttgagaccttgaaggaatcatcaaactctgggcctcggtgtgctcacccagggcgagacaaagacgccatgctcctccaagtggcctccaagattaaatgagcaatgactttt

SEQ ID NO: 24125 - DNA, 4515 bp, Homo Sapiens
ataattgaagaaaaatgatggaagagagtggaatagagacaacaccacctgggactcctccaccaaatcctgcagggctggctgctactgctatgtcttctacccctgttccattagcggcaaccagttctttttcttctccaaatgtatcctccatggagtccttcccaccactcgcatactctactcctcagccgccccttcctcctgtgaggccttcagcaccattaccttttgtgcctcctcctgcagttccttctgtcccaccacttgttacttctatgccacctcctgtttctccatcaactgctgctgccttcggtaatcctcctgtatctcacttcccaccttcaacttctgccccaaacactcttttacctgcacccccttcgggtcctcctatatcaggattttctgttggttcaacttatgacattacaaggggacatgctgggagagctccccagacacccctgatgcatcattttctgcaccttcaggaacaggtcttttgccaactcctattactcagcaagccagtttgacatctctggcacagggaactggaaccacatcagccattactttcccagaggagcaagaagaccctagaattactagaggtcaggatgaagcatctgctggtggaatctggggttttattaagggtgtggctgggaatcctatggtgaagtctgtgcttgataagacaaaacattcagtagaaagcatgattacaacgctggaccctggcatggctccctatatcaaatctggaggtgaactggatattgtagtgacctcaaataaagaagtaaaagttgctgctgtccgagatgccttccaggaggtctttggcttagctgtggttgtaggggaagctggacagtccaatattgccccacaaccagtgggctatgcagctggattaaaaggtgctcaggaacggatagatagcttgcgtcgaactggggtgatccatgaaaaacagacagctgtgtcagtagaaaacttcattgcagaattgctgcctgacaaatggtttgacattggttgtttggtggttgaagatcctgtccatggcattcatctagaaacatttacacaagccacaccagtgcctttggaatttgtacagcaggctcaaagtctaactccccaggactataatctgaggtggtcaggccttttggtgacagtgggtgaagtcctggaaaagagtttactgaatgtcagccggactgattggcacatggcatttactgggatgtcccgtcggcagatgatctacagtgcagccagagcgatagcgggcatgtataaacagcgcctgccacccaggacagtgtgagaggagacctacctgggagactgagactttcccccacttttagcttgatgttaaagaagtggttgtaccttcctaaatcgaatagtctaaatgaatccagtagtttttatcattttcctgtagcctgcaatttttctttctctagaaaggcatcatgtcattccaggagacaaaaagaaacaaatcctttttatagtcataccatttcacctatcatagtactcaaaaaagaaaatatacaaatctatttacagcacaatttaatataccagatttataaggtggaaattcatgtgcagagacatttaacttaatgccatgtacttgattattttgttctttaaagaagacattattaaagaacatgttggttgaatgtttataaaagcatgatttgctttggcttcatctcttttctgtcagtctttgactacttttgtatgtgcacacgatctcagggctggtgctgagcagcctgctcaacagtcactataagacacctacttgtcgggagatgttccacatttctgtgcatgttttcagtaatatgggccaaaataatggaattgattattttcctttttggccatcacgtacacatgtaatctggaaaatcatacctttgtcaattttaaacataacttttggcatttcccagatttatactatgaacattggggtaatacattttattttttcattgctatatgacagctaaggggcaaatgattcaagtatattttaaatcagaagtattcaaattatttttgtataatactgttcagtacttccaagaataagctctgacaacagccattgtttctgcttccactcatattctctacacattttaatacagaaatttttgagagggggttactttattgcttgtgggttagtatgtctcttacttcaattaaggttacttatttggtttgccttaagcattacttttttaactttgtgccatttggtctttactttttatggatgttttcaaagaaactattttatattcaatctagtttatttagtctactgtatttctatttcgtggaagccttttcccctcaaataatatattatatcatttttggacttatataaatgataattaaataaatttttttcttaatactgttggactttgtatatacaagttcaaataactttttcgaagatagtttcttatataaatgtaatttaatttttttactcttctatacagttctttagatgtaaaagaattagcacaatctctggcagttttataaaagctgttgaagctcttgtcctgcactgtctttaggtatcataggtatcaggtttgctttgtgttaatgccacttcaagtcattatttggtttctgctatttttttacctgaggataagaagaatgaatattaaatttgaatattaaatatatgttactttccaagcactgtataatgactgttcagtgaatatcagacttccgtgtcattaaaagtcatgagagacagcacagagaggttataggttgccttggtgtacttttgtccaggagtaacagggacagaatactttctttctttccttcaagtacaagaaggctttctctaccatttgcgtctacactttattttaaaagctatccttttctagtagtattttatcatggcaatggcatgatgacaacaacagtctttcattacagactgaagggaagcatgtccttacttaaaatagttctgctactttccctcctattataaggaaatcttacagattctaaaaataccttaatttttctttgatttttattttaccaagtcacaaatgtctttttgatgttttgagaattgttctcatagaatcacaaatactgacatttcattagatgattattttcctagaatccccaaagagcagtggcagtccatggcttggttgaagctagaaattttcctgcccctggtgacctggtaagcctcctgctcggaaccgtgtgagtgggtgaggaagatgagagatggtcagatggaagagagaaatacatgaactgctctggcctctctggttctgttcttggcccagagtttttgaaaagcagcggagcatgactgacttcacatgctcagctttctcagccttttgtttattttgttgtccttagatttccctgttgtaaaaggggcaagaaaagtaactcatcatctctaacacaccatggcagcttagccaggtagtcttagtggtggtgtttaggcataagatatgctgatcatcagtctcaggccacagtttccttcactaatcgtccagcttgagtgttctgttctcttcctgcccatttccttgaacctcctgctctagccttggcggagggagagtgctatttgcttttgttctccctctgtcttaggaaaagccatctttaatatagttcttcaccactgttggggttgttttgtgattttttttttcttccgaagaactcctggttgttattggattttgtattttaatacaaattattgaattttataagcttgtacacaatatttaattagtgtgaaaggaaacaaagaatgcaggaaaaataatttaatatcaacctcagttgacaaggtgctcagattattcaattcgggatcctccttttgttaggtttttgagacaaccctagacctaaactgtgtcacagacttctgaatgtttaggcagtgctagtaatttcctcgtaatgattctgttattactttcctattctttattcctctttcttctgaagattaatgaagttgaaaattgaggtggataaatacaaaaaggtagtgtgatagtataagtatctaagtgcagatgaaagtgtgttatatacatccattcaaaattatgcaagttagtaattactcagggttaactaaattactttaatatgctgttgaatctactctgttccttggctagaaaaaattataaacaggactttgtagtttgggaagccaaattgataatattctatgttctaaaagttgggctatacataaattattaagaaatatggatttttattcccaggatatggtgttcattttatgatattacgcaggatgatgtattgagtaaaatcagttttgtaaatatgtaaatatgtcataaataaacaatgctttgactt

SEQ ID NO: 24126 - DNA, 2257 bp, Homo Sapiens
gtttccagaaagagttgagctcctgagcctggtgctgacgaattgtgttggagacagccctcagcgctgagtgcgtgtaacgagtgtcctctctccacaggtgcggtctgcctgcagcctttctgccacctgtactggggctgcacccggaccggctgctacggctgcctggccccgttttgtggtaatactggctcttcaggccccagttgctttgacctttgcatgttctcttggtgaacttgagggcaggggatggtggggtccatagcctgatgtttatagggatgaggccactgttggtcatcaaatgatacctattcctggctggactgcagaggtgtgtcaaattcgtgttagctcaaaatcaagccttaacagaattattaggggagatactcccaggacagaatccttgcagcggggttctgctgttacgataccaagaccaggtgctggggagactcggagagctgatctttttaaggagggagtggaatggaaatcatttctgcttgtcctctgtttaaaattgagttttatcattgaacttcttattctttctagaatctgtaatgaaaagaaatatgtttatcctcagtgtcgggcagacagtgctttcctgcgacatcattataaacaggtaacattgccccttcatctcggcagagctcaacctgggtgacaagtgtctggacggcgtgctgaacaacaacagctacgagtcagacatcctgaagaattacctggcaaccagaggtttgacatggaaaaacatgttgaccgagagcctcgtggctctccagcggggagtgtttctgctgtctgattacagagtcacgggagacaccgttctgtgttactgctgtggcctgcgcagcttccgtgagctgacctatcagtatcggcagaacattcctgcttccgagttgccagtggccgtaacatcccgtcctgactgctactggggccgtaactgccgcactcaggtgaaagctcaccacgccatgaaattcaatcatatctgtgaacagacaaggttcaaaaactaagcatccagaggccctgagcagctttcagcactggaggtgaagagagcgtgtttttaaaatacagagacaagcacgtcaaggtgttttcacagccccctgagggaagggacgcagggtctccgacaggtgctctggggtgactcttctgtggagctttttaccctctgagtgagaccctccccagagccccgggggccgcagcccgccctcctggtgagcgctgggcagggctcatggtggcatcagcagcagagacgaagcctttctgtaacatgcggccgtcccgccgagaggggcagttttgctcttttgtacattttccgaaactacagttaaagcagaagtctgttttcaggaaaagtttcaagggagaagggcaagtttatcaaaaacattgtttcaggagaagggagcataagtttacagcctacaggacgtacacaatatcctgctgctgggaaaaccacagcattttatctattttttattttaataggtttggtgcttatcttctaataagatttaaatgtcacaaactgtagcacaaataatataatttataatttacaaattgactaaaattgggtatagtatggtatttgaaagaataagcatatgcttctgtttattaaaaaaagaaaccttccaatgtccaaaactgctaaccctcgacgtggccgccaagttagtcgctccttgctaaccggtgagtgaccgcggccccgagcctggggctggacgcaggtcccaggacatgctgctcccttgtgtgagtgaccacggccccgagcctggggctggacgcaggtcccaggacgtgctgctcccttgtgtgagtgaccacggccccaagcccggggctggaggcaggtcccaggacgcgccgctccctcatgctgcccgggcccttcctccaagaccctacagagcctgaggggcaccttggcttccgcctgtgctagctttgccatgtcatctggaataatacttgaaattttgatttttggaaaaaaaagttttttatcttttgttgaaatcacctgttatccttgtttgtaaactgataacttttttgcttcttctcaggaatacagttttcaactgttgtcttgctcttgatagaaactgagaagcagcaatctgtatttgtggaggaaagtcctctcttttgcatattctaataaatgagccgcgtttgctcctcc

SEQ ID NO: 24127 - DNA, 2630 bp, Homo Sapiens
ggatttacggcggctgcatctaactgggagggggccgcacctcgcgtgaaccccgacccttctctgcagggactggggcccagcgccccggaggaaggcgtcgcgggcgctctgctagccaagttcgaggcgggggaggcagcctcgggcgcgcccggcttctccgggggggcgggcgcgcagatggccactcaggtggagccgctgctgcctgggggcgccacgctcttgcaggccgaagagcacggggggctggtgaggaagaagccgccgccggcgcccgagggcaagggcgagcccgggccaaacgacgtccgcgggggggagccggacggcagcgctcggagaccccggccgccctgcgccaagccgcacaaggagggcaccgggcagcaggagcgcgagagcccgcggccgctgcagctgcccggcgccgaaggcccggccatcagcgacggggaggagggcggcggcgagccaggcgctggcggaggagctgccggagccgcgggcgcggggcgccgggacttcgtggaagcccccccgcccaaggtgaacccgtggactaagaacgcattgccgccggtcctgaccaccgtgaacggacagtcccccccagaacactctgctccagccaaggtggtgagggcagctgttcctaaacagcgcaaaggcagcaaggttggtgactttggagatgcaatcaattggcccacacctggagagatagcccacaagagtgttcagccacagtcccacaagcctcagcctacccgtaaactgccacccaagaaggacatgaaggaacaggagaaaggagaagggagtgatagtaaggagagtccaaaaaccaaatcagatgaatcaggggaggaaaagaatggagatgaggattgccagcgaggcgggcagaagaagaaaggaaacaaacacaagtgggttccattacaaatagacatgaagcctgaagtgcccagagagaaactggcttcacgccccactcgcccaccggagcctagacacatacctgccaatcgcggagagatcaaagggtctgagtctgccacctacgtgcccgtggccccccccaccccagcctggcaaccagagatcaaaccggagcctgcctggcacgaccaggatgagacatcgagtgtgaagagtgatggggctggtggggcgcgggcttccttccgtggccgtggacgggggcgtggtcgcggccggggacgcggccggggtggcactcgaacccattttgactaccagtttggctaccgaaagtttgatggtgtggaggggcctcgtacgcccaagtacatgaacaacatcacctactactttgacaatgtcagcagcaccgagctttacagtgtggatcaggaactgctcaaagactacatcaagcgccagattgaatactacttcagcgtggacaatttagagcgagacttcttcctgcgaaggaaaatggatgctgatggtttcctacccatcacccttattgcttccttccaccgagtgcaggcccttaccactgacatttcactcatctttgcggccctaaaggacagcaaggtggtggagatcgttgatgagaaagttcgtaggagggaggaaccagaaaagtggcctcttcccccaatagtggattattcacagactgatttctcccagcttctcaactgccctgaatttgttccccgtcagcactaccaaaaggagacagagtcggcacctggctctcctcgtgcagtcaccccagtgccaaccaaaacagaggaggtcagcaacctaaagacactacccaagggcctgtctgccagcctgcctgacctggattctgagaactggattgaagtgaagaagaggcctcggccatccccagcacggcccaagaagtcagaggagtccagattttcccacctgacctctctgcctcagcagctgccttcccagcagctgatgtccaaggatcaggatgagcaagaggaactggattttctgtttgacgaggagatggagcagatggatgggcggaagaacaccttcactgcctggtctgatgaggaatctgactatgagattgatgacagggatgtcaacaagatcctcattgtcacccagacaccacattacatgcgccggcacccagggggggaccgcacaggcaaccacacctcgcgtgccaagatgagcgccgaactggccaaggtcattaatgatggcctcttctactatgagcaggacctgtgggctgaaaagtttgaacctgagtattcccagatcaagcaagaagtcgagaacttcaaaaaggtcaatatgatcagccgggagcagtttgacacactgacccctgagccccctgtggatcccaaccaggaagttcctcctgggccacctcggttccagcaagttcctacggatgccctggccaacaagttgtttggtgctcctgagccctccaccatcgcccgctctctaccaaccactgtcccagagtcaccaaactaccgcaacaccaggacccctcgcactccccggacaccacagctcaaagactcaagccagacatcacggttttacccagtggtgaaagaaggacggacactggatgccaagatgcctcg

SEQ ID NO: 24128 - DNA, 3791 bp, Homo Sapiens
attgtcgctagtggccgctggggctgggaggggtgtgctagagaggcgcagcttctctgggcgtggtttttatcctgggggaaggatcggtggaatgtgaggggaggtggaggagatggcggcgacggcccgggaagatggcgccagcggtcaagagcgaggtcagcggggctgcgagcactatgacagaggatgtctcctaaaggcaccttgctgtgacaagctttatacttgccgcttgtgtcatgataacaatgaagatcatcaactagatcgctttaaagtgaaggaagtgcagtgcataaactgtgaaaaaattcaacatgcccaacagacttgtgaagaatgtagcacattgtttggagaatattattgcgatatatgccatttgtttgacaaagataagaagcagtatcactgtgaaaactgtggaatttgtaggattggtccaaaggaagattttttccattgtttgaaatgtaacttatgcctagctatgaatcttcaaggaagacacaagtgtattgaaaatgtgtcccgacagaattgtccaatatgtttggaggacattcacacatcccgtgttgttgctcatgtcttgccatgtggacatcttttacatagaacgtgttatgaagaaatgttgaaagaaggctacagatgtccattatgtatgcactctgctttagatatgaccaggtattggagacagctggatgatgaagtagcacagactcctatgccatcagaatatcagaacatgactgtggatattctctgcaatgactgtaatggacgatccactgttcagtttcatatattaggcatgaaatgtaagatttgtgaatcctataatactgctcaagctggaggacgtagaatttcactggatcagcaatgacgagcctacacagtactggagaacttggcattttctgatatagaaaaaggctttccttggtatcgtgttatcatgtgtcgtcatctatgcattagagttgatgtgttttgtactagtgtcacagcataaaatcatattacaagtacgtaaggattcagggtctcttgatagacctatcatagctctatattgaatgaaagccactgtgcttgtgttttgattggaaattcctttagtgtcagttttttggaagccaatgatgtttgccactgatacattcatagaagtgtattatattttcatgaagctttgctttaagtgacactacgcgtgcagttcatttctagttcttgatagaactgcacttaattttcagtagtagtcttgactttttaagggctgtgttatattaagttctcccttactgttaaaacctaattaaatatgctttagaattttctaagacagtcctctggatcctctaaatgtgaattttgatgtaataactgctaataaaattatattgaagcagtgttttatagaaagttttttccaaagttttctatgtttggctcaattagggcagtatcatcagttctataatgtaaaagaaattttctttcttttgaggtattccataaaagtagttgggaaaattattatgtaaaataataagactcttccaaagccttaataaaaacatcaacattgaaaacagttttttttaggttgcccaaaattatttcttcaaagagtcattcattccttcatttagcaagtatttattgagcaactgctatgtggcagatatgtttctagatgctgtagggacaacagtgaacaataaagataaaagtccttgtcctcacagcagtacattctattgttcatcatatttgatcaatgtactcatttttctttatgcaaggagtggatgtcttattgtaaatgaatagaatatttcttccctaagcgtgtgaaaataggggatggatgagtgggaagggcatgggatattcctggcaagatctctgatttcataatacttttttgggctcatgtagtggaattaaatatacctcttacttcaggaacaaagttaacaaatatgtttgatgatccagccgactttgacactgttatctccgtaatagctttaccattaggctaggatgtaaaatgtacatttatcagttgataagtacctattgagcaccagttgtatttccaactttgagctatttgaatcttctttgaataaggaagttagccttttaactagaaagcctaagagttctggcacatttatttcttcttttgttgaaatttattcacctagataaaggcagcagtttgggactcagatctttattttatcccaccttcttgtcttctgtattccactcttcttatgttctttcccttcatctgtttccttggcctggccagagcagcagtgctgatcttcatttgggaaaggatgttcctgggtattaccaattagtatacagataagtaaagactagttttccagatctaatacttttttttgaagtggttttgctctgtcatttaggctagagtgtagtgaagtgatcgtagctcactgcagccttgacttcctgggctgaactgatccttccacctcagcctcctgagtagctgggactacaggtgtgtgccaccatgcccagctaatttttaattgttttgtagaaacaaagtccaggctggtcttgaactcctgggctcaagcatttctcctacctcggccttccaagggctaggattacaggcatgggccactgtgcttggtccagatgtattactttttatgtttggtattattctgccaaaccaatcatgttattgtttttaatcattgaatcattggatctttaaataggagtgagtatataataataaggctcttctgttttcaacatctgtgctgggtcatgcattagcattaattactacaatgattctgtggggtaagtgttgtcctcatagacaagaaagctgaggtttagaggttaaaatgacacattgggggtaaataacagacactatatgttggagttgggaatcagatccaagtttgactccaaacccacttttaccacattgcttttgatctaaacttctattttgctaaaatacccctcacagctagtcatccatatcattgaagcgctcatgatttgatagattaacctttcatttttttaggtgactctagttagaaagtcttatttcacaatctgattgtttctttaacttaggatccaaacatgtccaaaataatgcatagtacatatgcaatcactcgtttatgctgtctagtcatgcacttaaagcaattttcaaatgtactcaaagtctctaggcttcggtacccagggttgcttcaagtatttgttcatgacacgtcaactcgatgattaaaatccttcaacacttctcattcacaataagaataaaatctacatcccttaccattcagtatgcaaaacttaaaatacataactttacccttaaatattttttctttctctgacttcataagtataggttatacctctataagaaagaaggtaaaaaactctcaacaatcccttctttcagagagaactactgttaacattttaacagacaacttcattcttttcctattcttttttataatgcttacaggaatgttaaatacttagacagatcttaagtacactagaattatctgtccctgaaataagttaggttgccctgccgcagaatttgtatctatagtttatttggattatttttgaaaaaagtaaaataacaatacccttacgaattttttggtgcatagcatctcagcttcttttatcattaaagatgtatgtat

SEQ ID NO: 24129 - DNA, 2899 bp, Homo Sapiens
gactgtaagctaagtctgttttcatgccagatttcagccccacccagagtgtgctctagatgttgttgatttgaatggttttcccagttcccactccacatggggaagttgaatgaatgcacacctgctgctcacttcttgtgaggctgccttttgtgatcaaataacaggaagttctgctttagaggagggcacgatgaccatgtggcagtctgcaagtggaattttgggatggcagcccgaggaacatccagagttactgtgtgacttggtcctgccattgttagctttgaaatcacaggcattgggctctgttttgacaccattcattggactgcgggacagtcattctttacgttctctcttgagctggtgagagaggaggaagagggaagtcaagagcaacctccaaggcctatgtcagcctcttctccttgggtcttggggtgggttagaactgggttccagtctggccagatgggttgctggctgcactgagggtgattcttctcagaagatgggctgcctgtggtcaggacagggcataccagtctggactccaccttcccagacacctactttaaggacctgtggaaactgggtgatccaattatagggctggggcaaccctgctttggccaccctcatttacaaacttaggttgggagcttgggtttcctgtctcacttccaaaagccttcaagatggcagcagatggacacaccctctcatttcttgtgtcttgtctgtcagatggcaggaggcctgtatcagtaaatttgaggaaaatgttctctcctgggccagcctcacagcttgcgttgggtgtgttggaattgttctcttcggccttgttctgccttgtgatcttttcaattcagtgaataaaccaggtatccattttttcaccaacccaccctgtagattgtcagctttttgtttgagagatgcctggtctcacagttacatgtatcagagtgtgtgtaagttgtctgtgttagaaaggttggggtgggggctttgttgcaggggattagactgttctttcttcatcataatttgagatacatcctgagtatgactgtctaaccctttctgtgtggcagaaaaatatgttttccaggtagtttttactactacagagagtctgtaaataagtgctttaaaaaaataacaaaccaataagatatttgtctcctatataaacattctgtgtatttagcacttgaaaatcaacaaatccagaatttaaaaaaatgccacagacttttcaaagcccaactgtacttttttgagaatttgtccgtacctactaatatgccttattcttcttcacctagtgttttaaaagtcctgggtagaaagagttttagaaatgtaatcagttgttcagcttcaataatatagagatctaacatagtcagtcctcaggccccctaaagaaacaagcaagaaagtgagggccatcactagggttggctttggggaggggaaaactaaggactgcttttgccaaatgatatttttgataatgtaaggaaacacagggaccacaaaaccttttttttttaagtgtgaaagattagtgccttttggcatacttttgattttagaggatatagtatcggcattgacaaatcacgtagaaacaaagaatgctatagatgacaacagtattaaatgttactcctgattctgcagaacagcttttgaagatactggggggtatcttcaagcctcagagcagcttgtttcagatagaaattctctatgggttgaaatgccaaaaacagaaaacatgatgttgactcatgtaatttagtccattttagcagagcctttagtgttaacaccagtggcgaggagcattgcatattctctgtcagcagcagcactcccacaccaggtggttctgggctctctgtaggctggtcctagtaggtgacacccagcaacacccctgttggacaggattgattgttcgcagtcttagaccaacacttcagtcagaaatgttactgggaggaggaaaggaaaatcactttttttcctccatgtggaaatgaggagagaggaaagtggattgcaaaccaaaatgtgagtcagtgtgatgaagcagtggctctgtcatctcggcctttatccaataacaaaccagcatctcttaaaggcgcttttggcctagacacccctgaagtttggatgaagtctggtggattccctgtccgttgtatttctgtgtgcctgttcccttcattgctgtgagttgggagtgcattgagagatgatgtccatctgatatattcctgtgaaataaactgccagcaaactttctaacttgtattttaactgttaaagaagagattaaaaacttcggctttggacatgtccacattatggactgtcatcttatttttaaaagtcattctttacgtttaaaattttaaaataaaaaccttctgaggtattgatgtagtccaccgtgtaaatgttaccttctctccatgctgccattatgccaaaacaaaagctgtgataaaaaaagtgcttgagagagtgtgttgataagaaagtgatttatttacagatggaagtctttgtttcatgaagctaccgaactttaaaaagaatgtcaccctttttttttgtttgttatggaaaccagagattgtaaaatggaaaaagaatcgttttttttgttgactttttgatgctggcacgaggtttttgtccacttttttcatatatctgtgtataaaaaaattgttgtttactatggaattagtattacattttgaggtaaacaaaagaatttgtattgcttgataaatattagcttgtaaatttaaagtttctttacttcaattaacttaaaggaccaataaacccataaaagatg

SEQ ID NO: 24130 - DNA, 2220 bp, Homo Sapiens
ttacagtaatcaaagatctaacagacctgataaatcacctgttcccacctcctttccccttcactccacttatagtatgtgtcattttcaatgcctgcttcccaacttcctgccatctgcctttcatgtgtgtttttcctcacacagaacctcttcctccatcttcatttccctccttttcctgttcctccaatccccagatccaccactcctgcacatgccatacacatttagaagccaagtattcagaatcagtagaaggggagcagagtgatttcttgcttcctcccttcaaagcactaccacacctagactggaaatgtgggctgggtaatttcttgctgttagcagccgagctacccttctggcatctatactttctccagtaaatgaggaaccgtaactctttggaacaaaccaaaatatagcagatgtaattgtacagttcctgattaaacttcaattgcaaaaaagaaagttatttctttaattctgtgggagttttgtataattttacttttatggtttttacacatacttgaaacactctttctaaagaattaataaaaacagaaatgagaaacatgaaagatctttttcttgatactgctcctttttcttgatactgctcaagagagcaagcctctcttgatactgcttcctagatttaagggtaaagaaagtagaaatagttctcccttcacccaaatttggaagtataaaactttctgaacatgccatttagaggttatgtcattagctttcctgccttcttatattgtaatagttgcgattcaaaaacactgtttcaattttaaattcaagactttttatttgaaaaccatcagactcaaagaattatgaggctcagttaatatgattatgccacattatttacatttgttaactgtcatttacccgctctatgttaatctttttagaaaaaatttgcatttcagaaacaaaaagcacggatagatatataatatcaaaatattcccaaaggattttgatgttccatctatgcttgttaaaatgtatgattatgattaaactttttatcattcttattttccttggcatccataatcatggaaaattacaagcttgcagtaaacatcctaacttaacttaacttttaaacgatagcatttattgtatttggttttgatctgccaggcttatagatggtataaaattttcaggggataatttttcacatcaaaattccttctctcccacattatacattttaaagtatgcacaaggcagaaaatatagggtttgggtttttttccttcgttttattccacctgatctccttatagtcccagagaaggaagactcaatgtacatttctctcagaaatatgacaggtctgtgtttttgttggtctggcatatgtttgtctatcttgaacagtctgacaggtaattatttataaaatctggttttgcccagtaagttcatataataacctttcatttttcatcataagccagtaagctgaatttagaataaagcaaggtcatttatgtctgtcctgaaccagcctacatgtccccataattgctcaatatttttaattcccttttctattttttatacttaggttctttctctgactctttgcacaatactaaatttgaagtgaaataaaacttccttcagcagtgactatagaaacaaaagaaaatttacagaaggaatgtttaagaaaacttcagtaaattattttctcaataatcataatgttagagcagaagatagtcttagagatcattaagaacagctgctcatcttgcaaatgaaaaaaccatggcctagagagggaaagtgagtttcctaagatcactcaataatgtagtgacagaccagagatgagaatcgatggtccctaattttcagtcggtattatacagtattttctaccatactgggttagcataagaatattactaagacatgttggggttttatggcatatttatcctagacaacgatgtaaatttatttaaaaactgtactaattatggatacatcctaaagcatacgtgttatatagtaaaatcttcagtgtgactgtggtattaagtaaacagtctgttatcttacacatcaggcttaactctaagtcaaatggaaatatacaaagctagtttctattttttgtcccttgtattttagagactgaatttgaaaataaataagccaataaat

SEQ ID NO: 24131 - DNA, 2206 bp, Homo Sapiens
ctcttcatctttgtcatgtgattcaacatattcatgggaataatattccatgacctttgctgtcttctattggttagaagccaactacaggtcttaaacacactcaagtggagaggattacacaaacctacagatatcaaggggcaggaatcacagagctatcttagaattctgcctgttatagttctaaggttgagtttaaatccagactggctctaagtttaacagtccatgcttctaatcagtattatcttctttattcctttgaagaaagcaaacctactttataaccttgcatagagttctaagtaaggtatcccgcagcagattcatactgggtgtcagtcaaatgtgaattattttcacaccttcacttttaaagatcagcttcaggaaactataaccacttgcagttttgtattttcaggaagagatttccaacagtctctctaaacactcaggttatataggttatttcaatttgttcctgtttgtctgaggcagagataaccctggggtttgggatttcaaacttgggtctcaaaaaataactttagttctgcttcttgtttttgaaacagatgaagtgattgagaagaaacagtgaacatcctcatttcacagataagacaacatggatcagccttttactgtgaattctctgaaaaagttagctgctatgcctgaccatacagatgtttccctaagcccagaagagcgagtccgtgccctaagcaagcttggttgtaatatcaccatcagtgaagacatcactccacgacgttactttaggtctggagtagagatggagaggatggcgtctgtgtatttggaagaaggaaatttggaaaatgcctttgttctttataataaatttataaccttatttgtagaaaagcttcctaaccatcgagattaccagcaatgtgcagtacctgaaaagcaggatattatgaagaaactgaaggagattgcattcccaaggacagatgaattgaaaaacgaccttttaaagaaatataacgtagaataccaagaatatttgcaaagcaaaaacaaatataaagctgaaattctcaaaaaattggagcatcagagattgatagaggcagaaaggaagcggattgctcagatgcgccagcagcagctaggatcggagcagtttctgtttttcgaagatcaactcaagaagcaagagttagcccgaggtcaaatgcgaagtcagcaaacctcagggctgtcagagcagattgatgggagcgctttgtcctgcttttccacacaccagaacaattccttgctgaatgtatttgcagatcaacctaataaaagtgatgcaaccaattatgctagccactctcctcctgtaaacagggccttaacgccagctgctactctaagtgctgttcagaatttagtggttgaaggactgcgatgtgtagttttgccagaagatctttgccacaaatttctgcaactggcagaatctaatacagtgagaggaatagaaacctgtggaatactctgtggaaaactgacacataatgaatttactattacccatgtaattgtgccaaagcagtctgcgggaccagactattgtgacatggagaatgtagaggaattattcaatgttcaggatcaacatgatctcctcactctaggatggatccatacacatcccactcaaactgcatttttatccagcgttgatcttcacactcactgttcctatcaactcatgttgccagaggccattgccattgtttgctcaccaaagcataaagacactggcatcttcaggctcaccaatgctggcatgcttgaggtttctgcttgtaaaaaaaagggctttcatccacacaccaaggagcccaggctgttcagtatatgcaaacatgtgttggtaaaagacataaaaataattgtgttggatctgaggtgatatgttctgaatgtaagcaccgtcaacatcagacacctactcatggacatgtggttgccggattttcttaagatgtttccagaaatgactgatattttatatttatacattttagatgacaaagcttgatatttattgctgtcgcacattttaaagttttctttttgggttgctctgtgtcaagagaggttacatggtgttaaatcggtacctgataatgtacccaaatactatggccagataataaattgtgctgcaaac

SEQ ID NO: 24132 - DNA, 2069 bp, Homo Sapiens
acatgcccagcggggcctatgtctatcccccgccagtcgccaatggaatgtacccctgccctcctggctacccctatccaccgcccccacctggtgagtgtgtcctttgctgcccccactcccctcatgagcccacctacccaggctccccccaggccagggagactttattccttgagctgcttcaggaccaacgaaggagctggagaggcccccctcacccgggagggggccgcagccgggtgctcaccatgtccttgttactctctcaccgagcagagttctatccaggaccccccatgatggacggggccatgggatacgtgcagcccccaccaccgccctaccctgggcccatggaacctccggtcagcggccccgatgtcccctccactcctgcaggtgagggcccttgggtgctggcagcccttcgggaccagccctctcctccccgatgtcgcacagagagcctcagaatggccagagactgctgagagccgcagatgatggatgacccctggactaccccaggggcccagcagggctgtggcctggtggagcggagctagattctggccccacccccatcccttagctatccatgtgccctgggcggggaaggtcaccctgtgtgcctctcgatcctctcatctacactcagctggtcggtcacagtggcacctggggcattggctcaaggattagatgaggtgagacatgcgatgggcctggaaaggaccgtgccagcgcgtggcatgtgctcaggaaacctcacctgctgctctcattggtggaactggacccccagcaccagctgccccgagccatgggggcccggggtctcttagctgagctcagggggaggagaacttgtcaccgacaccaggtgtgtttgctctcacagccgaagccaaggccgcagaagcagccgccagcgcctattacaacccaggcaatcctcacaacgtctacatgcccacgagccagccgccgccacctccctactacccaccggaagataagaagacccagtaggccctcctgcctccctgcctcccaccctcatctctctaccctacccctcccatcggggctgtgctggggcttggggaggggagggggcgccttgttctccctccaggtctgatcataaacaattaccaggaactagcattgtgggacattagggcccccggcctcgggagaggtgccgcccagcttcccatgccagcccggagcccacagtgctgcccagcgtacctccctcaccgtctggggctcttctgggagcacggagcatcccctgttcctgtttcactctcagcttctcccctcgaagggactctctggccacctcctccaccgcagtccagctccctcagtctggcacccactgctacactcagcctcatgagccacttcagaccagccaggtgtcttcccgggccctgccagaccctgctcacattccctctgctggtctgtgctggtctcagaaggccaccgcgcccgcattccactcagccagggtccagctgcagcccccgccacccttccttcccttccctgtcctgggtcatgttgttgccaccctgtgtgacttttgaagctgtaaaatgagcttccagggcttgggtggcgtcggggcagggccgccgaggctgggaggaagcccttctgccttttgctggtgtttctggaatttgctttccctcacctctcacttccttctagaaggagcttcctgactggaaccagagaatgcatgtctgtccacttggtggctgctgggtggggccgggaacaagggcccctgaccctgtgtgctggccgggacctgccaccagccccccagcctgcttcttccccttaagctttgtgcccctggatgcgctaacattcactcttgtttgtccctggactggccatgaagtgaggagatggttatttaaagagaattccctatttatttgacaaaaaatccagttaatatattaatgtgaaataaaccctgtttgcacctcgatttgtttgctgaaaatgtgaaatagtaaaaatgaaataactgg

SEQ ID NO: 24133 - DNA, 3407 bp, Homo Sapiens
gtgcgcaaggagcgggcgcggagccggcgggcgggcggaggatagcgcgggcgcggcacctgcgggcccgagggtctggctgtcgcagcgccgggccgccccgactccgagcggctgctgagatgagtgcagtgtcgcagccccaggctgctcccagcccgctggagaagtcgcccagcacggcgatcctgtgcaacacgtgtgggaatgtgtgcaagggcgaggtgctgcgggtgcaggacaagtacttccacatcaagtgcttcgtctgtaaagcatgtggctgcgacctggccgagggcggcttcttcgtgcggcagggcgagtacatctgcacgctggactaccagaggctctacggcacccgctgcttcagctgcgaccagttcattgagggtgaggtggtgtcggcgctgggcaagacctaccaccccgactgcttcgtgtgtgccgtctgccggctgcccttcccccccggggaccgagtgaccttcaacgggaaggaatgcatgtgccagaagtgttccctgcccgtatcggtgggcagcagcgcgcacctgtcccagggcctccgaagttgtgggggctgcggcacagaaatcaagaatggccaggccctggtagccttggacaagcactggcacttgggctgttttaagtgcaagagctgtgggaagctcctgaatgccgagtacatcagcaaggatgggctgccctactgcgaagctgactatcacgccaagttcggcatccgctgtgacagctgtgagaaatacatcacggggcgcgtgctggaggccggagagaagcactaccacccttcctgcgcgctatgtgtcgggtgcggccagatgtttgcagaaggcgaagagatgtatcttcaaggttcctccatctggcatccggcgtgtcgacaagcagccagaactgaagacagaaacaaggaaaccagaacttcctcagagagcatcatttctgtccctgcttccagcacctcagggtctccgagccgtgtgatttatgccaagcttggtggtgagatcctggactacaggggcttggcagcccttcctaaaagtaaggccatctatgacatcgaccgccccgacatgatctcctactcaccctacatcagccactctgcaggggacaggcagagctacggcgagtcccctcagttgctctcgccaacgccgaccgagggggatcaggatgaccggtcctacaagcagtgccggacctccagcccaagctccactgggtcggttagcctcgggcgctacactccgacctcacggtcaccacagcactacagccgtccagctgccaggcgatcggatggggaggatggaagcttggaccaggataacaggaagaagagcagctggctgatgctcaagggggatgcagacacaaggaccaattctccagacctggacacccagtccttgtcccacagcagcgggaccgacagagaccctctccaaaggatggcaggggacagctttcactcacaatacaagatctatccgtatgactccctcatcgtcacaaaccgaattcgcgtgaaactgcccaaagacgtggaccggacgagactggagagacacttgtcgcccgaggagttccaggaagtgtttgggatgagcatcgaggagtttgaccgcctggccctctggaagaggaatgaccttaagaagaaagcccttttgttctgacggctgccagcctgccccactggtgtgtgccgggcgccgaggccaggggcccctggcgagaaccgcacacacccctcccacacaccttgctctggcttctctgtgtccatggggtgggcgggagggggtcccccagcaggtgcggcccctgcacctgccggcgacactcctgccggtagtttagggccgagacggctagcttcacgccacccttccccgctgtggcttggtgtcagggagaggctgtagagtggctgtgtcgggcatcagatggagcacacaggtggctgcagcccagcccaccttcccagcgttctcgaggtgccctggccccggtgctgggcacgtgggggacagaggtggccgggacgtgagctgtgaggcttgttgatgacgggtgctgacaccatcatcgggggtgggcacacggcccttcggagcctgggcagcctggcctcacaggcagactcgcagacggggcagtgagcgtctgggacagtgccaagagtggggtgtgtgatttttgcaggcgtctgtgatgggtctctttagggacaaatgtcaacaagggacaagacagggcaccttccgccagcgcccctccatgcgctgcgttcctcctccagatcgacccctagatgcctacacaatatctttaaagtaacacagaagtttttattttattaaaaagtatagcctacttaaacgcgagatgacatatatagagtttaattttacggtccctccgcaggggagcggcctccagccttattctccaccgctcggatctgtgtggtttcagtctgttcttggtgtggtcctcatacacagagctccctgtctagtttcttttctttttcttttttctttttctcgtcacacaggtaaccttaaagacagacccctctaaagaacgctttgtaaatacatgtgaggtatagccaccactgttttccttgctgttatttttccaagtcttggggagaaaacatcctcctctgatggccaaagccctggaatcaagggtttccacgtaccctgcctaatacccgacgtagctcttgatgcaccgtccttgtgctgtggctggcggtgtctcagcctgaaacataaaccccacatgccccaggagcgatgtgctccctgaaacagacaaccacacgctgttggggagagaaggatggagataggatggagatgtggctcttctcatctttgaagccagcagggcatcccggagcaggaggctggccgggctccccaagcgaaggcgttggtgtctgtcattaggtgtgtgttagggtgcagcaccggccgtcacaggatgctgataagcgcgctgagaggtggatgaaacaccaaagtctgtttccccgtccgcagtgggtgttgcctctttgtgtgtgtcccgatgttcctgcctgtgagtcggccttactccgtttccttagcgcccatgacacgccaagtcccgtttcgcactcggcttctcacccgcccagctcggctagggagggggagtttttagcacctaatatgcttcctgccattgcgcaatctgagcctgagcaactggaaacccccatttctcattagtgcaatgtcatatctgatcccaggaagcctggaaaataaaagacgatgcattataacttgcggaagtacaaaaaaaaaaaaaaaaaaaaaaag

SEQ ID NO: 24134 - DNA, 3107 bp, Homo Sapiens
ttatgtttttctttctcttataccttcatcttctccatctagaagctcttttagtcactagcatttattaaatatccgttgtatgcagagcacttcaactgggcattgcctcactttcctaatttgccgcccccttcctctgtcaaagccttcaaatcatgggaccctctggcctctctccctcttattgtattggtgtgtctctgtatttatgggacgcatctgtgggggtggtcatatgccagtgagcactagattaagtatatccttggtggttccgggtgagtctatctggctgctttggcttcaggaacatgggaacgatgcctgtggaggtgggcgtacaccgtctggagggaagatggggtgatagggtgtgtgcgtgtttgtcttcttgcctgtagttctcaaaaagaggcatggtggtcatttttaaaatctatgcttttttcttattcaagttatttggtactttacccatataagggtatttctggaatgatattgtttcatcctttcatttcttctttgggcatggtgattcccacacctgcaactctatttatgtcctcctttcttttcccagctctacctattagctgacttcctagtggtaccagaggcatgatttcactttgggtctgggagtttgggggaaaatgaaaaataggtttaggtattttctgggataagtggaaatcctgtctgtgtcatggagggatggccatacagagtaatccagtagtcattaaagacatacagaatcaggccgggcacagtggcttatgcctgtaatcccagcactttgggaggtcgaggtggtagtatctcttaagcccaggagttcaaaataagcctgatcaacatagcaagactctgtctttacaaaagaaaaataaaaaatcagctgggtgtggtggtgctcttctgtagtcccacctactgggaaggctgaggcaggaagatcacttgagcccaggaattcaaggctgcagtgaaccatgattgtgccactgcaccccagcctaggtaacagagtgagaccctgtctcaaaaaaaaaaaaaaagaaaaaagaaaaaaaaagacatagaattttattaaggagagtaatctcggtcagattcaaagttctggagtgtaaaagctccgaagttcctttttttattacaggctacccacctttctgttctgagacccctcaagagacatataagaaggtgatgaactggaaagaaactttgacttttcctccagaagttcccatctctgagaaagccaaggatctaattttgaggttctgctgtgaatgggaacatagaattggagctcctggagttgaggaaataaaaagtaactctttttttgaaggcgttgactgggaacatatcaggtatatccatataaacactttcagaattatttcagaaagtctctagtttacttaataataatttggaaggaccatcattggcaagccaagtaagggaagagagcttcttagagatttagggtcttttcctgattttcattcatggtgaagattgggcattagattttttgtcagccgtgtgtcatggaatatattgaatctagcagttatttacaaagtgaagtgaactttgttttttgaggtggagggagcatctaggaagcgtattaccctttacctagaactcagcaacctcttaggtcccgccagcgggactgttcctgcccacagggtggaaggtatcactggaacatagagaagggagaaaggagtggaggaaagattggaggggtggaagtggagagggaaagggagagtgaaaattgttatggtgggggtagtagactacggccaatagccgtgagagcctagaccacctgctgtagtccagaccttctcattcagcattcattggttattaaatagaaggtgaagttttcatttattttataattgtgtactgatttgctgcttgtgattttttacctttgccacttttctagccatcctacttggcacctccagtggaagaagggcagagccctacacaaggggacatttagaggttcagtttccctttttagtagacaggccaggccatggggggagttgcactaacttcacgttttagttattcttatctttctttctagctatgaatgattgagttatttttttaaaatcataatttactttgggtacagtcagttggcttggttggtcagtgtttataagtttttcagagaaaataaatgctgcctgccagtgaagagtcttctcatgtcagaccaggggtcttttttggagaaagacttgattggtatgatccatttgattactaacttagtaatttttggcatgtgtattcttggcagagagagacctgctgcaatatctattgaaatcaaaagcattgatgatacctcaaacttcgatgagtttccagaatctgatattcttaagccaacaggtaacaccaccagcattgtctcctgctgccttataagcacattatttacccccaattttgggatgatgtttacaaatcagggtagtgaacatggagaggaatttcatttcttcaggttctttgtaagtacttttctaattctaatgctgggtagtggtgaaaccttggtgaatggaaaatgagtatcagctcccatgtttagactgctcaactgggtgagtaagtcacaaaaatctgttcttttgttatttactaagtgttaggtaatctgaaatgacaggaatgggaaaataaaacattaaaaaatttgtgaagaaatatgagatttaaagaacatgagcaagaaaatgtggaaaattcatagagtgaggccaggcgcggtggctcatgcctgaaaccccagcactttgggaggccgaggtgggcagatcacaaggtcaagagatcgagaccatcctggccaacatggtgaaactccatctctactaaaaatacaaaaatcagctgggtatggtggcacacgcctgtagtcccagctactggggaggctgaggcagaaggattgtttgaacccgggaggcaaggttgcagtgagctgagatgacgccactgcactccagcctggcgacagagcaagactctgtctc

SEQ ID NO: 24135 - DNA, 2729 bp, Homo Sapiens
atttccctcttcccgactcctctagtcccttcatcagtccaggctccccacagtgccccatcttccctcttcttttcccagtctttctctcctgccttctctacccgcatctctcccagccattgcctaaacctcggcagtcctttcaggttggtggcacacagctgggcactaagccatgtcggacttccacgtgcatccccaggccaccgtgggtgaggagggtggtgtggcccgcttccagtgccaaatccatgggcttcccaaacccctgatcacttgggagaagaacagagtcccaattgacacggacaatgagaggtacacattgctgcccaagggggtcctgcagatcacaggacttcgagctgaggacggtggcatcttccactgtgtggcctcaaacatcgccagtatccggatcagccacggggccaggctcactgtgtcaggctcgggctctggggcctacaaggagccagccatcctcgtggggcctgagaacctcaccctgacagtgcaccagaccgcggtgcttgagtgtgtctccacgggcaacccgcgccccattgtgtcctggagccgcctggatggtcgccctatcggggtggagggcatccaggtgctgggcacaggaaacctcatcatctcagacgtgacggtccagcactctggcgtctacgtctgtgcagccaacagacctggcacccgggtgaggagaacggcacagggccggctggtggtgcaagccccagctgagtttgtgcagcatccccagtccatctccaggccagctgggaccacagccatgttcacctgccaagcccagggtgagccaccgcctcatgtcacgtggctgaaaaatggacaggtgctggggccaggaggccacgtcaggctcaagaataacaacagcacactgaccatttctggaatcggtcctgaggatgaagccatttatcagtgtgtggccgagaacagtgcgggctcatcacaggccagtgccaggctgaccgtactgtgggctgaggggctccccgggcctccccgcaatgtgcgggcagtctctgtgtcttccactgaggtgcgtgtgtcctggagtgagccgctggccaacaccaaggagatcatcggctacgtcctgcacatcaggaaggctgctgacccaccggagctggagtatcaggaggcagtcagcaagagcacctttcagcacctggtcagcgacctggagccctccacagcctacagtttctacatcaaggcctacacaccaaggggggccagctcagcctctgtgcccaccctagctagcaccctgggtgaagcccctgccccacccccactgtcagtgcgagtcctgggcagctcctccttgcagctgctgtgggagccttggccccggctggcccagcacgagggcggcttcaagctgttttaccgcccagcaagcaagacctccttcaccggccccatcctgctgcctggaaccgtctcctcctacaacctcagccagctcgaccccactgcagtgtatgaggtgaagctgctcgcctacaaccagcatggagatggcaatgccacagtccgctttgtgtctttgaggggagcatctgagaggacagccttgagcccaccatgtgactgccggaaggaggaggccgccaaccagacgtccaccacaggcatcgtcatcggcatccacatcggggtcacttgcatcatcttctgtgtcctcttcctcctgttcggccaaaggggcagggtcctcctgtgtaaagatgtggatatgaaggagctggagcagctgttccccccggccagcgcagcagggcagccggaccccagacccacagatcctgcagcccccgctccgtgtgaggagacccagctctccttgctgccacttcaggggtgcggcctgatggaggggaagacgacggaggcgaagaccacagaggccacggctccctgcgccggcctggcggctgccccaccacccccagatggaggccctggcctcctcagtgaaggccaggcttccaggcctgcagcggcccgggttacccagccagctcactcggaacagtagccagtgtctggcaggctccagagggtggacggagcggggcccattctcaggtcaaaagcaagatttctactgtcatgtgggatttggatggtcctgggggctccccagtatttctatcctgactgcctcttgggttgtcaaaacccaaggcagccttgacagggaccccccggccctaacacccatcaggagttggagcagttcctgcaggagcctgttccttccctgggctgacgcccccttgcctctgcctggtacccacatgacttggaactgaactaacatttttctttaaaaagcaaaacttaaaaaaaaaaaaaaagaggagagagatagaggaaggtgaattagactccaaaagatgaccctgctgtagctgggccctgacactgtcaccctccaccgactttgttttctcaggatggatttttgctgttttggctctcagcacctacctcagccggaatgaatgtcctggggggcagtggggcggtggcctcagtccccttaccccacagagcccgaatgcactcctacctcaagtccccttgctggggaccccctctcccttcccacactgttgtccagagtaaaaaaaaaaaaaaaaaaaaaaagcacttccccgtttccaggtgtg

SEQ ID NO: 24136 - DNA, 2306 bp, Homo Sapiens
atgaagactgtgaaagaagaagaatggaatgtttggatgaaatgtccaatcttgaaaaacagtttaccgatctcaaagatcaactttataaagaacgattaagtcaggtggatgcaaaactacaagaagtcatagctggaaaagcaccagaatacttggaaccgctggcaactttacaggaaaatatgcaaattcgtacaaaggtagcaggaatctatagagagctctgcttagaatctgtaaagaacaaatatgaatgtgaaattcaagcttctcgccagcattgtgagagcgaaaagctgttgctatatgatacagtccagagtgaactagaggagaagataagaaggcttgaagaggataggcacagcattgatattacctcagagctgtggaatgatgagcttcagtcaagaaaaaagaggaaggatcctttcagtcctgacaaaaagaagccagttgttgtttcaggtccatatatagtttatatgctacaagatcttgatattcttgaagactggacaacaattaggaaggcaatggctacattggggccacacagagtgaaaacggaaccacctgtgaaactggaaaaacatctgcacagtgctagatctgaagagggaagactatattatgatggtgaatggtatatacgtggacaaacaatatgtattgataaaaaagatgaatgtcctacaagtgctgtaattacaacaattaaccatgatgaagtttggtttaagaggcctgatggaagcaaatctaagctttacatttcacagctacagaaaggaaaatattcaattaaacattcataatcatgatttaagtgttatctaaatttaccttattagtgttaccaaatgtaagtgccatgagagtaaaaaaatgtattcaataacttaatattctcactgaatcatgagagaatgtgtatttgtaggtagtactctaaatagatctcattgatatgttattaaaagaaacagtaataaaaattttatcacgatccttacgttgatttgcctcttaggtccgatgaccaataggtattctgtatatggtaggggtttctttctaaacatttttctttggttttaaaaaaagttatgcaaatttgtcttatctttagtaaactatgactacatttatctgcaatttttaaaattttccatatctttgtcattcattgtgtgtttgtaaataaggccgatagaatgtttcctataaatggtttgtactagtacattagtgttaaaccagaactgaaatttaaacatatatatatatgaggatgtatatatggcatcatcagcttatttagaactgatggccataccttacaatcttgttttacccaaaattaagctattggggttgaaagctaaaaggagcacttttgtagaatagcaacttttcttttcctctttcttgattgtatggtggggtggtgacctatttttacaaattatacctaatgagtaaaattagtgtaaagtgataacatgcttctacctgtatttctagtgaccctttagcggcaggtatttatacctggtacttatgatgcagtatataagtggtgaacaataactgacagtattgtgcttgctgtacatgtctggtcttttgaaacagattttagtaagcattttccagaggtaaaactgtgtccttattctaattttattcctagggcaaagtagacagggattatttccttgaatctatttccaaattaatatttttttctttggtatttctacactttaaggccatttggtgcaatttagaaagtgttggcctcccttccgctagccacattcaaaattaacttccaaaacctcaggaacagtacaaagaattgaaaccctcaatatggcagcacagccggctgtagtgtatatttagggtacaccaaatcaggtattcctggtggtcttgtgcactttaatttctgttacaatgagttaagaggatgaggaagaaatctacttattaacacttactgcagaaatgtctgcattattccgtttgttttcttattattttacctctccaaacatcttcctgtgcagatcactacttcatagttgccaaattttaaaacacttaactgctgaaattcagtgtcagcaaagtgatattacgttgttctgtttctaattaaccttagcaaatgtacataatgtcaaaacccaatagtatttgacagtacttatgtatacaatgtttgataagcatttttaataagatttgtatttttaaatttagtatataataaaaagatgtgtttcagtgtg

SEQ ID NO: 24137 - DNA, 2876 bp, Homo Sapiens
cgatttatacctaaaactggaagatgtgacccataaatttaataagccctgtataatggatgtaaagatagggcaaaaaaagctatgatccttttgcctcatcagagaagattcagcaacaggtcagcaagtacccattaatggaagagattgggttcttggtgcttggcatgagggtttatcatgttcattccgatagctatgagacagaaaaccagcattacggaagaagcttaacaaaagaaactataaaggatggagtctccagattttttcataatgggtactgcttaagaaaagatgctgttgctgccagtattcagaagattgagaaaattctgcagtggtttgaaaaccagaagcagcttaatttttacgcaagttcattactctttgtttatgaaggttcatctcagccaaccactacaaaattgaatgacagaactttggcagaaaagtttttgtccaaaggacaactgtcagacacagaagtactagagtacaataataactttcatgtgttaagttccacagctaatggaaaaatagagtcttcagtgggcaaaggcttgtccaagatgtatgcgcgtcacaggaaaatatatacaaaaaagcatcacagtcagacttcattgaaagttgaaaatctggagcaagacaatgggtggaaaagcatgtcacaggaacatttaaatggaaatgtactttcccaactggaaaaagttttctaccatcttcccactggttgccaagagattgctgaagtagaagtgcgaatgatagattttgctcatgtgttccctagcaacacaatagatgagggatatgtttatgggctaaagcatttaatttctgtacttcgaagtattttagacaattgaatcctctgttgcagtctttttaaggggtgggccaatcataatgaagaggggcagtcaatatctgcacctttaatgctatgtaaaaaatttgtattatgagtcgacattttatttgtctttatacttttggaagaatggttaacttttttataatcttactcaggaaaactaactatttgttcattagaaaactatgaagaataaagaaacttaggaatgttaagcagggaatgtggtggtacatggcttaaacatcttttttggctcaagcaaaatgcaaaccattattcagtcattaagagtttagttagctttctgtagccaattcatgaaatctctgtccacccagccttgacaatgagccatatctaaaatattacattattagaacacctaccaaaatctcgaaagcacaggttgatgtccttagtattgctatgtatgaagttactaaaactggagaaaattctacttcagaaataagtactgtttaggttttatattaaaagttcagaccagcatatcaaagggtgctccttagtgaaatgatttagaattgttgcattccaaaagcaggttttctctttaatttttacatctctctctcaaaatattatacttcatgaaaaagacaattgatgtggatgacaacaacaaagtcttgaaattaagggcacactaattgtccttactggggttaggggaagagagatattattttcaaggaacaaaatattttcctttacaatctttcattcatgagaaaattggaatataaatttattacattgtgaaagtatcataaaccatatacctttgtatctaaatgcagcttcaaaaaagtaaataattgaagttttatttctcctctaaataacttgaatttttttctttaaaaatttatgtatttatatgtccccatttagttaagtggtagtgtaaatgtatgttgttaaaaacagtttctcagaattatagtaagcaatgaaagacaatatctaattaggttgttatcaaaaatactgtgtgtaaattagtccgtaatatagggtttggtgcgtatctatattcatgcttctatttcactcttcctcaaaacagttttatattatgttgaccagtgaaattgtaacttaatttcatggggacaggggcagtgctacagttcctggaaaaattagatttgtattatctttgtttcacacccaccaccttaaaaaaaaatcaactagttatttgtcatttaaaacatttaaaactttgagtcttcaaatacatttgatgttaatgctgccattacttgcacttccattcactaataacatttctaggtagttatcagttttgtcatattcctggaaaatattttggggttgtaaattctttctcctctttttcttctggagttacaaattgaatttttaaatccgagcacctttattgtggtgtggagaaaattatcacaattttatgtttattttaccttctcagccttctctgagggcactttgcaaatacctgagtccaaacagaagtaccaactaatgctctatgaactctatccttagtaaatctattaaacctgaataatttaaaagatcatgttcattttgtaatagcaaaatttgattttaattttttatttagaattggtgtatttatcatagggacttccaatttttcttcactttttgaatggatattggctatagttttatgttttaacgggaatgaatttcaagtcataataatcagaatttttagttttacttttttcttttacaatatggattttgttgttatttggatagtggttcaataaatcttaagctcagataattaaacactattttgaatcttaacaagatactgaggctttttttgtatgggatgatatcaacctatgtacaatgaatttaataaacttaagtattgtcagattttttgcacattttagctcaataaaatcttaatgttcaagatttttttatctgc

SEQ ID NO: 24138 - DNA, 4564 bp, Homo Sapiens
catctggaaacccgggtcctgcaagaactgcttctgcctgcggagcgaccaccagctggtggccggccctccccagcccagagcgggcagcctgccccctccaccgcgcctgcctcccaggcctgagaactgccgcctggaagatgaaggtgtgaacagctcaccttactccaagcccacaattgccgtgaagcccaccatgatgagctccgaggcctctgatgtgtggacagaggccaacctgagtgccgaagtctcgcaggtcatctggagacgagcccctggcaagctccccctcccgaagcaggaggatgcccccgtcgtctacctgggcagcttccgaggtgtacagaagcctgctggtccctctacctcccctgatggcaattctcgctgtcccccagcttacaccatggtcggcctgcacaaccttgagccccgcggcgagaggaacattgccttccacccggtgagcttcccggaggagaaggctgtgcacaaagaaaaaccctcatttccttaccaagaccggccctccacccaggagagcttccgccagaaactggctgcctttgctgggaccacatctggctgtcaccagggccctgggcccctgcgggaatccctgccctcggaggatgacagtgatcaaaggtgctcgccctccggggacagcgagggtggagagtactgctccatcctggactgctgccctgggagccctgttgccaaggctgcctcccagactgcaggttcccggggcaggcatggtggcagggactgctcacccacgtgctgggagcaggggaagtgttccgggcccgcagagcaggagaagcggggcccgagcttccccaaggagtgctgtagccagggccccactgcccacccatcctgcctgggccccaagaaactgtccctcacctcggaggctgccatttcttccgacggcctctcttgtggcagcggcagcggcagcggcagcggcgccagtagccccttcgtcccccacctcgagagtgattactgctccctcatgaaggaacctgccccagagaagcagcaggaccctggctgcccaggggtgacccctagcagatgccttgggctgacgggggagccccagcccccggcccacccccaggaggctacacagcctgaacccatctatgctgagagcaccaagaggaagaaggcagctccggtgccttccaagtcacaggccaagatagaacatgcagctgctgcccagggccaaggccaggtatgcacaggtaatgcctgggcccagaaagcagcatctggctggggccgggacagcccagacccaactccccaggtgtcagccaccatcacagtcatggcggcccacccggaagaggaccatcggacgatctacctgagcagccctgactctgcagtgggggtgcagtggccacgagggcctgtgagccagaactccgaggtaggtgaagaggagacttcggctgggcaggggctgagctccagggaaagccatgctcacagtgccagcgagagcaagcccaaggagaggcccgccattccccccaagttgtccaagagtagccctgtagggtccccggtgtcaccgtctgctggagggcccccagtgtcactactggctgaccttagtgatgggagctgtggcggcagcagcattgggccccagcctccatcccaaggtcctgctgaccccgctccttcctgccggaccaacggtgtcgctatcagtgacccatccaggtgtccccagcctgcggcctcgtcagcctcggaacagaggcggcccaggttccaggcaggcacctggagtcgtcagtgccggatagaggaagaagaggaggtggagcaggaattgctgagtcacagctggggaagagagaccaaaaatggccccacggaccattcaaactccacgacctggcaccgtctccaccccacagatggctcctctgggcagaacagcaaagttgggaccgggatgagcaaatccgcctcttttgcctttgagttccccaaggacagaagtgggattgagacattctcacctcctcctccgcctccaaagtcgcggcaccttctaaaaatgaacaagagcagctctgatttggaaaaagtgagccagggctctgcagaaagcctcagcccatccttcaggggtgtccacgtcagcttcaccaccggctccacggacagcctggcctcagactctaggacctgcagcgatggaggtccctcgtctgagctggctcactcgcccaccaacagcgggaagaagctctttgctcccgttccgtttccttcaggctccactgaggacgtgtcccccagtggcccccagcagccccctccactcccccagaaaaagatagtgagccgggcagcctcttcaccggatggcttcttctggacccaaggctcccccaagcccggaacagcaagccccaagctgaacctaagccactcggaaaccaacgtccacgacgaatctcactttagctattcgttgagccccgggaaccgccaccatcctgtcttctcctcttccgatcctctggagaaagctttcaaaggcagtggccactggcttccggcagcagggctggcgggcaacagaggcggctgcgggagccctggcctccagtgcaaaggggccccctccgcctcatcctcccagctgagcgtgtccagtcaagcctccaccgggagcacccagcttcagctgcacggtctcctgagcaacatcagcagcaaggagggcacctatgccaagctggggggactctacacccagtccctggcccgccttgtagccaaatgtgaggacctcttcatgggcggccagaaaaaggagctccacttcaatgagaataactggtcgctcttcaagctgacttgtaacaagccctgctgtgactcgggggatgccatttattactgtgccacctgctctgaggaccccggcagcacctatgctgtgaaaatctgcaaagcccctgagcccaaaacagtctcctactgcagcccgtccgtgcccgtgcactttaacatccagcaggactgcggccacttcgtcgcctcggtgccgtccagcatgctcagctcccccgacgcgcccaaggaccctgtgcctgccctgcccacacacccccctgcccaggagcaggactgcgtggtggtcatcacccgagaggtgccacatcagaccgcctccgacttcgtgcgggactcggcggccagccaccagacggagcccgaggcgtacgagcggcgcgtgtgcttcctgcttctgcaactctgcaacgggctggagcacctgaaggagcacgggatcatccaccgggacctgtgcctggagaacctgctgctggtgcactgcaccctccaggccggccccgggcccgcccccgcccccgccccggctcccgcccccgccgccgccgcgcctccctgctcctctgccgccccgcctgctggtggcactctcagccccgcagccggccccgcctccccggaagggccccgggagaagcagctgccccggctcatcatcagcaactttttgaaggccaagcagaagccgggcagcaccccaaacctgcagcagaagaagagccaggcccggctggcccccgagatcgtgtctgcttcccagtaccgcaagttcgatgagttccagacaggcatcctcatctacgagctgctgcaccaacccaacccgttcgaggtgcgcgcccagctgcgggagagagactaccggcaggaggacctgccgccgctgcccgcgctgtccctctactcacccggcctgcagcagctggcacatctgctactggaggccgaccccatcaagcgtatccgcatcggcgaggccaagcgcgtgctgcagtgcctgctgtgggggcctcggcgcgagctggtgcagcagccgggcacctcggaggaggcgctgtgcggcacgctgcacaactggatcgacatgaagcgggccctgatgatgatgaagtttgcggagaaggcggtggatcgcaggcggggcgtggagctggaggactggctttgctgccagtacctggcgtctgcggagcccggggccctcttacagtcgctgaagctcctgcagcttctgtgagccaagccccagcctgcaccgtcgctgccccttccctgcctaaccctttcctgtctcgccttggaagcacccatgtctcccctgggaaatggtacagatgactgggatacctggatgtaaaatatataaatatatatatagaaaatacatataccatatataaatatgaaagactaaggatgctgttgcccgtccacactcgtctcctctctgcactaagtcctccctgttttcttctgtaattatacacatttccagttccatgcaacgtcctgaggacagttctgtgaactgaatgcagcctggacactggcctcaataccttgtttaggatttcttcacccttttgtcaaattgttatttaaagaaaaaaaaaaaagaagaaaattccattaaaattttttttggttg

SEQ ID NO: 24139 - DNA, 5992 bp, Homo Sapiens
agcagctcccatttccacatccactccaattgaaagctggcctctcgtagacaggggccaggccaagtctgaaggaccacccttgctccctaaggcagagttgcaaactgagagtttaacaccggttccaaattctggttcttctgtcctgggatcacttttcaaacagccatcctttccagcaaataaagggacagaagattctctgatgggcaggacccgtgagacaggcacagagaagaacaccagcagccttgagttggaggagtctctcccagagcagcctgaaacagggcgacaagaggaagaacttccgagattcccctgcaaaaaacaagactacagcccatcatctggagaagcccaggaagtaccgtttgccctttcactcagcagtgatggagctgtgagccctgttggggagcttgcagcaggaggagacagagacttggagagtcaggctgggtctcttgtggagagcaaagccagggatgcagctgaagaagtggcgccccctcttcccatgggagcatcagtcccttccattgattccatgatgcggaagctggaagagatgggtctgaacctccgcaaggaccagaagaaaaccaagaagcgtgtgtcattttctgagcagctcttcacggaagaggcagtggcgggggctgccttgctggtggaaggacacagcagttgtccccaggagctgaaccctgcatggtctgttgctggaaacgcgtctgacggagagcctcctgagtctccccacgcagaggactcagaaagggaatcggtgaccacacctgggccagcgacgtgtggtgcgccagcctccccagcggatcacctcctcctcccctcccaggaggagagtttctccgaagtccccatgagtgaagcaagctcagcgaaagacactccactctttaggatggagggagaggatgcccttgtgactcagtatcagagcaaagccagtgaccacgaaggtttattgtctgaccccttgagtgaccttcagttggtctcagattttaaatctccaatcatggccgatctgaacttaagccttccttccattcctgaagtcgcatcggatgatgaaagaatagatcaggttgaagatgacggagatcaggttgaagatgatggagagacagcaaagtcgtcaactctggacataggagctttgtccttgggcttggtagtcccctgtcctgagaggggaaaggggcccagtggcgaggcagataggttggtactgggggagggcctgtgtgatttcaggctgcaagcaccccaggcatctgtgacagctccttcagagcagaccacagagttcggaattcacaaaccacatcttggcaagagctcaagcttggataaacagctgccaggccccagtggtggtgaggaagaaaaaccgatgggaaatgggagtccaagcccgcctcctggcacatccctggacaatcctgtacccagcccctccccttctgagatctttcctgtcacacactctttccccagctctgcacattctgacactcaccacaccagcacagcagaatctcaaaaaaaagccacagcagagggctccgctggtagagttgaaaattttggcaagaggaagccactcctccaggcctgggtctcaccctcggagacacatccagtctcagctcagccaggcgctggaactgggtcagccaagcacagacttcatcctgtgaagccaatgaatgccacggccaccaaggttgctaactgcagcttgggaactgccaccatcatcagtgagaacttgaacaatgaggtcatgatgaagaaatacagcccctcggaccctgcatttgcatatgcgcagctgacccacgatgagctgattcagctggtcctcaaacagaaggaaacgataagcaagaaggagttccaggtccgcgagctggaagactacattgacaacctgcttgtcagggtcatggaagaaacccccaatatcctccgcatcccgactcaggttggcaaaaaagcaggaaagatgtaaatcagcagaaaaaaaacaccgagacgtttctgtgacttcactttcacctgctccaggggtcaaggacttgccttgcctgataaccagccagcaggctccgaatcaccatctccctcacatgttatccggcaagagtgaattctaccaatggaagccaggttaatgattacaattaatcttttactgtacattcccaaggctttagttttaaatgccactgtgcctttaacaaggttgtaaatattttatgcccaccagagatgtggtcataagatctgatcctgagccagagattcagatggcacaggaagtattcatgtattttaacactggggttttctttctttcatactgagattttttttcagtatgtatcctccagctcttaaagcttacctgagaaagctttaaatgagaaaaggaccatgcgattggtgctgtgttacatacacatactttcttggcttctgagtagctcaggtgtggcttttggctgcagatgttaaattttgataccatgtaaacctacccagcttctcagacttgggtcttgttttttgatgggaacagaggtgtttagagaaagcctctgagtatgcctttcagattttgaacaagcggccttttctaaacatcgacttctactactctctagccttaaaataccttctgcttagatccagggcccttctactggagataggaaaagtagaattcaggaattaaaagaattactctttattcaatttgaggaacttggtgaaagcccctcctcttatgacagccaggttcctgctggctagaccagcctattcagcgctttgctaggggattgggtggtccacgcactcgctaatacagttctccaggtgtggaatgatgtcaatacgattgcttggccttttccccctgtgcctttgctcggtgctctggtttcctcagcaacactccttgtaaggggcagagacagggtccaccaactccccaagatgaagaagccccttcaggccagtcgtggtggctcatgcctgtaatcccagcactttgcaaggccgaggagggtggatcacttgaggtcaggagttcgagaccagcctgaccaacatggcgaaaccccatctctactaaaaatacaaaaattagcttggcatggtggtgcgtgcctgtaatcccagctactcgggaggctggggcaggagaattgcttgaacttgggagatggaggctgcagcgagccaagatcgtgccactgcactccagcctgggcaagagtttttttttaagactcttaaaaaaagagcctgggcaatttttttaagactctgtcttaaaaaaaactaaaaagaaaaaaagaagccccttcactctacaggggacaggagaccatggattggaccccaaagggattgaactgcatctgcatgtctgtcctttgaacactttctctccctgcccaaaaggaaacccaaattatttgtgggatactggggaaattgtagtgaagggcttaatgtagttaataaaagttaaaagtcagtagaaaacaggtgcctcagccttcaaatggttgctttttttccattttccctcatgaatagactcaccagcattttacccccttgttataaaactgtgcagagcaagaagatgatacttatttttgaatttgtatttttaaaactagatttatagactttttttttttttaactagggcacttgcttccttcttagctaaaagcaccagctgagatttttcaggtaattttgttgttactcacttaagactggaattagaatgtttctggtatttctcatttttttccctggctatgatagaatctcatctaatcttgacatctctcctaggggaagaatatcacaggctaatagcgtggttgggggtgaagatgatagcagttattaaatcaggaatctcttttatgtatgtccttgttacattgaggttaagagacaaaatcattggcagtgcaatctctttccaggatttcgtttgctgtggcattggttatatcagagcactttaatctgaaggatgatactgtaacttgatttatctaattagcttttaattatctacagctattttattttatttaattctctcctacagtactgggaccactgtaaacttctcagatgacttgtatttttgtagtgctatgaaatttatttacatacttataaagaaaactgtatgttcacttgaactctgaaaatgtacatgtatggctggacgcggtggctcacgcctgtaatcccagcactttgggaggctgaggcgggtgaatcacttgattgaggtcaggagttcgagaccagcctggccaacatggcaaaaccccgtctctactaaaaaatacagaaattagctgggtgtggtggcagacagctgtaatctcagctgctcgggaggctgaggcacaagaatcgcttgagccagggaggtggaggttgcagtgagctgagatcacatcattgcactccagcctgggcaacgggcgagactctgtctcaaaaaaaagaaagaaagaaaaggtacatgtatatatttgtcctgcattatgttttttacttgatataaatgtatttttactgtgatagtccaagtgccctggggggcaggtgtgctctatgtggttcttcttccattggagagctggcgtagagatctgcagtgttcacaaggatgttggtttggagatgtctgctgctaggacctggggtgtgtgactcagtccatatgagagggacatctgggtggaggagtaaattcctgtgctctgaaatgccacttggtagctctggacaatgaaggacaattgactcaagggtgcctggcttctgctgctgctgggaaaaaattcagtttatagcattcctgcacctcccaaagtagataacctggaggtcattcagttaacaactgtccctgaggactcagttttgggggaggggttatctgggagaagctttagcctgttctgagccattaggagacattagtgaattggagcactggagaatcctacaaatggcctatgtctcagaagagctgggacctccttccagctgctgcagatgctgacaggccctgggaggctgctgtgctctggagaagctggagcagctcatttcttggcctagcctggctgcctcagaaagagcagtcaggacttgagggaagcatcaaattctatacccataaactgcagttggaagtcagctttttgaaatgtccagcctttgcccaattgtttcagatcatctcattcctcaggctttggcaggtatcctgccctccatcttattccagtgtgttcacctcatcaaggcagcagagtggatgaaggagtaagtctgccctttgccatactgaacagctgtggaccccgattggtgagggctctgcatatgcctgtatgaaggagatacaggtgtgtgtgcacatgccggtatgaagaagacacaggcatgtgcttctcagttttgctaacagtgggagctcaacggggcagagggaggaaggtccatgatgctcagccacatactgtagagagaggcaatttaatgttaaatgacgcaccatcctccctcccacccttctcccagtcaactttttttctttttctagaactactaattatctctcaaggctgaaaaattaattgccttaggtggagaacttaattcctagtatccaccaaacttaactccgtatctccatatggtgtctccatatctactgtgtgagctacttaactgacgccctcttcctccaactgaaggatcgcccaacgtttttggattatagaattattatttcctgctttctttctttgggacttttgaatttctttggtttcgtttttaagaagtaacccaacatttcctacaacactaaataaaatggtacttacctttc

SEQ ID NO: 24140 - DNA, 6414 bp, Homo Sapiens
caccggcctctgtcccgggctcagtcttccccagccgcacctgcctcactgtcagccccagagcctgccagccagcccgagtcctctccagctcagagacccctgccaggaccctgcccttcaccacaggtgagaccgggaggagggtggcgggtggagggaggggctcggctgcacgagtccatgtgggtgtcttggtgtcacttgggacatttttagaggccacagagtgcttagccttgttaggcccacgtagtacccatggagcacatggaacagctggttattgcatttggccgatgaggaccaaggctcacgaaatctaaggtgacaagcctgtggtcaaatagcaagtggtagtcaagccaggataagaattccagtctcctgccaatgcactcagcccttttaaaaaatgatatttattactgttgctctgcttgtaaaaagagctcagaagtattttagacattttgaagagtacagaaaaacctaagaagaaaagaaaaatcaccaaccagtatcccaccacccagaagtaaaccctctgaaattctgctgtatttcagtccaggctttgttctggccatatgtacatgtacagatgccatgaacacatgaactacgttttgtatcctgctttacttagttaacatattatgaatccttcttggcataattagtctttaaaactgagagtctcatagtatttcattaatgtatttcatttttactgagggatcccttatcagttagacatttagattatagcttatttgaatttccttatgcataaatctttcctcatgcttgggattatttcccaaggttcactctaaagaagtagcattcctgggtcacatggtgtgagcattttgagagtcgttggtgtcctagacgcacagaaattgaccctcccacccgcaatgagcaggaccctcctctgaagacttcccacgggtcagactgaaatagtcacttctccaaagctggatttgtctatcacatggtccagtgtcatcgtgggcttcttagctcccggtttgggggtttcctaggaattcttttccctcctgctgccccttggtagcctctctgggttcatgacacgtgtgtgagatgctgtacgttaggcctcatgctttgctctgagcacttgagggcctggtgctgggccctcgagtcctgggccacccagcagtcgtgtccgcatgtgggaaggccgtggctctgtggcagccatgttggctggagctgtgttgatgtgttggctgctgccacctggggaagtgtctgggcgtgtgtggacaggtgtgaggggctggggctggggtaggggcaggatgaaatgcaggcctgtgtgggtgtgaggggtgtgtacccgcccggctccatgtgggtgcctgctgtggcggtgctggcgtgttctctgcagccaaggccatggggcgtgaggactccctgggtccccgctctgacccttgctcctgcagggctgatctatgactcggtcatgctgaagcaccagtgctcctgcggtgacaacagcaggcacccggagcacgccggccgcatccagagcatctggtcccggctgcaggagcgggggctccggagccagtgtgagtgtctccgaggccggaaggcctccctggaagagctgcagtcggtccactctgagcggcacgtgctcctctacggcaccaacccgctcagccgcctcaaactggacaacgggaagctggcagggctcctggcacagcggatgtttgtgatgctgccctgtggtggggttggggtaagtgtgcccaggggtctcaggggggcgttgccagggctctcagctctcctccctgtggttctcccaggcccagcccctgcagaacctctgcttgttgtggttctgccagacagggtgagccagggacttcctgaggtgccccctgcagcaggaagctccttttggacaggcgtgtctcggacccacagtctcccccgaatgcggagtccagcctaagccttgcccctagaaggtgtctggtagatgctgagtgaggtttcaggagcagggccaaggctggggcttaggatcatctctcccttcaaagacacccatgattgggcattggccgccaggctgctctgtctgctcttaagtggcaagttggggtacctcagcctggtccccagaccttgggctgcctggtgtgacatcacggtggtgcttccggtgtccttggcgatcccagcactccccactccgggacatagccccaaactccgctcgcgagctttgcttcctaagtcctcacccctttgtgaagggagcttcccgctccctccggctcagctctcctcgcctaacactatccctgcagtagtttctcaagcaaggtgtgtagaggcaggggatggaggcctcattccggagggaaagtgggagctgtagctggtgggggactttgggagccagtcagtgccctattcacaacttcccatttcttgccactttctggtttttccaactgttgttgcttctgttttctcctccctcctctccctctctgtctttctctctctctctctttctccagcctcttgcgactctctctgccttcctcgcctctcttggtctgcctcgccctccccatctccccatcatgccccccggcccctccctagccttgaggcccagggactgggtttggggggcctcccagcctgggctaggggccctgagtggaagacagtggtgcagacggcccctccagctccgaccgtcccgcagggcctgagcagagtcagctggggcttaaaaccccctcccggcccaaaccccaagtcccgcccaggtaacgccatgccccctcccctgaccggggaggcaggcgtgatgctgccagcagagtgctggccagataatgggctggtgctgggacttaagctgggaaaaagtcatgctgggattgggggacacaggaggccttgcctttgggcggtggggcactggggaggcagcactgtctgcccagctccctgcccctggggtcctggccgtggggtggggaccacccccttgggccctggctcctgtgtgaagccttggatgatgcgggccctgactctggctcccgcaggtggacactgacaccatctggaatgagcttcattcctccaatgcagcccgctgggccgctggcagtgtcactgacctcgccttcaaagtggcttctcgtgagctaaagaatggtttcgctgtggtgcggcccccaggacaccatgcagatcattcaacagccatgggcttctgcttcttcaactcagtggccatcgcctgccggcagctgcaacagcagagcaaggccagcaagatcctcattgtagactgggacgtgcaccatggcaacggcacccagcaaaccttctaccaagaccccagtgtgctctacatctccctgcatcgccatgacgacggcaacttcttcccggggagtggggctgtggatgaggtaggggctggcagcggtgagggcttcaatgtcaatgtggcctgggctggaggtctggacccccccatgggggatcctgagtacctggctgctttcaggatagtcgtgatgcccatcgcccgagagttctctccagacctagtcctggtgtctgctggatttgatgctgctgagggtcacccggccccactgggtggctaccatgtttctgccaaatgttttggatacatgacgcagcaactgatgaacctggcaggaggcgcagtggtgctggccttggagggtggccatgacctcacagccatctgtgacgcctctgaggcctgtgtggctgctcttctgggtaacagggtggatcccctttcagaagaaggctggaaacagaaacccaacctcaatgccatccgctctctggaggccgtgatccgggtgcacagtaagtgtggagatgggacactcgctgagctcagactgaaggatcttggtggtaccctgccccaccgtggccagatcctagggcttccggtgccagccaggtgacctgctgttggtctggagtaagattcctgtgagtgacccaggcagcaatggtgagcaccccccagtgaggggttatcctctgagcccccccgatggagccagcagggcctaccagacagtggcccctcaaggtagggactggcctccatctctagcgacagccctagaccagggccaggtcaagagcaacactcaggccttgtttgccaaaaggcctggttcccatccctcccctcagtcctggccacaggcgtctcaggagctctgctggcttgggggctgcgtcttgggataacccccacatttgtaaagtactttaaattttcaacttcaactcaacatctattgagcatcttatgtcaagacccataatctatactagggataaaaatgagtaaaatagattcccatatcaagggctgggtaggggagccgtgatgtctttacataatggtaaagacatggctgattcctcttacggtgggtgccctcacactgagccagattccaggacatggttcctcacagcagcaggcaggaggagcattctcctggcctgggcacccatgcagagcggccgtggtgatggtcagttctcccatgttgtgttcgtcccacctcccaggccctcctttcctgagtgctgggctgagcactggtgggggctgtgtttaagtgggaggcccgagcttggggctctgggaggtcactgtgacacagaccctgtctgcaggcaagcaggctctcctgatgctctcaggagccccgcacctgtggggaatgagtcaaaggtggccttgcagccacaggggatgagagaaaggctgggcacctgctaggactccctcacagccatgttgaacccactctgtgtaccctgtcaggctgtgcgggagtgggagcgaagtgaggagaggggcaggtgggagagccgaccctaagtggaggacaggcccgctcctccggggccctgggcctgagacaccaacctcaatatccggtctaggacgcagtgtggaggggcttgctttctccaaccctttctgacctggcatcttaccccaggtaaatactggggctgcatgcagcgcctggcctcctgtccagactcctgggtgcctagagtgccaggggctgacaaagaagaagtggaggcagtgaccgcactggcgtccctctctgtgggcatcctggctgaagataggccctcggagcagctggtggaggaggaagaacctatgaatctctaaggctctggaaccatctgcccgcccaccatgcccttgggacctggttctcttctaacccctggcaatagcccccattcctgggtctttagagatcctgtgggcaagtagttggaaccagagaacagcctgcctgctttgacagttatcccagggagcgtgagaaaatccctgggtctagaatgggaactggagaggaccctgagaggagacgggctgggcggcgacccccacagggctctcgagaacagattctcccctccagtatgggccctggctgtggcccccattcctcaggactgcacagaggaggactggctccggctccgtcgggctcacccttaaccactattcctggctctgcaaaccccagactttgcacacagcctcaggctccacacagaaatgtgaacttggcctcagacaggctggcccttcctaggctctaggggctaggggggagtggggagccaagaggtcccatattcctgagtgcaggggtagtccctctcacctgcttcctcagacgactctggaagcttccctctaccactgggcactgagacgaagctccctgacagccgagactggcagccctccatctggtccgtaccctcgccagaggcccccctacatcaacctcctggcgatgccctggtggagcagatgggtgctctgggagtcctgtgcttcctgatccaatggtgccaaacccttcatctccccaagaagcgcagcatacccctgggacccctcggccactgcccactcggggagccttctctgtttctggggcctcccccaccatagctctgattcccaccccacataggagtagcctgactgagggggaaggggtgggagagaagatacagacatggaggaggggaggctgctctggcaaagtcttcaaggcttttgggggtccaggcctggggtcaagaaggaaaatgtgtgtgagcatgtgtgtgagtgaggcgtgtgtgtgagcgtgtgtgtgagtgaggcgtgtgtgtgtgtctttcctaggacccaccataccctgtgtatgtatgcatgtttttgtaaaaaggaagaaaatggaaaaaaatctgaacaataaatgttttatttgcttt

SEQ ID NO: 24141 - DNA, 3000 bp, Homo Sapiens
atcccagcaccctccctcgccacctcggccgcgtccagaagcgtctcattcagatagaggtacccagccgggccccaggtctcacctgggtcagcattgtcccgctgagagctttcaaacaacaggtgtacgcgaatcagtatcaaaaagcctccagggaactgaaaaaaacagtctgacttccgggattcgcgggcatccactttcattctcacgtttcctcttcaatttctcgcgagatactgatttgctcgcgctatagaattcttgtcgaagaggcttagctcccgcgggagatttcgtgcgcagttacttccggtagctggtaaaggctgatacttcccaggacgcggaggcacgtaaaaaaatttgaagaagggaatttcgcggcattcttggcctggcttcctggcgtagccagcaagttcggaggtgttaaccgctgctgtcatgtttcttttgctaaactgcatcgtcgctgtgtcccaaaacatgggcatcggcaagaacggggacctgcccaggccgccgctcaggaatgaattcaggtatttccagagaatgaccacaacttcttcagtagagggtaaacagaatctggtgattatgggtaggaagacctggttctccattcctgagaagaatcgacctttaaaggatagaattaatttagttctcagcagagaactcaaggaagctccacaaggagctcattttcttgccagaagtttggatgatgccttaaaacttactgaacgaccagaattagcaaataaagtagacatgatttggatagttggtggcagttctgtttataaggaagccatgaatcacctaggccatcttaaactatttgtgacaaggatcatgcaggactttgaaagtgacacgtttttttcagaaattgacttggagaaatataaacttctgcctgaatacccaggtgttctctctgatgtccaggaggggaaacacatcaagtacaaatttgaagtatgtgagaaggatgattaatatgaaggtgttttctggtttaagttgttccccctccctctgagaaaagtatgcatttttacattagaaaagggacttttgttgacttcagatctatggataattatttctaagcaacgtgtttttattcctcactaatcttggctatatcagataccatttatgaaacattcttgctatagctgtctctccaagaccccgactgagtccccagcacctgctacagtgagctgccattccacacccatcacatgtggcactcttgccactccttgacattgtcaggcttttctaatgttggtagtatttattaaagatgaagatgcacatacccttcagctgagcagtttcactagtaggaaataccaaaagcttcgtacatgtatatccagaggtttgtagacaaatgttgcagccttttttgtaacagtgaaaaactgaaaacaacctggaagtccagtgatgggaaaatgaatatatttctgtcttagattggggaacccaaagcagattccaagactgaaatttaagtgaaagcagtttatttgctaggtcataccagaagtcatcaatcgaagtatggagaaatggaactgagaaggtaaaaaccagttcaaaatcagtgaggaggttctcaatggtaacgagctccatactgctgagatacagggaaacggaggggagaaagctagagtatttaacccccactccttggttgtcagctccctgtcctgtgtgtgggcagaacgtactccacctactcaatagcaagttccaggtgtttgctgaaagaagctgctgtaatgtacgggaacggtgaatgccaaacacttaaagcaattccatgtttaagtatgtaaactcttcatactttttttttttttctttttgagacagaatttcactcttgttgcccaggcggagtgcaatggaacaaccttggctcacggcaacttcagccttcccaggttcaagcaattctcctgcctcaggctcctgggtggctgggactacaggcgcgtgccaccacgccaggctaattttgtatttttggtggggacattccatgttggtcaggctagtctcgaactcctgacctcaggtgatcctcctgcctcggccttcaggggtgctgggattacaggtatcagccactgcacttggcagatcttcattcttttagtaaaaagtataaagccacacatggtttatttgaaatattttataatttaaaaaagtacagaagcaggaaaaccaattctaggttcaagtgagggatgatggtagtttgaaccaaaggattgcatgtggtaagaaattgtgatttaagatatattttaaagttggaagtagcaggatattctgatggagtttgactttggttttgggcccactgagtttgagatgcctttgagaaatgaaagaagtagagagagaattaaaaactggccaggagtggtggctcacgcctgtggtcccagcactttggggggctgaggtgggtggatcacctgagaccagcttgggcaacatggtggagccctgtctctacagaagatacaaaaattggctgggcattgtggcacacacctgtagtctcgtctactcacggggctgagatggaggattcaattgagcccatgagttcaaggctgcagtgagtcgtgattttgccactgcactcctgcctgggtgacagaagagaccctgtctcaaaaaagaatctgaaaacaacggaaccatgccttcagaattctataaagttattttcaactgataaatctatattcaggcaaagaatcaagggtgaaggtaaaataatacatttttagacaagcaaagactcaggggttacatgtaccctttcttgggaagctatcggagaaaatactccagcaaaatgaaggcgtacacaaaccagagaatgacgtggatccagcaaatagtatccaacacaggcaatattccagctatggagctagcttt

SEQ ID NO: 24142 - DNA, 2749 bp, Homo Sapiens
agtgccatctttctctgccctaggaagaaacacctcttacagtcatctgcaggggattctccaaggacatgggaagatagatgtaagccctggaacccagactcctaagcgaagggaagctgcattctgctattaatgatggccaaatcagctctaagagagaatggcactaactctgagaccttccgacagcgtttcaggagattccattaccaggaggtggctgggccgcgggaggctttcagccaactctgggaactttgctgtcggtggctaaggccggaggtgcgcaccaaggagcagattgtagaactgttggtgctagagcagttcctgaccgtcttacctggggagatccagaattgggtacaggaacaatgtccagaaaatggagaggaggcagtgactctcgtggaagatttagaaagagagcctggaagacctggatcttcggtcacagtctctgtgaaggggcaggaagtgcgcttggagaagatgacacccccgaaatcatcacaagagttattaagtgttcggcaggagtcagtggaaccccagcccaggggtgtacccaagaaagagagggcaagaagcccagacctgggaccacaggagcagatgaacccaaaggagaagctcaaaccttttcaaaggagcggattgccatttcctaaatccggtgtggtctccaggttggagcaaggagagccatggatcccagatctgctgagctctaaggagaaagaacttccaagtggcagccacataggagacagacgagtgcatgctgatctgttaccatccaagaaagatagaagaagctgggtggaacaggatcactggagctttgaagatgagaaggtggcaggtgtgcactggggctatgaagagaccagaacgctcctcgcaattctcagccagactgagttttatgaggctctcagaaactgccataggaacagccaagtgtatggggctgtggctgagcggctcagggaatatggcttcctccggaccctggaacagtgtcggaccaagttcaaaggtctccagaagagctatcggaaagtcaagagcggccacccacctgagacctgccccttctttgaagagatggaagccctgatgagtgctcaggtcattgccctgcccagtaatggcctggaagcagcagcctctcactctggcctggtaggcagcgatgctgagactgaagagccagggcagaggggctggcagcatgaggagggagcagaagaggctgtggctcaggagtctgacagtgatgacatggatctagaggcgaccccccaggaccccaactcagctgcacctgttgtgttcagaagcccaggtggtgtacactggggctatgaagagaccaagacttaccttgcaattcttagtgagacccagttttatgaagccctccggaactgtcaccgcaacagccagctgtatggagcagtggctgagaggttatgggaatatggctttcttaggaccccagaacagtgtcggaccaagtttaaaagcctgcaaaccagctatcggaaagttaagaatggccaggcaccagagacctgtcccttctttgaagagatggatgctttggtgagtgtccgggttgctgccccacccaatgatggccaggaagagactgcttcttgccccgtccaggggaccagtgaggctgaagctcagaagcaagctgaggaagcagacgaggccacagaggaagattctgatgatgatgaagaggatactgagatacccccaggggctgtcataacccgtgctccagtgttattccaaagcccccgtggttttgaagctggatttgagaatgaagataattcaaaacgggatatttctgaggaagtacaactgcataggacattacttgcaagatctgaaaggaaaattccccggtatcttcatcagggtaaaggcaatgagagtgactgtagatcaggaagacagtgggcaaagacctcaggggagaaaagaggaaaactgacactcccggagaagagcttaagtgaagtcctaagtcaacagagaccttgcttgggagagagaccctataaatatctcaaatacagcaaaagctttggtccaaactcccttctcatgcatcaggtatcccaccaggtggaaaatccatataaatgtgctgattgtgggaaaagcttcagtcggagtgcacgactcattagacaccggagaatccacactggagagaaaccttataaatgtcttgactgtggaaaaagtttccgtgacagttcaaatttcatcacccataggagaattcacacaggagagaaaccttatcaatgtggtgagtgtgggaaatgcttcaatcagagctcaagccttatcattcaccagagaacccacacaggagaaaagccctatcaatgtgaagagtgtggaaaaagcttcaataacagttctcattttagtgcacatcggaggatacacacaggagagagaccccatgtgtgtcctgactgtggaaagagtttcagtaagagttctgacttacgtgcacatcatagaacccacacaggagagaaaccctatgggtgtcatgactgtggtaagtgcttcagtaaaagctctgcccttaataagcatggagaaatccatgcacgggaaaagcttctgacacagtcagctcccaagtaagcccctgaggatatataacggaaagaggctcaataaatgtattgtttagaaagtc

SEQ ID NO: 24143 - DNA, 4834 bp, Homo Sapiens
ctccagaacaaaactcgtacattgctggtcccaaaagggaggtggccaagtggggcagggctgtggtggaagccctgagtcccctttctgaccttgcaaggccttgattttcctttctgtcatttccccctgacggtgtcacttctctgcctttccttcccgccgtgcaagtgtgtcggccccgtggccccagagtcgtgtgtcccctagacttcctaggacgtatctattgtacacacctataaatacctgtgttttatgttgatagagatatatactgtaaatagcatatatacttgagcaatatatatgttaatatatactgtgtgcgcagtccgtggacacagccccccgctgtgtgtgcacacgtgtatgggcgtgacggcctccaccccgcaccgtctgccatacacgcgggcacatttgagccaccatatatttttaattcaagtatataggcaatacgattattacagaagccgatgggttccctcagacctgacttgagagaacaaagccagcagctcaaagagcctgtgacatgggacgtgggaagggtgctgagagcccgctgtggcgtgggtcatgccttctgcaccccactttccccaggcaagatccctgggcgcccttatttggggggatgttgatcccgagggaggagtatttggaatttcttgcttttaaccagaatgccccctctcccctgccctcgccagcagcctcaccctgaagacctgggcctgctgaatgggccacacgctgcctgtgtcctgcctccgtgggtggcactttttacgcaggcagcttctctgttttttttgttttttgtaacctgcaagcttagaaatctcaggttgtgctcctggggctgctcctggggactggcctcgtgtcatggagaaaagcatgtgtgtcggggcgcgctggggccagggtatggctctccgccctggctggctctgcaggggtggtccctgttcaagcccgctccgtgggagctgccccctggggaccctgctcctcggtcacagggggcccctttagttttcccatccccatcctgctcgtgtaaagcttggtttatcttctcggcgttctgtgtgtagcgtagtcttggtttggtctccacagctcttcggggtggggtgtgagtgtggtttttcccaggcaggggccgtctgcccttgtcccccagctatctcctggtctgctgggtgggagggtctctccaggccccagaccccacttggaggggcatgtgtttctcagaggggctccatccgcagttgcatggaactccttacctgtttgccgtccatcccccggaggtaatcagaggagtgggcctgttgtcttggcgctggcggatggggcaggtgcctggcgggggaggaagagggctctctatgatgtggaatttttttttttttttttttgagacggagtcttgctctgtcgcccaggctggagtgctgtggcatgatctcagctcactgcagcaacctccacttcctgggttcaagcgagtctcctacattggcctcccaagtaggtgagattacaggcactcaccaccacacgcggctaatttttgtatttttggtagagacggggtttcaccatgttggccacgctggtcttgaactcctgacctcaagtgatccacccaccttggcctcccgaagtgctgggattacaggcatgagccaccgtgcccggcctcatggaatttctaggggtgagcaggtgaccctggggctgccacttgagctcctggagtgtgtgtcttggcccctgtgtggttctccattaagaaaagctcagatagtctcaaccccaccctctccccttgctgcactcagagtaccagtgggagctgaaggatggggaggaacagagcagtgaccacccctccctgccactgataagttctgcctcgtcgtggggctcccctggttcccaagacaccccttcctccctcagcccgtcgtcctaacccagcaaagatctgggcattgctgactctgcacctccttcctccatgggcatctccaggaccgccctccttcaaggggcactgcccacaccaccgtcctcagcccgaggcatgcatctgagctggagaggcttgcaggcctgaccctggtagcttcccctccccaagattcagaggcggggacccaaagcctcactccaaaccactggcattctcacctcctctcacctccaggcaccaggctgctggtgggaaaggaaggagctgggggatcagaggcttccagtgtggcctccggaagcagcagcgtagccagggtgacatttgttcagcaggaggaggcttggtctggaggggcttgcccctctgaggtgacagaggatgccctggaggtcaggagagaagactgggaagacaggaagggccaggcccctgttaaagcccagggcactatttggtgatcttcaaaggtgaacacaggccacctcccactggccccctcctcctggccacattttccagggataccctggggagtcctaaggccaccctgggcccctttctgagcctagagatctggatgtggtgacaaccagggcttttcccagccccagctaagagagggggctttagggcaagagcacctcagccctgcaatggggggatcttttttttttttttttttttgagacaggctggagtgcagtggtgcgatctcggttcgctgcaacctctgcttcccaggttcaagtgattctcctgcctcagcctcccaagtagctgggattacaggcacccaccaccacgctcggctaatttttgtatttttagtagagacagggtttcactatgttggccaggctgttcttgaactcctgacctcaggtgatccgcccaccttggcctcccaaagtgctgggattacaggcatgagataccccgcctggccaatgggatttttgacgccacttcctgagtgaagcgctttgcatggggatgggaagaagcacccccaaccttctagtccgctccgagcagggcctggagcattggagacattggttagtgtaataggcagagcctgagtgaggccggggggcttctccaacagagaaaagacattggctttgggtaccatgctgagggagggggttaggcctggtgggggcccattcaaaggaggccgggctcggtggcttaggcctgtcatcccagcactttgggagaccaaggtgggaggatagcttgaggccaagatagcaagaccaccctggtcaacatagcaagaccctgcctctacaagaaaataacgaaagaggccccagggaaggaagccagccaggagcagcctggagcagaggcaggagcctgaggcctgagccatggcatccagggacagcctggtggccgagagagcttgtggctgtcactataagggaagaggagctatggaaattggaagtgcagggtggcctgtgtgctaggagtgggggtgcaggcctaggtgtgtttatgcacacgtttgtgcatgtacgtgtgagcgtggatgtgttcctatgcattagagtgtgtgcgtgcacgtgtgcagagcccacacctgagatatgggactggctcttggagtattttgagttctcagtagcagtcttgttgtcaggccttgagtgcagaaatgattaggtgagtgagggcaggactcgaatgcagaccctggctccaggggagagggtggggcgtctctggtaggacggcctcaccccacttgtcagaactactctggaggggggcaaaggtgtcaggaacagtttgagcagttctggctcagggtcactcatgaggttgctgttgtctgaaatcttagctaaggattggaggatgcacttctaagtgaggcctggctgtaggcaggaggcctcagtccttccccaggtgggccaacccacagggctgcttgagtgtcttcacaatatggcgctcggcttccccccagagcaagagattcaagggcccagggtaaaagccaacgtgttatttttatccctagcctcagaattcacacgccgttgcctccaccatgctctggtttgatacagcccagctctgattggaaggggctggggctgcccgtgctgactcttcaaaggcatcccatcctgcagatggtgttcacagggagagtttgtgggggccggcactccctcatctactggggctcattctggaagaaggtccagaagaattggagacccctgcccctcacccaaactttggaggtggcagggtgaacagcaggccaagttcaggtcccaagacaggccaaggccagtgcggtttcccttccactgcctcagtttacctgtattcagaagacagtctaggaagagttgagcagagttccctctaaaagagtagggagctgataacagtcccaagccctcctctttctctatgccaaaatcatttccgttatcctgagatgggggtgagtggatggatggtgtactgaggggcctctgccctgcccagagcccccaccatcgtagtgggggcaggggacttcctgcccacaaccccctccaaccctcacctggcgtgcccgggtcaccagcagcagcagcggcgctccatcgctcccaagatctgggtgaaggggagaacctgccatcttatccctacccccccggggccctcaagcttattttcttgttgaagaaacacaaaaccctcgagattcatgtactgtatgttggagaaaaaaaattacctaatgttcccccaaaaaagacagtatattttgtactttgtaaagtgttaattaaaatgaaaaaaaaaaac

SEQ ID NO: 24144 - DNA, 3126 bp, Homo Sapiens
tcatctaaaggtaaaaaactcactgttaagagtaagtacacagaaaaacccaaagtgtgataacattgtaactgtggtgtgtaagtagaaagaataaatgataaaccaatcaaaaatagtaactacaacttttcaagaccagtcagaaaaataagataaaattagaaacaacaaaaagttaaaaagtggggggatgaagttaagatgtagagtttttattagttttttgtttgttaatgcaaacagtgttaccaggttaaaataatgggttacaaaatagtatttgtaatccttatggtaacctcaaacctaaaaacatacactggatacataaaaaataaaaagcaaaaacctaaatcatatcaccagagcaaactaccttccctaaaggaagacaggaagaaaagaaagaagaagaccacaaaacaaccagaaaacaaataaataacaaggcaggagtaagtctttacttatcgataatacattgaatggcaatatggactaaactctccaatcaaaagacatagactggctgaatgaatggagaaaacaagacccattgatctgttgcctacaagaaacacacttaaactataaagacacacataggctgaaagtaaagagttggaaagagttattccatgccaatggaaaccaggaaaaagagaaggagtattgattttgatacaaaaactatgagacaaataaagtcactatacaatgataaaggggttaatatggtttccatttgtgccccacccaaatttcgtgttctattgtaatcctcaatgttggaggtggggcctggtgggacgtgattggatcatgggggtggatctttcatgactaattcagcaccatcttcttagtgctgttctcatgatagtgagttcttctgaaatctggttgcttaaaagtgtgtagcacctctccacaccacccgcttgccttggtctactcctgctatgtagatgcttgctcccactttgcattattccatgagtaaaagctccctcaggccttcccagaatcagatgccgctatgcttcctgaacagcctgtggaactatgagccaattcaacctcttttcttcataaattaacaagtcttgggtatttctttatagcagtgtgagaacagaataatacagaaaattggtaaagaggagtgaggcattgctagaaagatacctgaaaatgtggaaacagcagtggaactgggaaatagacagaggttggaagagtgtggagggctccgaagataggaagatgaggggaagtttggaatttcttagagatttgttaaattgttttgaccaaaatactgatagtgatatggacaatgaagtccaggctgaggaggtctcagatggagatgagggacttattgggacctggagtgaaggtcacttttgttaggacattgtggttggagacattgtgcccctgccctaggaatctgtggaactttgaacttgagagcgaagatttagggtatctggcagaagaaatttctaagcagcaaagcgttcaagacgtggcctggctgcttctggtagtctgtgctcatatttgtgagcaaagacatgacaagaaactggaacttatatttaaaaaggaagcagagtgtaaaagtttggagaatttgcagcctggccatgttgtagaaaagaaaaaaaccattttctggagaggaattcaagctagctgcagaaaattgcaagtaacaaggagcaaaatgttgatagccaagatagtgggaaaaacaccttgaaggcatttcagataccttgggggcagcctctcccatcacaggcccaaaggcctaggagggaaggatggtttcctgggccaggctcagggtcctgctgccctgcacaacctcaggaaactgctctccaaatcccagctgctccagctccagcttcagctcaaagggccccaggtatagctcaggctgctgctccataggatgcaagttataagcctattggtggctcccgtgtggtgttaaattaagcctgtaggtgcacagagtgcaagaattgaggcttgggagcctccaactagatttcagagtatgtgtgggaaagcctggatgtccaggcagaagccagctgcagggacagagccctcatggagaacctctactagggtagtgtggaggggaaatttggggttggagttcccacacagcttcccctctggtgtactgcctagtggagctgtgagaagacagccactgtcctccagattccaggatgatagatctgccaatgacagcttgcactgtacaactggaaaagccacaggcagtcaatgccagtccgtgaaagcagtgacagtggcttaccctgcaaagtcccaggggctgagctgcccaaggccttgggagcccaccccttgcaccagtgtgccctggatgtgagatatggagtcaaaggagactattttggagctttaagatttaatgactacctgctgggtttcagacttgcatgggtccagtagcccctttcctttggccaatttctcacttttggaatgggagtgtttacccaattcctgtacccccactgtatgttggaagtaactaactgtttttttattttgtaagctcacaggtgggagagacttgccttgtctcaggttgagactctggactttggacttttgaattaatgctggaatgagttaagactttgagggactgttgggaagatataactgtattttgcagtatgagaaggacatgagatttgggagacaccagaggtggaataatatgatttggatctgcatccccaccaaaatctcatgttcaattgtaatcctaaattttggaggttgagcctggtggaagaggattggataatgggggtggtttctcatggtttaacaccatccccctgggtgctgttctcatgacagtgagtgagttattgtgagatctgattgtttaaaagtgtgtgccacctcctcccactttcctcctgctccagccatgtaagacaggcttgcctccccttcaccttttgtcatgattgtaagtgttctgaggcctccccagccatgcttcctgtacagcctgcagaactgtgagccaattaaacctcttttctctat

SEQ ID NO: 24145 - DNA, 2023 bp, Homo Sapiens
tttctgaccccgcatcggttccaggaagaatacacctatgtgacaagctaagttctgcctcattttgcatttagaagccacaagaaaaacttttcgaaaacttttgtccgtcttttgctcccccgacgcgtggtttcctgatggtccgtccccgggcagagagagggacgccccctcctcctccccgcctcttgtgaggcgcgcggagccgcctcccctgggtcaggtctgatgggccggtgggcgcgctagtggtggccgccaccgccgaaaccgtcgacctcctgggccccagttccgcgtccagccccgcggcagcatggactacctgacgacgttcaccgagaagagtgggcgccttctgcggggcacggccaaccgcctgttggggttcgggggcggcggcgaagcccggcaggtgcgcttcgaagattacctgagggagccagcccagggggacctcgggtgcgggtccccgccccaccggcccccggcgccgtccagcccggagggacctgattactacaagggaagacataaattcaaagcaggttgctacagtgaaagcagacctggagtctgaatcttttcgaccaaacctaagtgatcccagtgaacttttactgccagatcaaattgaaaagcttaccaagcatcttccaccaagaacaattggctatccatggactcttgtttatggtactggaaaacatggcacaagcttgaaaactctttatcgaacaatgacaggtttagacaccccagtgctgatggtgattaaagacagtgatggacaggtttttggtgcgttagcatctgaaccactgaaagtgagtgatggcttttatggtactggagagacctttgtttttacattctgtccggagtttgaggtctttaagtggacaggagataatatgttttttatcaaaggagacatggattcactagctttcggtggtggaggaggagaatttgcgctttggcttgatggagatctctaccatggaagaagccattcttgtaaaacgtttgggaatcgtacactttctaagaaggaagatttctttatccaagatattgaaatctgggcttttgaataaataaaatgctctctgtcttagcaggagaatggcccaaacctgacatggacaagcattgtttggaaagttcaagaagcaatacagtgtaacatgtcacttgtgctttaaaattagtctgtatcaccatttattacagttataattttggagtttatttttcaaatcatgttcttgtcccagagttctttaggttaacactagggactgcgtccatgtactagtataacagcttgggtttgttagaatttgggcaacattttgattataatgacaacttcattttcacatgttactcagttccctaataggatggtgctcttttgttgaacctgtattgatttttttttttttaactatattgattcgtttactagaacagtctaattggggcattgaggaaatgaagactggatacttctgtatctgtgaagttggcacaggtaacatttggacatgttcatcttattcttaggaaggaaaaaatcacttgccaaaataatacatactccatagaccactgagttctagtttttattcacactacaacattctctttaacgatgttgcaggtattctcaatttccttttaagaaaaatgaaatgtgaggagaattctggttgtaatagatgacagtacatatgatctgcaggtttgggcatatgctttcatcattaaattatctgataaagttacaagtcacaaaggagaatgagaacttaatgattctattggatttaatatattagcaagaaaacatactatttacatatgtgtagcttagtaaggcattaacataagtacaaaaactatgaaacagatgcatatttcctcaacatactgtgtcaggtatactgttttataatttggttgttttagccttattgcacaccaactcccaaaatataggttactcttgttc

SEQ ID NO: 24146 - DNA, 3413 bp, Homo Sapiens
ggaaaagccgcgagttcttggctacgtggcgcggttgttggcccggcgcggccagtgctactgggggcgtccctctctggccctcccagggacaagtgacttgatggtagattttgccaagcccctcacatgattctatgaaactcatgggagcgaggaacagctgctgcgcggaggtggcagtgtgtgtgctaaatccctttagttcctgctctgcttttcctccagaaagggatgagcgtctaacaggggccccggtctgaacccgcctgccaaagtgaggtttgctcacatccaacccctgacagctccagggtgctgttactgcgagcagggcaccggccctccggcccgaagcagggcagggacatgagggagaacgcgccctgtccctcccacctcctccggactcggcccctggaggggctgacgctggaagacctgacatcgtcgcttctgatgttcatggcttttgacccatgttcaggtttgaaatctcttacccagtttaagaacgggatgaactctcctcgtttaaaggagagaatgaagaacgctgaacgcaaatctccgtccttgtgcgcataaatctgaggcgacaggaagaatgtggaggcaaacctggctcttctcagtactgctggagccacccaccgctctgccattcaggaactctgcgcgggtgccaggtgccacgcgcggtgctgcccccgcactcccctcgagctgtgcgaactgtaggaaggagaagctggtggggtggagagcaacagggagagacccatgttcggggtcagacgggagcagctgcaggaagttctgggggaggggaagggggattatgaccagatggaaatgaaaggaaacgggagactgtattaataaactagcagctttattgcccttcaggggccatgtcttcacttgagatgtcgaattgcttgagggaggaaaacctgtaagaaatgatggagatcagggaacaggccttggggatcctggagcggggtcacagtgagcattcggtcagccggggagacagacgccacaaagctcagcaggggctcagtttctggcctctcttcgccaccactcagtcctttcagctcctgggtgacctgagcctcagtcgccagccaccctgctcttgtgccagcgccacctccagctccctccttggtttgctgctgcaagcgtctacgggctcgccgccgcccttgccacactcggtgccacaaggcacagcgccagctcgctgaggagggcagggatgcccccttccctgcctcaccctgagaccattcttgggctgcctcatgtcccttgggcccccgctctgccagggctgcgtggctgggctgcccctcttctccaggggctccatgctttccagtggtcaggggcaggtcccctggctgcccagggctctgcatggcccagtcctgcaccatctctccaacctctataaccatctcttctaccctgtcttccccaccgtcccctgcacatccctgctgctcctctttcccctcctcacagcagtttttctgtccatctactttgagtcttttgcttgtccctccctgagaggactccccagttccacctccttctgaccgcgttctcttggttgcctgttctatatggcaccccagtgcttccctgaatacctgcaccagggcagcagtgagctgggtgaagggtgcaaggggtaaagggatcggcgtagcagagagcagggagctgggggagctgggctgcagaagagggagcagcccccagtcccgaccccgggaggaacggcgctggtactggaggcttcggcagtaattggctgctgctcggcagcagttctgtaggcgcccagccacccggctggtcacattggctgcgacattgtgactcaggtcaaaagggtcctggagattcagggggccaaggcgcagaccctcccagagattagaaggcaggccccctgccacaggcagtgcctgaccctcccgcagggacagcagggagccacgaagatcccaacaagatacacaggagaagaactgggctagcagggaacctggaggaggaggaagagtggggaaaggggggtcacttagaggccagaactgatacaggtcctgcaccagagccatttccttagcaggactttttcccttccaaggggctcagcagagtcccaggaagctaggcttctctgatccctataaacaagaggtcaaacctctctccctgcccccacatgatgtccttgcccagatgctgctgctccttgctagccagtgtaaccttgggcaagtcacttaattgctcccaaacatggtttcttcatctgtaaaatggcagtaataatattaggtatctcacaggctttctgtgagaaccatgcctggcacacagttagtgtgatatatgttacctactgttgatgaacatcattactagtcctctaccaggctccccaaactcactgaggggctccacatttatgctgggctccagtcttgaggcatccctggggaaactgcagtcccagccatcgacttccacctgttccccctctcctgtgaaagtaaataaggtgagagtcagtctggaagcaaggagattgagggtgggggtagagagatctcattcacagagctgcttggtgtatctaagtgtgatgaagaagagagaggaaactaacaagatggagagggtggaggctaggccgagtacctgctttctgggtgagctgggacacagtgggcaacacaggagggtccctggtctgaagaaaatagatcaccagcaaggtcagggcgtagttactgagaagggggccactccctgggtaaataagcaataattccggttagatcagaggtgcttctaatcccctcactggcagttttctcaaccccggtgcccattctgacctcccttctctccctgaatccctgcctttgtcctgagaccaactcagccccaagtctgtcctgatccattctcacctgacagcccccgaccctgagcccagcagcggagggtgtacacgaggggccggactcgaccatccagctcagagcagagactcaggaaacgggagttatgcagggccagcctgggacaaagcagggacaagggtgttagcgcttggggatgtcagaacctaccacccccagctttcattccagacttgcataactggagccagctggaataaggccagaacagtttccccaaatgttgctcactgatcttgtgagacagtgtgcgaaaggacaaaggagttcgggaaacacttcatcctgtacgcccatcctggacattcacagcacattattataagactgttcatgagccatggtcacaccactgcactccagcctgggtgacagagcaacatcccatgtcag

SEQ ID NO: 24147 - DNA, 3873 bp, Homo Sapiens
atcatgctggagagagaaatggccctcctgccagctctcccaggcctgactcagcagatgccagccccgaccgcgggcttcagatccaggatcccagcgaccacaaccgtccttgggtttcctttcccatccggggaggcatcctagaggtgactggcatctggggcattggaggccttggcataagatgcccttagatgggtggtgccctggaggtcaggcctgagtctcctgcaggcaggggcgcctggggaattactcacgggtgcctttcattcccttcctgctctgtgagacctgtgttgagtgctctgcatccattatctcctaatttttttttacaacagttgcgcaaggtaagttattatccccattttagagatgaagactctaaagggaggctcagggaggtgagtgacttgcccaaggtcacactaccagtaagtggcagagctgagtctacactgcaggcttctctgggggcaaagctcctctctgcctgctagctaacttctcttgtaacccaggagaagaactgtagagccttcttccttcactttcctccagtgaggacattccctgtctttcgggtcttggtacatttttccttcttccagctaaatcagccacattcttgctcccccagatgcattataggatggggccagctttctccctcccttcttcacttcctccctccctccattttctccggtgagaccaagcagcaaagggctgcctcagtcccctgggaaaaccccaagccctggtcctcggctcatgggctccatggcctgctcagcttgcagtcttggctgtgggagagaaaatttagcaaagatgggtccatgcactgctgcagcctgtgggtgctcagtctagctccaggcattggaaacccaaatgcttccaaggatcaggggggaaatggaatgagtgaggcgggccagggagccgctcagctccaatctttgtcactgtgtgaaatgtggacttggtatgacctgactgtccaattttcaagatgaaccagaaatccagacctttatataaaatctcctggatttttaaatgttggcaattaatcagaatgtttttaaaaatggattgtgaacatggattgtttttaaaacatgtctgagaactgtgtccaacctaagggtcctgtgtctgagacctctggtccgtgggaaagggaccgcaggttttgctgggccgcctccaggctgtgtacactgtgacaccaggggctgctttctgcatttgagcctcttgaggctgcagggtgatccctcatcagagggagttctgttgtcccctcggcaccctggtcctactgctgaagaaactccagctcaggtatgggagtagccaggatgggatcacatggctcggtgagggcagaagccagatttgagctcaggcctacccctcggcactctgcatgttacccaggctgccccccaccagggtgtcaccatcacgcccgtggggccgcctcccctgggaggtcagatcattatttccatgccagctgcggggatgaaggcacagagagccacaggctgaggtttcagaggaggaacctggtctctgaaaaccctgccctgaggagggccggagctgagcgcagtagacactggcctgagggagggctctccacctacaagcccaccgaggcctcagtctctgtggtcttatttgtagtttcccaagccctgggttcctggcttggtgtcagggttaggtcatctacctgcaagcaagggtgcctgccactcagtaccctggcctaggcggagggcggttctggccagctccaagcctggctgactgggagtggagacaagtcctgtcaagtcctctctggcctcagttcctctgtgttgatgtgggaagggtgtaagggtgtcaccagtggctccctgaaatgcccttgctgccgggaccgaggactttgtcatcacccgggcttcacaccacctggctatggagacctgagctggacccactccttgagcctacatccttgtctgtagagagaacagcagccacctcctgagttttccttagataactagcatagagaccagtagtgggcctggcgtatgcaaggcacacaggacaggctgtcagtctgtcctgccccccagccctcaccccctgctctgagttcctgtcccttcccttgaagaccagcagctctagcctcaagtccaggtgtgacccagtgcccctgctgcccgggattttccatccccaccccccagagccctggtgtgtgcctccgtacagccctttcctttgattcacgtagacacatggggtctccacttgcttatgaactgccctgccaggcgggggctgggtgatggctcttctctgagtgacgttttggtgaatggctgacatttcccaggaatgaattggacacagagccagcccttgaggtactcccccggtcccacagctaaaagaccaaccaggtaacgagccctccagcatctccttccataggtggttcttgagccaattactgggtgccagctggtaaggccgatggtgctcggctctggccaccccggaacatcctggcatcattgggcttcccatccctgaggggtgaggtggctcaggtgagccccagaggccttggcaggagctcattcgggaggccagcacctaggtcagtggttctcaaagtgtgctccctggccctgcagtaccagcatctgctggaaatttgtttaaaatgcaaactcgggccccatcctagacctactgaatccagtactgggaatggagcccagcactgttttaacagcctccacgtggttctgttgcctgcttaaatttgagaggcccagatctaagccatgttaaatgctagattggctcctgaggcagcgtagtgttgtgaggagtgactaggctgggcaggggcacagcacagtggcaagcatggtgatgggggccaggggagagacgatgctggcctggccaaggcagtggcaggaggaccaaaggaagtggacaaatgccaccctccagaggatgcggcggacggaaggaatggtaggctctttgctgagataaaggacccagtagcagatctttggtgctttggcctgtaaggctgaagtgtgcacagggcagtgtgggaggtgcccacagcaatgcagccaggccctggctctgtgtgcccttgggtgtcatttaagctccttgagccaagtgttctcatctgccaactaacaagaatgccagcctgcttcggagagtgagtgtggagcccaccctcaggcagggagcaccctgtagcctgcttcggagagtgagtgtggagcccaccctcaggcagggagcaccctgtagcctgcttcagagagtgagtgtggagcccaccctcaggcagggagcaccctgtagcctgcttcggagagtgagtgtggagcccaccctcaggcagggagcaccctgtagcctgcttcggagagtgagtgtggagcccaccctcaggcagggagcaccctgtagcctgcttcgaagagtgagtgtggagcccaccctcaggcagggagcaccctggggacacacacatgtctgcatcctcagctcagaaaccaccatcatcagagctaatgtctgttggtacctccacaccctttgcatggattagcttcatcttcaccgatgaggaaacagaggcaacttggaggttaagaaactcaccaagggtctcgctttcatccccctgccgtgctcccagtgagtgtgtggcccgagaaaacatgcagagcgatatggttcaaaagcactacagataaatcaagatgcaaccctaaaacatgttcaaataaccttcaagaaagt

SEQ ID NO: 24148 - DNA, 1896 bp, Homo Sapiens
attcgcgtggaggcgcgtcgcgcgcagcggacgccgacagaatccccgaggcgcctggcgcgggcgcgggcgcgaaggcgatccgggcgccaccccgcggtcatcggtcaccggtcgctctcaggaacagcaggtgaggtctccgcggcccggcttcgcgccgtagggtcgccgcgctcctcgtcggccgggggcggggttggagaaggcgggcagagaggccggaaaacgcaggcgccagctcgcgcccaggtccgggccaggttcagctgggatgcgtgagccgatggaggctcccctggcatctgggagtgagtgtccagagaatagcttccctagttgacccacgagccatgtctgtgcccacgaatgtgggagcctgaggccatggggggtccccgagagagagagggtgtctgggcacttgcccatgaacggaccactgcatgcctgagagagaagggccctgacaccaggaacttgtgtggactcagggcgagtggccacctggaaggacacttctcagccagtgtgcccactgggagggggacagcgtgtcccttgctggctcgagtccacagggcaccagctgctttgggcacaggggagctggttctggggctgctctactccatgggggccacggtgaggatgagaccaggccaggttccttggttgggccctgggccctatgccaggttggctctgagttggatgcgcactgccagccaggatataaccaacaatgtccccagattcccgtgccacctggggccaggcaaaataggttaaaatccactggcagacccatttgtaagtgctccgagtgcaccgtcaaggtgggagcttgggaatgggcgacctcacctgccgcacctggacttgccagcacaggtctcttctcaccttgccagtctgcggcttccttccctcctgcgccccctggctacgcaggcctggaaacagctccttagggatcccagctgaacagctcctgggcttgggctatacctcccagtgggagggtctggcctggggtctgagggccaggggtggtgtggtgggcggggtgtgcctaacatccaagaatctactccaaataagggaaaatatgaaagagctggattttggcttcccaggactgcccgatctggtggctttgggatcgggcgacatctggcggttgatactatgttctagggacaagaaccctctacacgcccattccttgtttcctctaaatagggaaaagctagggctggaagacacggcacccacctcctgacactctttctgctggaattgaccactggtcactctgactcagtttccctgagctctgaagattaaggaatgaacccagacaacccagctcaatggcccttagtggagagagagtcaattattgatggaattccgtgcctgggaacttgctttccagtggggcagggggaccagaaggacaacttcaagcccgtcttgaatggggcccgtgcagggaggggtctgtatgggttcccccttcccagccctccctcccacctccaccccagctcccagacgcccaggcgcacttggtgcaggtgtgtctcaaagtggtcaggagaggggacaatatacaggggttggcctcagtactggaaaatgccatttgcaccccctaacaccactactagtgggaaaaaccagtggggcctcaggctgccccgaagtgaatgtgctgggcggatcacagccccaccacgtgtcatgtagacacccagggctacaggagagtcaaccatatttgggcatgacgtgctggccaacccagggcctccatctctcactggtctttagcagataaattaattattactagaattgaacaggagggacagatacctgccttcctag

SEQ ID NO: 24149 - DNA, 3394 bp, Homo Sapiens
gtgcttgagaaggttcaatggcgtggcagggactagcggccgagttcctgcaggtgccggcggtgacgcgggcttacaccgcagcctgtgtcctcaccaccgccgcggtggtaagcggccgggcggaccggacgtcgccttggttacagcctctggcgggaggggtgagggtcgccatggttacggcgtggctcccgggcagctcttggctggcccctggttccacagcagctggagctcctcagcccctttcaactctacttcaacccgcaccttgtgttccggaagttccaggtctggaggctcgtcaccaacttcctcttcttcgggcccctgggattcagcttcttcttcaacatgctcttcgtgttccgctactgccgcatgctggaagagggctccttccgcggccgcacggccgacttcgtcttcatgtttctcttcgggggcgtccttatgaccgtatccttcccgcaggctctggaacctcgggctagggcgcctcggcgtccagcctgtgttggtcctggggccaacacagccatgccagaaagggacacagtcgctgtctccagcttagtatgtgttgagggcccactctgtgctcagctgcaggggtcagggctagatcttcagtgctgtatgcaaaatacaaagccacgcacaaaagagccaggcaccgttcctgccttgggcgctcatgggcttctcgctgctgctgggcaactccatcctcgtggacctgctggggattgcggtgggccatatctactacttcctggaggacgtcttccccaaccagcctggaggcaagaggctcctgcagacccctggcttcctgtgagtgttgagagccctccctccctctccccaccctcagaaggatccccaccgatggggacctgtgctggcctgtgctcaacacgggcccctccccacagaaagctgctcctggatgtccctgcagaagaccccaattacctgcccctccctgaggaacagccaggaccccatctgccacccccgcagcagtgacccccacccagggccaggcctaagaggcttctggcagcttccatcctacccatgacccctacttggggcagaaaaaacccatcctaaaggctgggcccatgcaagggcccacctgaataaacagaatgagctgcagtctcttggcccacagcactggcttccccatctcacctggccacatccttctatgcctgccccgtcctcactcagtgtggcctctcagcccaactgcaggtggtaggataggggtgcccacagagggcaaagaaactgcccatggttgcctggcagagctttgagctcacaggttgccaggcagagcttttgagctcacaggtgacaggctcagggttctcatcctggccccaccagggccttgggcaagtcctgcccaccataggcctctgctacctgccagccagcggggaagttcaccagatttcggctgctggggccaggacaggcctctcctaggttgtgccaaaccagcctacagatgttcctgccagtggtgccttcaggctgatgccaatctagcctctcctgtctctcatcagccaccctgacaggtgggcgtatgcctcatttttcatctggtgatgccaaagccccatggattcaggtgcagaagagggccaggactaggtcttctgccctttctatgacctcagagcctaagttttcaccttagcagagttctgagactgggtgaggcagggacttctggaaggttctgttcctgccctttttagctgaggacgtgtgtgagccttatccgacccctgtggctcatttttctcttctgacctggcagctttccttgttgttctaagcctgtccatgttgtggtttatttctggatgctcagtggcacggggcctcctccaaagacaggttgtcattttcatggtaacaacactgttctctgttgagtctgccctccgtgttgtagccagaccttgtggagatggctttgcggcggtgtgagctggcggtcaggagtacccagccttcccggcacctcccagccaggtggccctgcccgacctgtggggtgaggcagccaaggttccttccatccccccagttgtggagacacagggctgcctcaccctttcattgccgaggttcctacctcatggacagaacaaacacctcagcaatgaaacctgttcatgtctaagagcagctgggctgggaatcttcccctttgttcaaggccttccagtaaggcccagctgtccccttgctgtgcatggggctctggggagttccactctttgatggagggcagaggccctgagtgcaaactccctgggaagagtcccatgctaacatgtgctcaaaggagcccccctctcacatctcagcgaccaagaaccccaatccctaatcagagctctgcctctgccccatatggggccctaccccacttccagggagcacagcagcctctgaccctagccctgccctggcagcatgggacctgccaacagctgagggtggcagcagtctgtgctgggatctgtgcccggatctgtgcccattctcttcagtaaggctggagctgcgagccagtttgctgccctcccagatcctgtgtccattctgaagaatggggacacctccctattacagatgagaacagaggggacatgaactccttggaggcagggctgggaagggaccctgggctgtgtctcctccctgtaccgtgtcaactccaagagctggcaccaggccgggagggctattcccatattcctcacagctggcttgtaaggcaggagctggcccaggccacagcacctgctggggtgggaaagggccccagctgacctggctatgggtgccactggagctagaacagccctcctgcacccaggctggcgacagcccagcagtgcccacacaggactgggccctccgcaggggacttcagagcagcaaggccccagctggcagtagcctgaccatctggacacagcagagccagggcggcccagggacggcaggagagctcgcggcaccttcctgaggccaagcaaggggagcagggttagggctgttcctgaaaggcagagagcctctgccctgagcctcacagctactcttctcagctctctgggtctggaaggagaacaggctgaggggagctgagaggagctgaggtgctacccggagccccattcacccccacctgcccacttgggaatctgaggcagaggagggtgaggcctgtgtgccaaccttgttcacataccaccttcgtccccccaggccccggccccactcctggctctcattatttttatgttaaaactttgaagaaattgaacatgacctgttgaagaaattg

SEQ ID NO: 24150 - DNA, 3488 bp, Homo Sapiens
agcgactcactcgggccccttccacgtgggggaggatttgtttttttgctctttgtattaagttcctgctgttcagttgtggggtccacactgctttcatgagctgtaacactcacgatgatggtctgcagcttcgctcctgaagccagcgagaccacaaacccactgggaggaacgagcaagtctagacgcgccaccttaagagctgtaacactcactgcgaaggtctgcagtttcactcttgagctagcgagaccaagaacccaccggaaggaagaaactcggaacacatctgaacatcagaagaaacaaactccagacacgctgcctttaacaactgtaatactcactgcgagggtccagcacttcattcttgaagtcagtgagaccgagaacccaccaattctggacacactattatgaatttttttttttttttgagacggagtctcactgtcacccaggctggagtgcagtggcacaatcttggctcactgcaacctctgcctcgggtttaagtgattctcctgcatcagcctccccagtagctggggttacaggtgtatgccaccaggcctgacgaatttttgtatttttaggagagggggcttcacaaggttggtcaggttggtctctaacttctgacctcgtgatcctcccgccttggcctcccaaaatgctgggatgacaggcgtcagccaccgtgcccagctgctattatgaatattcctgtacacacgcctcttgtgtacatatgtgtgcatttctctaagctagtagttctcgaactgtggcctctggaccagcagtatcagtatctgaaaatttcttagaaatgtaaattcttgggttcctgaactattgaagcaacaactgtgaatgtgactctctgactttaacaatccctccaggtgattctaatgcatgctgaaatttaagaaccacggtatacctgggagtgaaattgatgggccataaaagggagtttcgtgctccaactttggcatccctagaaaactgcatgaagctttctcagatggccgttcagggacttcagcaatttaagtctccccttctgcagctccctcatattgaagaggacaatcttagacgggtttctaatcataagaagtataaaattaaaactatccaggatttggtgagtttaaaagaatcagatcgtcacactctactgcacttccttgaagatgaaaaatatgaagaggttatggctgtccttgggagttttccatatgtgaccatggatataaaatcacaggtgttagatgatgaagatagcaacaacatcacagtaggatccttagttacagtgttggttaagttgacaaggcaaacaatggctgaagtatttgaaaaggagcagtccatctgtgctgcagaggaacagccagcagaagatgggcagggtgaaactaacaagaacaggacaaaaggaggatggcaacagaagagtaaaggacccaagaaaactgctaaatcaaaaaaaaagaaacctttaaaaaaaaaacctacacctgtgctattaccacagtcaaagcaacagaaacaaaagcaggcaaatggagtcgttgggaatgaagctgcagtaaaggaagatgaagaagaagtttcagataagggcagtgattctgaagaagaagaattacaacaaagcatacagcgaaaagagagagctctattggaaaccaaatcaaaaataacacatcctgtgtatagcctttactttcctgaggaaaaacaagaatggtggtggctttacattgcagataggaaggagcagacattaatatccatgccatatcatgtgtgtacgctgaaagatacagaggaggtagagctgaagtttcctgcaccaggcaagcctggaaattatcagtatactgtgtttctgagatcagactcctatatgggtttggatcagattaaaccattgaagttggaagttcatgaggctaagcctgtgccagaaaatcacccacagtgggatacagcaatagagggggatgaagaccaggaggacagtgagggctttgaagatagctttgaggaagaagaggaggaagaagaagatgatgactaagcagtactctgaatggaccacagtgtttgcacatatttgcaattttttgctgttttggaagtgtatcataaaccagaaacagtacagaactgatgttgagggaggtgtagtttttttactctagaaatgggtgcataatataactaggcagtggcggtgccttggtacaacctgaaaaatgttaaggcttattgaaacctttcaagtaggggatggtacatttatttcatctgcaaatgataataaatcctttgttattataactgtccagaagtgtgggctatgtattatctgatcagtctatggtcccagtaaaagtaaagatgcaggaaacacagtctgtaaatgagcgacttttctttgttcagctttagttttagcaaacaccacaaatatgttttaagtaacatcgctcaagtttaagtaacatcgctcaagttgataatctcttgataagctctgttgttgacattttgcagtgatacaacagctccactcatagatttaaacttttatttttacttatcttggtcataagttggcattctctcacattccacatgatatagagggctacgttttggaattttccttttcttaattgcccagagttatcagacagattataaaaatggcttttaatggcttaaaccatttctaaacctctatcttagcagatcaatgcaggatctaattcttttgataagttctagctctaaaagtgatagtgggactgtatgttttctgatactggtggcttatgttattaaaccttttttaaaaaaggttcactctaaaagctgaactacatccttagttttcagtctacttgactctatcaggagctttttaaggaaagtaagtataacatgcaaaggaagctttttttgtattcattttggactcctgtcaataaaaatagaagtttgttgactcgttttatgtttcaatggtgtgtgtctttttactatcaggacataaatagggcaatccacttctttatttttcaactaaagattgaatagtttgtacattactgctaaagtgactgctatttctgtatactgtagaaaaacccaggagtgagagggatttcccctcatagtacaactggaaggatagtgcttgtaaagagtagagatgtgtacatgatgaatcattgagggagggtggatatttttattcctagatatggaggaaacataagtctgtagtattataaaactgattgtaataattctttcctatcaaaatctccataggtcaaaatattgttggaatactaaaatttgcagccttgtttactttaaaaggttgccactttcagtgcagaatactaccggcatcttgttactgcaatagttggaaataaaatgtgaaaattagc

SEQ ID NO: 24151 - DNA, 3892 bp, Homo Sapiens
aaataaataatgactggaggagcatgtaggggggtggtgcccagagattgagagaagcatcttggtttagtgaaaacctgtgaaagtcaggaaacctgtttctgcccagctccatcccagttgtggtgtttagtccgtgtcttcatctctgtgacctttcattttcacactggcacacgcctcccaacatccactgttgggcagttgtaaggctcaaatgagccccaaggcctttgaaaagttaaaagtattaaagtgttagatgaacataagaagaaatgattatcctgccttcaaagcgagcctccctgtctgatgcactcactgggccaccttctctgagcacttctgaaaggggcctcatttattcattcatttattccatgctgcacaagtttgttaagcacccacttgtgccaggcatttgctgtacactaaggattcatcagtgaagaggtagacacagcccctgctcttttcaatctcatattcagaggggagacagataataaacaagtaatgagagtgtttgttaataactgtggtgtgatagggtcaggagtgggtagtccaggagggtaccagggaagtggccagggagatggcatttgatggtgacctgagaatgagaagccagccttgggaagagctgttgcaagagcttcaagcagaggacatagcaaactaagtgactccgaggcagggaagatttcagcatgtttgaggaggccagtgaggcagaccccagaaagcacgagggagaatgataggagatgagatgggtagggttagcccatccaggggctgcaagctcaagtaaggagtttgaattttcagtataatggaagccattggagggatttgaacagaggagaggcatgacctgatctatatctggggatgtcagtctggctagtggtgtgtctgtggccatggagtctgggggcaagatagaagggagcaagagtggatgcagggaaaccagagaggagccaggtgtcattgtccaggtgagggaccattggtggcctagattagggtgatggccatggaagaccaagaggtggacacattggagatacactagaggcagaagcaaccaaattaccaatgggttggatttatgtgaagcaaggggaagacgaacattgattcctgggtttgaggctagaacaactggccccgttttctgtgataagagacattggtgggatgaaaagcaaaagtgctgctttgtacctgtttgtttgtacctgctaggttttgctatctattggacccctaggtggaaatgtcacatatacaactgggtgttcaggagagggaccagctggagatagaaatgtgggcagtgttggcctgtgtgggaagcggggctgggtgagatcagcctcctggagagtgcagatggagaagatccagtgatcttcaccacggggaggctggagaggagagagggtggcagaggacactgaaccgggagacaggaggcaggattaaaccaagactgcgtggcaggtgatgtcttgggagccaagagagaaaagggtttcaaggagggaagagtccactgtgtgagatactgctgggtgcgtacgaggcggacagcgaagtgtcccttggatttggtaacgtggaggttgttggcaactttgacaagaggactcccagcaaagtgggttgaagatgggaggtgagaaagagatagtgatggtggacaaatggtctttttgagaagtttcactgagaatgggatggggacgtgctgaaaccgtgggttcaggggagagtttttaaagatgagagagcatgcctgagtgcttgtgggaggcgtggcagatgcctgggagcaaagtcctcgagaagaggcctccttgaggacaggagtcatttgcaattggaatgatgatggagaatgggggtgcagaagcttctgggtttgtgacttggcagtggtgggtgaaggcgttcctggaagggttattagatccagagaagggaggagagctgtgtgggtgagaactgggaaaggaagatttacagacagagaatctgaggactgagagagttggctcatggagcaggaaagcgagtgtaccagggagacggtgagacccacggcccaggcctcttggccttctgcctggctcctgctcggctgtgcagatggctgtgttctcagaggctacatctcatgcctgcgttgtcttcctctccccaggacctttattgggcttgaggtcacttcagggcatgcccagttcctggacctggtttcagaggtggacagagtcatggaggaattcaacctcaccactttctaccaggatccttctttccacctcagcctggcctggtgtgtgggtgatgcacgtctccagctggaggggcagtgcctgcaggaactacaggcaatcgtggatgggtttgaagatgctgaggtgctgctgcgcgtgcacactgagcaagtccgctgcaagtctgggaacaagttcttctcgatgcctttgaagtgagcaccagaggccttcctcctccagggccctctgcagaccaggctgagatggaggaacctgctaaaatcgatggagatgcttctagcctcccagtaggaggccccagccatgccttcaacctggcaggaggtgtagccactcctcatcctccctgagtgctgatattctctctctctctttctcttcctcttctttctctctcttctcctctctttctctcctctgtctctcttcctctcctctcttcctctcttctctcttcctctcctctctctcttcctcttctctctcttcccctcctgtctctcctcccctcctctctctcttcctctcctctctcttcctctcctctctctacccctcctgtctctcctcccctcctctctcttcctctcctctctctcttcctctcctctctcttcccttcctgtctctcttcccctcctctctctcttcctgtcctctatctcttcccctcctctatctcttcctctcctctctctcttcctctcctctctctctcttcctttcttctctctctcctgtctcggctgttgtgggttgcaggttgggtgctgctgttgtggtccttcccagaaactgccagtagagggcagcctgggcatcctaatgcttactctggttgttacacaaagaaaatattggggtcactggcgagcccacccacactcaccagaatctccactgtagtccccctaacaaacagcccttcacttcctcttccacttcagcaatttgtattttgatgccattggcctcagatcagagtgttttaaatcatcacgccctggcttatccctggtcgagccaggacacggggtgcttcagtgggtctgtcaccctctctccttgaagcatgttgcttttatttatttacttttactctcaccctgctcctgtaccagcaggggccacttcaaagccaaggtacagggtgataacttgtggtccagcatcagttttctccacttctttctcccactcacccccagcaaggtgcctggggagacttgagcagatgtttcattttggcctggccagtggctgaaagccaggcctccaatgcactgtgacctctggcttccccagcagctttcccagagaggcagaggggccttccacagcccgggttctcctgctgcctcctgcctgctgcagctgcaggcattctgaggggcaacgtggaggaagggccagggatgcatgggattttaattgtttcatcacaccttccccgtggcaaagaaacagtcagtcctcttcaggtgtcttctggatttctggtgatggacagagaaatctttttacagtttcaaattatgttcaacaaataaaaattgcattttttattttgg

SEQ ID NO: 24152 - DNA, 2319 bp, Homo Sapiens
agacgtccgctgtgccgtcctcacagcaaggcctgctccgaggccccggggtgcgtcagcagccctcctcaaacaccctgggagtgcccagcagggcggaacacaccgggaaaccaacaccccaaaggcacaaggaagtatccctggagctaaaaatagttctggaaacttgccagggggccacaggctgggacgtgcgttaaggctccctggccaggctctgggttggtgtagtggggaaggggcgcccaggtcggccctgggaggacatgaacaggcttaggccgagggctctcagatgtatttacctctgtgcctggcagctggcccgtggtgacaggcagagctggaggctggccatcttggaaggcggccgaaggcccatgtgtcctcttggcctctggccccggagggcggatggggatgtggaagttgctgacagagcattttctgagctgttgggtcaggggctggggggtctacagtgcagggaagctcagcagtgttgttcactcccatgcatctgtacaaaggggtgctaggcttgggagggggcccccgtgttcacaacctcacccccaagttgccactcctgggttagagactatgccagggttggcctgccccctttacctcttccctgcccccagagagccttgcttggtttgtgggaggtggggaagggagctgagagccctgggatcttcaaactgttcctgcttttccttgtagctaagaggccggtgtcaccatacagcgggtacaatgggcagctgctgaccagtgtgtaccagcccactgagatggccctgatgcacaaagttccgtccgaaggagcttacgacatcatcctcccacgggccaccgccaacagccaggtgatgggcagtgccaactcgaccctgcgggctgaagacatgtactcggcccagagccaccaggcggccacaccgccgaaagacggcaagaactctcaggtaagcgaactgacccagagaggccaggccaacaccaaccaggttttcctaagactctgacgtccagcagcctctctccgtggcccaccctgggctcagtccccacaaagtaaaacgagatggtagaagccctcttcccgggactgcacggcatcctgatcctcattcctctgtacccaggctggaccgggcccagcacctttcccatccttgtcattggagctgggaggggccggaggccaccaacctgaagcagtggaccgagtgggcccccgtgaagccctgagtgtgtgactggagcgcctagggccacctccctttcctgcccagcccatcttcctggtccccaggtggctgcagctacaaggagctgtccgcgggcccccaggctgcctccaactcccctcttgacacgcccccctccccccaaatcatagtccctgtgtccccaagctgtggttcttcagattgccttcttcccctctgtgaacaacaggcctcagtgccccgtcttgactctggaccttcctggccctgccatcttggtgtctggcactggcttgtcccaccctctgcctagatggatctcctccatgagtctttggagccaagccagggcagaagttggcccttgcccttctcaccagggcctcctgccaccacctggactgtggaaggccactgagatgggggcagagctcagcccgaggcttgggcacactgcttctctccacggcctgtgggtcctggatctgagcccttggggtgtttcactcaagagccactgagccgtccccatcttccacaaagcagtttccacaagcaagccagggccagccctgcctgcactctgcccgcagtgcccctcaacgtctgggatgaggatgagcctgctgagatgagggcagctctctccatccagcagtacctcatggagtgctcactaaggagttaggaatggcaggccacgctggcatctggggttcaaggtggctcctgtggcaggaacaggtgtccatgaccctgattacctggatctcacaggttctgggaatgcaataggggcctgctgtggctattccaacatctctggtcagggcctggaagtaccttaggacacatggggttggggtcaggactgcattctcagggaccagtggagagccctggaccagatgaactggagtctaggcctctctcgtgactgggacttgtgggacgtgggaggcccgtgagatccaggactaaagattatgctgtttcctaatgggcagatatgtaagtaggtaagtgggatcctcaggtaagcgggatccagaactaaagactgtgctatttcctg

SEQ ID NO: 24153 - DNA, 2886 bp, Homo Sapiens
ttgaagaatgtaaaataacatgtggacacatggaaagatgcaccatgatttatggtggggaggccacacaaaaatgccagttcactcaaagaattcccattcgaatctgaacagggtttttatttattttttatttttttgagacagggtctcgctctgtcacccaggcttgagtgagtgcagtggcacgatcatggctcacttgcttggccttgacttcccaggctcaagcaatcctcttgtctcagcctcgcaggtagctgggactatacatatgcaccatcagtggtggaccctattccagccagaggcgttttccctagggtgtaataagaatttcacaccctgtggaagaactctgtgtacccaaatcctagcaggtgcctgagatacacacagcaggcactcagtaaatgtaccattgcccagctagcaaagactgacctaataagcagggcaaacactgtcaaaactctagtataaagttgcctctgtgtgctttatcggaatcctcttgttttaatcctctcctggtacgtctccatcccatcttagagtgttaagtgcagagtcccttcggaagcttaagtctttgtggctgccagagtcagaatgacgtgacgagcagagggaggctttggaattgaagttttcattcacctctcatcagctttaccagtataagcctggttatttcatccttcggagctctatctcttctataaaatggggatcgtctttaaagccctggagtgctgttgtcaagatggagataaagtatgccaagctgctagaagaatattcagtaactttccggtattttgcttcctgtctgtgaactcttcttatcaggaatccagattactcgggaaagcataagtagttcacataatagaggtgtggattattttgaaaatgcctcctgcgtgttgagtttgcattggagaaccccgaagacgcgcaaactagtcctagcgtgagtgagcagcaagcagtggtacttccttgtgaatcggggtgggaacccttcagaaccgcgagctcccactttctgtcgatcgctctgctcatgcggccctgagtctcatggttactgtggtctcagtcacagcaagtgctgccaagctcaggcgacgctgccagagccttctgagagccgggcggggctggtgccactggtagcctcatccctggacatgtttttcaacttgaagggagagcagactggctgtgtgtttgcatttcctgacaaaagcagccattgacgtcaagagttccctctgttgttaagaagtgacacctgtgtgtttttctttagctttgcacgttattgggcttcagataatatttatttttaccaactttggcccaaattgtatcattactttgaatctgtacagcacttttatgttttcaaaacatttcatgtatttttcagtgttacccttgcaacagccttgtgagttaaccatttcaagtgcaacctgttgtttcgtgaggaaactgaggctcctctgctatgcatgtgaccagcccagcatcacatggtcttgcagcagtggaactgagatgagctcctggcctcctgactgcccagggctccctcccactgcattgtggagcctgggcacttggggaggagtggggcaggacccagtcctgccactgtttgcttcctcaccacctctgggtttcaggtcatgagaagcattgccttttcccctgggaacaccagttgcttgctttcgagttttataatgagagccaaggaccttctgcaggcgtaattgttcatcttttaccaagcctttgcatttcaagtatccaaagacctacgtggaatgttagtatggagagagaagaggagggagggactgggacagtcatcctgccatccaggaaatgcctgagctcgacatcgcccaagctagcctcaggctgctgcccctggcctagcaggatgcgtgcttgcccttgttgggatgctggcatccagctccttgttctggtctcaggagggagatgtcgggaaggttcacagggtctgtttatagaccctagaggtggtcgttggtggtgcccagtgacggagcctctattggcaaaacctgtatctctgcagtcgcagctgttggcccagtggatagagcagccttacttaaagcattttcacttttctgtcctcatatggcatgttcctcctccctctctccctccctccctctctccctccctccctttctccctccctccctttctccctccctccctctctcccttgcttaattccaagaaatggggaccaacattcttcttacaattagaagattctttgttgttcataacagtggagtcacaggtgtcccaaggtttttcccaggcagttcagcaggcctgaaggcttctggatggagtgcagaaaatcacttgtaagcacaaagagtgtggcaagtgatgtgaggtagctaactggaatccacattgaggaccagctgcgtgcttggaacagcagctccaagtgtcactgcatcatcgttgagagttattgacggtgaaaacacaaacatattaccgaacactaccttgctagctttgtggccctagcgaagtcacttcaattctctgcctcagtgtccatatttgttaatgaggaaaataatagtacccacctcacaggtttgtggtgaagattaaacacttagagaaaacataaaatgcctcttgtgaagtaagtattttttgaatattagccatgattatgttattgaatcaatgttatgtatcaagctgttaccgaattatatcggtgttagccgttgctgtcatcatctccattatccttgtatttcagacatgtgagctttggaaattaaaatctttgaaaat

SEQ ID NO: 24154 - DNA, 3779 bp, Homo Sapiens
tgacctttcgatgctgtgtgggatcccaaaagtgtccggctttgatgggctgatcagcccctcgcctgtccagggctatttatggggaggggcccagtcaggcagggagcactgagcagatgggagctgtggccaagcccaccttctgggaagccctaggagaggcccctgcctcagtctgcccctggtgtgctggggcagggggaagacaaggaatgcccgcaggtggggtggtggggagactcttaggaggaaaggctcctccaggcctagtcacgcttcctactgaggccaggagctgccaggaccggtacgggatcagggctgtgggaggagggcctttggcaccggcccctgtgctaggaagtctgccaggcccgagttggagccaccccctgcaggggagggggcggctctgcctcagcaggccccagggcccccgaagtcacagaagctttttcgggtccagcaaggggtgtgtgtcctctcagtcaaaccccttgacgtttcccaccccctcacggggagggcaccaggcctgaagctggcaggagctagggccatgctatatttggtgggtcctggacgctgacccggccagcgctattctgggcagggagggaaaggggcagagcaggtggtccgccgaggcctggtccccaaccacagcaggacccagccgagcaaggcaaaagacgcaggactgggggatgcgcgcacaggctggggattgggagcagcctggggccggcgcgggcctgggcgtgggaaggcggagcatgccaccctctcgtggccgtgcgggggcgggagtggggagggtggggtggggagggcggagacccagcccctcccccgcagcgggatgcgcacagtgagtgggtccctccatcaccttccacctggggatgcacccactgggagggcagggtggaagccccagctgggtgtgtggactcccagggaccccaccccaggcctgggaagcaggggtcagcccaacacgcaccaatccatccccgatgcaggtagcccagggagcacctgcccctgctgtgaatggggcattcgggggcgtgagaccttttggtgccagcggtcacgctgcacctgaggcccccacctgaccagtgctcccagctctggtgtcctgagaaacccttcaagccatcccgcatgggcaggatggtgacatatccatgtggtaggattgtcccggccccaaagtatggccctggtcaggggagcccctgctggaaattgcatctccagagctttgatgcaggacccctgggggatcagggaatgagggtctccaccccaggggtctccttgcagtgagtctatatgcaggcctgcgttctgctcctggggctggttctgagtgcccagcttcagtctcctgagaacatgaggatgggagggggcagagtcttgctgagggcacacccagttcccgctggaggaggacagtgccagtcttctgcaaagggaccttgggtgggaacgggcccggagcgggaggaacgtgactccccagagggaagatgggcatcatactgggcccagagctgggaaggagttgctgccagcacagggtgggcctggactcccctcgcccctacccccagtggttgtggctgtagccctaagcctggagagcaggaccggcccggggtgtctgggaggctgccaggtgcctcccagagctcccaagggcccccacctgcaagtgccagcctcagggcagtgcccaaatgaggccctctcagctgcagccagcgatgccttgggatgctcaccgggagggaggcggctttgggctcctaagtccttgggagaggctgggagcagtcactgcgcggcttgcgcaagcccattgtcgggttgggtggcttcctcagccagggctgggagggactccaggatcaggtcctccctgtctcgagtctcagtggggtgatggggaggagacctggccacccatggctcaggggcagctgagaacaaggacctgctggagctggaagtgctgtggtgttgaggggtggggtgggcagcttctcacacctgcctcctgcctccttctgtccacctttccaccaccctgacctgtcccagccccacacatggttctgcctggctggcctgcccttggcacctggcgtagagcacacagaaggcactcagctaatgctgggcaggcccactcatggggagtgcgtggctgtgcagcaccagggaaccggcacagcagcgccggcagaaatcacagcagtaaacctgtccgggttgtatgcatcaaggtggcgatggacgtgggtccccccactgcactgtggccctgagcactgtatagcagcccggcaatgggagccattatcttgcccctttgacagaggaggacacagaggcacagggaggtgaagtagctgccccacactagtgcctcctcgctcactcaccaccccctgcaccacagtgcagccgcttctcccaccagctggggttccttggacccccaagcctgggaagggggaggtgagtttacaaaatggaaagcttaaaaggagaaaagtggaaccagaggtttgagaagccctgagtggtagagtaaggcctccagcgctgcctctgggtgcagggcagagtggcagaggagagggggagaggcactgggcaccatgggggcccagttcccacttcggggatctctctcgcagaaccgagggtccccttcatgggggtagatgcccagggctagctgttgccactgtctgtgtggacctgagtcctggacatgcccgagtgactcaggagtggctgcttgggcgggctctgtcaccctaggatgttatacattctgggaactggacaggagtggctgcttgggcgggctctggcaccctgggatgttatacattctgggaactggacaggagtggctgcttgggtgggctctggcaccctgggatgttatacattctgggaactgcaatcagccactagagaagtcggagctacaggaagtgaccctggggtgggacctggggacatggccaggtcagcatggggacacccggctccagcaggagctctggtctgtcctggggtctttgggggcagggctgcggccctgggcaggcttcctccaggcggaggtcctggggaagtgggggagccaggccagctgccgcctcccccactatgtagcatctgattcgtcatctctcatgaaggcgatttggttcataactctgaaactctgaaaaaggtcaaaagaagcagagaggccctcggtggatatgccagcttttctgccggtgctttctcccactactctgggtggtctgctctcctcttcaaacctcagctcgcagggagggcctgaatctgccagcccctcaggatctccttccctctgggccctccccacccttaaggagcctcccagacagaagggtggacagagccacctgggcagcccgagagacacacgggggtcctccctgtggacagccctgccagcttccgcccagccctgagcttcatttgcatcttgaggagtaaggggtggtgaaatgggaatgctggtctggctcagctggtcgtgggcataagtgcccgctgaatggatggcatctctccctcctgtcttatgttctggggtccaggtgcttcccagggccatgcccctgctgctaatgcttgccctaacccttaccctaaccagcgtccagcgtcgtctcaccgagccgtaaataaatcaacagattcgc

SEQ ID NO: 24155 - DNA, 5107 bp, Homo Sapiens
tttatcacaaaggctgtgtaggctgcaaaaagacctaagagcccccaggcacgagatgaagacgtgggcgcctccctcttacagctgctcaggtggtgctgaggcgccagtgccccggttcttttcctgcacagacacagctgcacatgcgtcaggcagggtcctttactggggctgccggtttgggtatttactccagggctggggtcccctccaggggtccatgagccccacggcgacacttggccagccctgcactccaggccggcactttgggccactcagctccaagcgcttatcccgaccagggcccggtgtggatgcctctgcacgtctccagcgctgcttggtcacagcccttggcagaagctgggtgcggtctgtgaacagctggggatgcagctgggctttgcaacctccaggcagagatgggcactggacactgagcccttggcagccggtgcgcagcacgcaaccgtccatccctggcttacctgctggggccaaccaagcactgggccctgtcggaagctggcaccgtgctcaggaagccagtcaggaaagaaccttctcctagagctgcagtcgagttgggtcagggatgaaattggaccaagaaggcaaaagagatggctcagaagggcggggggaggggcaggggcacgcaggtggtggggcagcgctccctgaggaggtcaggacccttggggccaggaagagagctgtgtggtgtgggggtcaccagcagctctcagggaccgcagatgggctgaggctgcagactctggcttgttctgagtggggaggggcaccaggggctttgagcaaaaaaggctccgggcagacttgggcgtcgaaggccagctccggccactgtgcacagagcgtcctctcaagcaggcggctgaagccaccccaaggctgggcggtggaggcccagggctcccggtgctgagttggactgagggcggggactgagctttggtgggtcgggtaggagcctggggccggaggtgggggccgagtccgagggaggatctggggctgtgtgagtcttggacactcattcgggatgtgggatgggcagcatcatttatctgtttctgcctgcatacaggtacgggtgtttttcttttgggaggccttgagtatttatttaataatggaatcacatttataaaccactctgcagctttcctgctcagcagcacgtcatcagctattttcctgtgagcacatgattgccggctgtgcgctggttctccgagccatgttccccgttcacaggctcttacccgcagtgctgccacggcgccgtgtgcatcccaggatcttgcaggtgtccgctggccgccgtctgcagggagtggcccttaagccctcacttggttctgtgtccccaggcttgctctcctggcctcttccctcaccatgccgcgtccccttactctgaccttggccaatcaggacctgcgtgtctggtggattttggaagccacctcactggggacgggagacataggccaggggacagcctgtgagagggctgggccacggggactgcagaggaggagcatccacggcacctagatgcaggagaccctcgtgggcaggagcgtggctggtggcgcggtggcctcaggagcagtgaggccgtcccctcaacctcttctgtggaagcagagatgccactcgccagacggcgtccagtaaagagggcctgggaccctctgggggactctcaagtcccagaccccctggtccatgtccttgccactgtgctggccgaggggcccctcagcccacatggggcccagggagagggtcctgcctgtctgggcgggccccttggtgggccctggaggctccagtctcagggagaggaaagcctggtctgccttgacaccctcactcgcgtctccggggtctccagggcctggcccaggcttcccagggctgcgctgtgcttccttggtttctggaatcccttgcagatgacagacaagagaaacgggcctattgatgtctagcccgtgtgttgtttactgttcctggagtgagtggtggaaagccctgcgacgattggttcagaggataaggcctcacctggagagtatgtcttgtttactccgatgaggcctcacctggagagtgtgtctggtttactccaatgaggcctcacctgcagcgtttgtctggtttactccgatgaggcctcacctgcagcgtttgtctggtttactccgatgaggcctcacctgcagcgtttgtctggtttactccagtgaggccttacctgcagcgtttgtctggtttactccgatgaggcctcacctgcagcgtttgtctggtttactctgagcctcacattcctttcagtcgctccgtgaatcactgtctttggtgggtcaggaggaatccactccctgggcctgggcctggaccagtgctggtcagacctgctgtgtggggcctggggacgcttgcaggtgtggactggcagctcatcaggaagagctggggaaggcgtgagaccaagacagcctccggcctggagaaggcgtgaggcctaggcagccacatggctggggacagcgtgaggcccaggtagcctctgagggttgggggaggcatgaggtccaggcagcccctgagggctggggaggcgcaaggtccaggcagcctcaggactggggaggcgcgaggtccaggcagcctcaggactggggaggcgggagggccaggcagcctcaggactggggaggcgggagggccaggcggcctctggtgctgctgcgttgctcctgtgcagcctcggggggccccagggcatctggaggcatctgtgagcgtgtgggctgtcccagctgacgtgggtcctttgctccacaggccaccagcttgggctccccacggagggcagcaagtgggacttggggaacccggctgtcaacctgtccacggtggcagtgatgcccgtgtcagaggaagtgcccctcaccgccttcgccctggagctggagcatgccctcagcgccatcggcccgaccctgctgctgactagtgacaacataaaacggcgccttggctccgctgccctggacagtgttcacgagtaccggctgtccagctggctggggcagcaggaggacacccacaggatcgtgctctaccaggcagatggcacgctcacaccctggacccagcgctgcgtgcgccaggccgactgcatcctcatcgtgggcctgggtgaccaggagcccacagtgggcgagctggagcggatgctggagagcacagctgtgcgtgcccagaagcagctgatcctgctgcacagggaggagggcccggcgccagcgcgcaccgtggagtggctcaacatgcggagctggtgctccggccacctgcacctctgctgcccgcgccgcgtcttctccaggaggagcctgcccaagctggtggagatgtacaagcatgtcttccagcggcccccggaccgacactcagacttctcccgcctggcgagggtgctgacgggcaacgccattgccctggtgcttgggggagggggagcaagaggctgtgcccaggtgggcgttctcaaggccttggcggagtgcggcatccctgtggacatggtgggaggcacgtccatcggggccttcgtgggtgccctgtactctgaggagcggaactacagccagatgcggatccgggccaagcagtgggccgagggcatgacgtccttgatgaaggccgcgctggacctcacctaccccatcacgtccatgttctccggagccggcttcaacagcagcatcttcagcgtcttcaaggaccagcagatcgaggacctgtggattccttatttcgccatcaccaccgacatcacagcctcggccatgcgggtccacaccgacggctccctgtggcggtacgtgcgtgccagcatgtccctgtccggttacatgccccctctctgtgacccgaaggacggacacctgctgatggacgggggctacatcaacaacctcccagcggatgtggcccggtccatgggggcaaaagtggtgatcgccattgacgtgggcagccgagatgagacggacctcaccaactatggggatgcgctgtctgggtggtggctgctgtggaaacgctggaaccccttggccacgaaagtcaagctggaggtggtgaagagcagtgactactgcgagtacctgcgcccccccatcgacagctacagcaccctggacttcggcaagttcaacgagatctgcgaagtgggctaccagcacgggcgcacggtgtttgacatctggggccgcagcggcgtgctggagaagatgctgcgcgaccagcaggggccgagcaagaagcccgcgagtgcggtcctcacctgtcccaacgcctccttcacggaccttgccgaaattgtgtctcgcattgagcccgccaagcccgccatggtggatgacgaatctgactaccagacggagtacgaggaggagctgctggacgtccccagggatgcatacgcagacttccagagcacctcagcccagcagggctcagacttggaggacgagtcctcactgcggcatcgacaccccagtctggctttcccaaaactgtctgagggctcctctgaccaggacgggtagaggcctctgctaaagagcccggatgcagcgtcttccgtgggactgtccccaaggctgaggctcctgccaagtcctaggggcctctgtacctgccctgctggaagccctgacttccccggggccccaggctgtgttagggttctctgggcctcttctttgtaccagcagccctgcatacagggccctgtgagcccccctgcagtcctgtgaggcccctgaagctctgtgaggcccctgaagctctgtgaaccccctgcagccctgtgaggccccccgaagccctgtgaggccccccgaagccctgtgaaccacctgctgccctgtgaggcccccaaagccctgtgaactgcctgctgtcctgtgaactgcctgctgccctgtgaggtgtgggagccctgatgctgccgtgtgatgtttcaataaaggtggatctcactgtt

SEQ ID NO: 24156 - DNA, 3324 bp, Homo Sapiens
tgttttcacgtgtccctccatctgtcttttgaaagggtttcaggtcttttgaaagggtttcaggagtggtgttaattctttttgtttttgcctttttgttgtcgttgttttttgttttttttttgagacggagttttgctcttgtcacccaggctggagtgcagtggcatgatctcggctcactgcagcctccacctcctgggttcaagtgatgctcctacctcagcctcccgagtagctgggattacaggtgcgcgccaccacgcccagctaatttttgtatttttagtagagatggggtttcaccatgtttcccaggctggtcttgaactcttgacctcaggtgatccacccaccttggcctcccaaagtgctgggattacaggcatgagccaccgtgcccagccgttttttaaaatatatatatgttttatctgttttttactatttttaatagagacgggggtctgtgttgcccaggctggttgaacccctgggctcaagcgatccttcacctgcgcctccccaggagggtgttgattctttggctgtttggcagggtttgcctgggagctcttgggccctgggtttgtctttgttggagacttttgagggggacttggccccttgctggccacaggtctgctcagtccctttcctcttggtcggctgtctgtctcgcatcttgtctggtgcacagttcatgggtttctagtatctgctttttatttctgtaagattagtagttatatcccttctttttctgattttagtaatttgaatcttctttcgtcttagctgatgtagctagaaatttgtcgatttcattatcttttcaaagaaccaactcttgggtttgttgactgtatttttctgttttctctcttctgtcatctttgttactcctgtctgctgcttaggggttcagtgtggtcttcttttttctagtttcttaatttgaaaagttagtttacagctgtaaacatccctccgagtgcagccttcgctgatcccctagcgtcatcatttctgtttgtctggaggtgtttctgattccctctgatttcttgttggagccgtgggtggtttatgtttaacttccacatgtttgtgaagtttctggttttccttctgttgcttgtttctaactttatctccttgttagagaacagactttttgtgatttcagttttgtgaaatgtattgatttgtgtagtggccccacatccatcctggagagtgttccgtgcgcgcgggaggaggatgtgccctcggttccgtgcgcgcgggaggaggacgcgccctcggtgctgttggggtggtgttctgcaggtgggttgaggccgtgtctttcctcactgatcgtctgtctggcggttctctccgtggttagaagtagggcaccgagtctccctgtcactgaagaactgcttttctccttgtcattctgtctattcttgattcagatattttggggtctcttgttaggagcaggaatattttcgtaggaaaaattcctggtagtgaaattgttgggtcacaatacatggcccttgtatgactaggctgaccttgctggagttgatggagtccagtctcaggacgctgctgtctgcacacctgcgaaagctcccaccttggctatttgatggacaagtgatgtcaggggctcatttctgcgtttgtgatggtcacgatttcgtctgtccgctgcttgtttcttcttgctttatcccctgcccttcatttcctgtcctgtcgttgtgcgatggttttgtaggaactctgttgcgggtggttggaacttagcaaatacttgagtgattaacgtgaggacggtattacttgcttataataactattatgtccctcgtcaaatatgcttcatttttcaacctgggcctggtgcttatcatggtacaaaggttttcgtcctaaggaatcacgtttctttcaccgtccttagcggtttttcccttataccacccacagcagcagtgggtatttacaaagtaattcatctgaatttttgttgttttgttctgatgggaagtggttcagttttgaatttgatttatcagtagatgtttgggtttttgaaaagcctctgatatttagaatcggaatgtagggaaccttacgtcagcgctgggtctgtgagcgaggatggcgatcgggatgcgacttcgggtcttttccttaaaactggatgctttgtttcatttccttccctccaagatcgacctgatgccccatgacctcatcactcagctcttgcgcgtcctggccatcgagaccaagcaggagaaggcgatggcgcacgccgaccccacggagctggcgctgagcggcctggaggccttctctttcgactacatcgtcaagtggcccctttcgctcatcatcaacaggtgcgggtcggctgctcgggcacctgccagatcttcactcaggtttggcagaagcgagaactgtgccacgcggtggccacctcgtcccacagaggacccaaggcggctctccccagccttcagtgtccgggagattcacgggctgtccgggggccacggtgcggactgtggagtacagacgccgtgtccacgacgccgccggtcacggaggcccacctgaggtgccgccacgtctcttgcaggaaagccctcactcgctaccagatgctcttcaggcacatgttctattgcaagcacgtggagcggcagctctgcagcgtctggatcagcaacaaaaccgccaagcagcactcgctgcactccgcccagtggtgcgttcttcctctgcccccgcatgccctcctgaagcagcgctcgctgcactctgcccagtggtgcagcgccccccttttgccctcctggtagacagctttctaggcttctggaagtgtcatctggaagcgcacgttggtggctttagatccataatgcttcattgcttcattttcctgtcttggggctgcacggcgctgccgtccaccccacaggggatgctggctctgtccctcagccctttctggagccttgtggtgactgcacgggcatggagactgcccaggtcggcgtgcaggacactagctcctcccgagagcggtcagccacatcttgctgggaccagaggtgctttgcagccggtctgtgcctctagggtgttgaaaaaaggggtcgatggcagagcttcataagaatttgtccagtcgggtgcagtggctcatgcctgtaatctcagcactttgggaagctgaggagggaggattgtttgagcccacaagttcgagacccgcctggacaatgtaacaagagctcatctctt

SEQ ID NO: 24157 - DNA, 2991 bp, Homo Sapiens
ttggtaacaatacgaccccatggtcgttcagagaatcttcgcttcccggagagtgtgtcccctcccccagccccggtgggcgcggaggtagctaatagctgtctggggtcagcagatcttggttccccgctttgggccattctctgaccctcacttttcaagtctgcggaatggaattgatgataccttcttcaggaggaggatgggagactccagtgacaacaaaacgaggcggccggccgagacatcgggagggattacgttccccgcaacccctgtgtccccatcgctagagccaacctggaccagggcatggccggcaccagctcaggccgcgggtcccggcgccggagggtagccccaccgtccccgcctcctgggcgcattaggccagcgaaggctgcaccccgccgcgggccgcgctctggctggcatgcaggtggtggtagtccctgcagaccgcgcctcccacaagctgcacaaccaggtcgtctgcttagcccaggtttagctcctctgcggagggctgatgagacggtggagcggctgcctccgggtctacttagtttttacagctgccgtttgttgacagaacagccacctaaaggagagctttagagggaatgagtgccctggaaggaggctctggggtggggagaagttggtctcatgggtccccaatttctttctttctttcttttccttccttcctttcttttttcttttcttttctttctttctttcctttttttttcttcctttttttctttcttctatttcctttcttcttttcctttattttctttctttctttctttctctctttcctttctttttttgacggagtcttactttgtcgcccaggctggagtgcagtggcgcgatctcggttcactgcaacctccgccatccgggttcaagcgattctcctgcctcagcctctcgagtacctggggttacaggtgtatggcgcaacgcccggctaattttttgtgttttagtggagatggggtttcaccatgttggccaggctagtcttgaactcctgacattgtgatccgcccgcctcggcctcccaaagtgctgggattacaggcgtgagctaccgcgcccagccccgagttctttctagggtgggaggctgtgagtctgtgacatcacggggatattcttgggctggttccttgtctgtaagagcaacgaagggactttgtaccctgcaaagtgcaacttccggggatgattgggaagttgaggggttgaatgcattcacaccagagtcactctcagcccagactctccgggtcacctctaaggctgtgcactaggtgggcgtcagaggtattacaggtaaaggaatggcggctcagagggaaggagagacttgcctaacttcagggcaagctaacgcttgatttcaacttgataaatttctgagtatgcagtgggtgcacatagcagagacaggtaatgagaagttttcttttttccttttctttttttgtggggggtggggacagagtctcactctgtcacccaggcaggagtgtagtggtgcaatctcggctcactgcaatctccccccaccccacctccaggttcaagcgattcttgtgcctcagcctcctgagcagctggcactacaggtgcacgccaccacgctgggctaagttttgtatttttagtagagatggggtttcaccatgttctacgtttcaccatgttggccaggctggtcttggactcctggcctgaagtgatctgcctgcctcagtgtcccaaaagtgttgggattacaggcgtgagccaccgcactcggccgagaagtttttctgattaaaaaaaattttaaggcacacacttcagcagtggctgtgaaggaaccctgatgtgtatctaaactgtcgcctcgtgcacatcaccccattacttactctgtgctaagtgctgtcatgcattacatcattactccttagaacaggcctatgaggtggagtctgcattaggcccattttggacaaggacaccaatagtgtgggaggtggtgtaccttgcccaagcccccagcaggtaagtggtggtggggattaggacccaggtcacttgagtccatatcctgggctcttagtcccactctgcctggctgcctgctgctccatgaagccaaccctggacctagacctggacctggatcgtcatagcccagatccctgtgtgcttcccaggctgccttgtggcaggtggatggtgcccctcgagatgggcagggcaccatctggccacacgtgcctcatcgtgatgggtccaaaggtctgggcaggccaggacacacctctgtcaaccagagcagtgactcagagctgtcggcctcagccgtaagggcagggagagggggcaggggcttgggttggggtctgccctatttggggcacagcagagcgaccaggctgactcccatggtctgaggcagagcggggagcctggagccttgggtggggtcacctgcctctcttcttactggttaagccaccagcgatgactagtgcctacttccttcagagaggaatctgacggctgtggcaggaaagtcaggggcaagaattgttgcacagatatgctaatatctcagttctgccactttctgtaatctcgggtggtgatctaatctgtctaaggtctattttcccatctgtaatggggaaaaaaatcatccctggagttattggcaggattaaatgaggtgatattagtaatgcaatagtcaccaccatgcccccacgaaaactaacattcattgagaccttattgtgttgggcattgtgctcaggacttcaaatgggtgacttcattacatcctcaccatcacctgcccaggtaggcatcatgtattacctgcaacttacagataaggaaaccgtcttagagaggttatgcaacttgccctgccaaaattgaacccattgtgaatatacagtagataaaaaaaataat

SEQ ID NO: 24158 - DNA, 2451 bp, Homo Sapiens
gaataaaaactgatgtaacaatgttgtctgtgttggtggagatggatctgctagcgaagtagcccatgctttgcttctgagagctcagaagaatgctgggatggaaacagaccgaatcctgactcctgtcagagcacagcttccacttggcttaataccagcaggatctaccaatgtattggcacattctcttcatggagttcctcatgtgataactgcaacattgcacattataatggggcatgtacagctggtcgacgtctgcaccttcagcaccgctggcaagcttcttcgctttgggttctcagccatgtttggctttggtggaagaactttggctctggcagaaaaatatcgatggatgtcccctaaccaacggagagattttgctgttgttaaggcactggcaaaacttaaggcagaagactgtgaaatatcatttttaccatttaacagctctgatgatgtgcaagaaaggagggcacagggatctcccaaatctgactgtaatgatcaatggcaaatgatccagggtcagttcttgaatgtcagcattatggcaattccttgcctgtgttcagtggcacctagaggcttggcacctaataccagattaaataatggaagtatggctcttataattgcccgaaacacttctcggccagaatttataaaacacctgaaaagatatgccagtgtaaaaaatcagttcaattttccatttgttgagacttacactgttgaggaagtaaaagttcatccaaggaataatactggtggatataatccagaggaggaggaggatgaaactgcttcagaaaattgtttcccttggaatgtagatggtgatttaatggaagttgcatcagaggtccatattagattgcatccaagacttatcagtctttatggaggaagcatggaagaaatgattccaaagtaacatgtaattgtttctaaaagaaatgtacaaactagaattttaatataaagaaatgtggccatgctttaaacctgtggtccccaccctttttgggaccagtttcatggaagacaatttttctgtggatgggggaatggtttcaggatgaactgttccacctcagatcatcaggcattagattctcttgaggaacatggcactctagatccctcacataccagttcaccatatggttcgcacttctatgagaatctaatgctgctgctgatctgacagggggaggaactcagtaatgctccattgctctaacctcctgctgtgtggccaaacggatatcctaatagaaattgatgttactaacaattagcctctagggctttaaaagtcaagatgaaatatcaattcaaattctgtttttagatatcaattcaaattcttttttttacaatgtgtttattggacacacaaaaaaactttgcaaccatcataatacatcaatatttaacctagataattctgaaataatttggattctttcatttttcaggatttgagctcatcaattatgttaaatttcctatattctgttacaaatataatacagatttcataagtctgccttgattcactgctccctaatccagagcagttaaatttcaaaatcacatagttatatagcctacctgccaaaaaagaataacccatccctgtcttcttaaagtggtagggttttaaaattcatgatacaagtaacaaagtaagttgataacaaatactattttgaactgggcaaaatctagcccaatatgtaattgtgttccccttgtatctgagaggcctgtgttggacaaccatagtactctgctttcactgtgctcaaataacctgaaatatatagttgtttctgagtagttctgagtaggaaagaaccaaatgtaaatttccttagagaccatcctggagaagacagttctaaatcggggcttgatttttcatctatgatcctagatgttctcctgaaagaatgactagcctttttataacgatacaaagttttttaaaaatacataaatgtcataaagtttattcctgtgtatacacactctgggttcaggaggttttgtgcttacatttcactactcaaatgccttcgcaaatctcagaacattcctcaccatcactgcaggcctgtgaacagataactttcatcaattaggatggctggctagtggcagggacttcatataaagaaatctttcccagaattgtttttccacattgccttctaatttgatcactccctataacagatgttcaaaattcggccacagctctcttatgaagacagagtcagataaaatgatattctgcaattatctagatcataagcataaaataaatattacaaaaatgattgtatttaaagaaattttttaaaatccagaaagtcatttaaaatagaacctcatatagtatgaacaaactataaaaatattttacatttcatg

SEQ ID NO: 24159 - DNA, 5561 bp, Homo Sapiens
cggggtttcaccatgttggccaggctggtctcaaactcctgaactcaggtgatccacccgcctcggcctcccaaagtgctgggattacaggcgtgagccaccttgcccggcgaaagtcctcttttctccctgtttctgctcttgctgctgtgtgcactgagggcccaccacgcattggcagaggggctgggctaggggagctgcctgggtggctgcatgggctcagctgtccttttgattttcagattcgtctgcggtgccaaaagggcatcccgccttctctgcggggccgtgcttggcagtacctgtcaggaggcaaggtgaagttacagcagaaccctggaaagtttgacgtaagtttcccttcctttgccctgccctcccttccgcatctcttggcgtcctccccatggcggcaatcctccatgtgctcacctgaacctcacaggatgagcagtccatgaaacctccagtcatgtgcccaactgcccaggccccagcaggccagaccggcccagtcctgggtacctgtgtctcctggagggtctgtacaactgaggctccagccctgagcagccctcagtggaatggccagatttggtaccccctattccagctctttctcttgatgaccactcaggttttgctttcctgggctcagtaggctacctccctgctcttggtcatcaggaggggacactcagaccatttccctgactgccttgggccctgtgccctgggcctatgggggcttgactagcaggaccacaggtccttcagtgtctcccggcctcccatcctctactttctcctgccttgtccaagcctggccagcacagcccacctgtgtgtcttgtggggtcatcagccctaggagtagcagagccaaacccaagggggctgaagggaactgcccaagtagctcaaggggtcagacgccagtcagtggccagagagggtgccctctgttgttatccctcctcctgtcccgatatccctcctgctgctccctgccccatggctggccagagtaaaatacctctccattcagagctgggcagctcctccagcctgctcccccagggaactatggggaagcagttggattccctggggttgccccggcttacctgccagatctggccgcaggcatcggggtttctcgcaggcccttgggactggtgacaggcagacagtgagacagagcagagctgcctaccaccagctctttgttgacatatctcatgcttcttcattgaacactccagtcttgccaaacctgttccttgagatgactgggcaggagcagggcaaggtagcctagagtttctgctgttgacctggagagggcgagagccttttgctggcaacacgtggacttgcaggggcagggaagctggtagagtgtctggctggggtaggtctgaatctggctgattggattattccccagagcaccaataccaggccacactggagcagcctcttgactccagagtcttcctcctagtggctacatctcttccatttcgaggggccgcatcctgggcaaagtgggaggctcaggggtgggaacctcagtccaagtccatagttaaaatcaggctgccagagccaggcatgagagccaagagcgtgggcagcctggtcagcctcttggctgtgtggttcagcaagcatgagtgtgtgtgcagcagaacacagagctgtgtgcatgtgtgtgtagagctgtgcttccagagaagaatcagccaccccccagggggtctggaaagttgcttgtgtgaggaggtggatttgcagagaaggccttcttgatgcaccgaagctgagtgacgggttcctgcatggttctgggggctggaagaatggtttgtgagcacacctggaaagactttgcctgtgggtgacccagaggaagcatgaggagcttcccctggttgctgcgggtcctgtgccgaggcagggcacagtgggggtctggtgatggcagcatgcacctgtttctgtgctctctccccacagggccctccattcaatacccagtccaggtggcccatcccaacctcagcattcagggcaggctctgcaggtgctggtggctccttctcctgcacgtgctatttcttcctccttccttgggcaggcaggacctcctgtccttttttacctggctttcttctctggcttcaccttatgatggcaccagtacccctcaggctggtggaggctacaggccccatgaccatggtacctgcttgtctgccggtgccctttcgatctgcagctaccctcttttcctttctcaccaaccatgtgtggccaagtgccttaggctgctgaagtgccagatgaacacatcctaggaactgacttccggggttttcgggttcctacctcatgggaactgctaggagaatttgtggggccctcttccccattctgacaaaagcaaacctgcactgcgctcagacagtacttagaggtgcacagtacacagacccccatcacaagggtgtgtggggccccagaggcacgcatccaccgctccgctatgtgcctgctctagggctctgtgtggaggccccagcccctccctgtcccctccagccctgaacactctgtcagccgctcctctcagtccttaccctctagtcaagttcctggcaccctaggttcttgagcttaatgctaggacactcccactgagggccagagagggaaaggggcttgtatgaagtcacctgctcgtcagggcagggcctgtgtctgcgcccactgggtatgtttgctgaggacctggcctccctcctgagggccttccctgatgctgcccctgccctgcaggcaacttgtacttaaaccaacactcccatgaaggtgcctgggccacacctttcagcacattctggttcctctggtgaatactctgcttccctgctcagccctctgggcttcctccttatttattttttctttcttttttaaaaattgaggtatgaatttacatacagtaaaatgcatagatcttgaatgtgcatgcagttcagtgagttttgataaataatacacatccatgtaaccaacatgcagatcaaggtagagaacatttcaaatgaccaagaaaagattttcctttttgtaatggctttgttgttttgtaaaggtgcacatactgaagcgttcacagaagttcaaagaaaagagtaaaactttgttgaaacctcggcacccagagaagtatctgaggttaatggtttgacagatgtcatgtccttccagaaagagctctgtgcagatctcacacacacctggcttcctggatagttgacgccacctgcacagggaggcatgtagctgaggagctgggatggacggctttgagtcagacctggcttccagtcccagctccaccatttttctagccagagtaaaataccttgacatgaggccttgacattcagttttctcatctgcgaacaggatgtaatgataggtcctatctctggaggttggggagcaggatcagtaaggcccacaggtaccctgtgcccagcttagcgcctggctcagagaagtgggaacagctggtagctattgctcagagaagcagccttctgtcttaaggatgtgacataatgtatctgactcccgaatgaaatgtctagaggtccttccagccgcagctggagtggacactcttgccctcatcggtcttcctagagccaggtttaaggtttccagggcccttccctccttgcccctttgcccctgcccaggcattccttacctgagcttctcttcctgtccttgggaaggcccagtctgtgatgggcttgggtgggcactgcccctggtggagggccccctcccctaatccctgggcagccgtgtcctgtcagcaaagcccacctccatcctccccagcccctaatttgtgcccttgcttctaggagctggacatgtcccctggggaccccaagtggctggacgtgattgagcgtgacctgcaccggcagttcccattccatgagatgtttgtgtcccgggggggccacggccagcaggacctattccgtgtgctgaaggcctacacgctgtaccggcccgaggagggctactgccaggcccaggcgcccattgccgctgtcttgctcatgcatatgcctgctgagcaagccttctggtgcctggtacagatctgtgagaagtacctgcccggctactacagcgagaaactggaggcgatccagctggacggggagatccttttctcgctgttgcagaaggtgtcgccggtggcccacaagcacctcagccgtcagaagatcgacccgctcctctatatgacagaatggttcatgtgcgccttctcccgaaccttgccctggagctctgtgctgcgtgtctgggacatgttcttctgtgaaggtactgggctgggcttggggggagcacccctgtccccagcagcccacagtggggcctctctttgcagagaaaccccaaaaagcttccttgtacttactgcccatcccccatgcaggggtcaagatcatcttccgggtggggctggtgctgctgaagcacgcgctgggctcccctgagaaggtcaagcctgccagggccagtacgagaccatcgagcgactgcggagcctcagccccaagatcatgcaggaggcctttctggtccaggaggtggtggagttgcccgtgacagagcgccagattgagcgcgaacacctcattcagctgcggcgctggcaggagacccggggtgagctgcagtgccgctccccgcccaggctgcatggtgccaaggctatcttggatgcagaacctggtccccggcctgccctacaaccttcaccatccatccacctgcccctagatgcccccctccctggctccaaagccaagcccaagccacccaagcaggcccagaaggagcagcggaaacagatgaaggggagagggcagctggagaagcccccagccccaaatcaagccatggtggtggccgctgcaggagatgcatgtcccccacagcatgtgcccccgaaggactcagcccccaaggactcagcccctcaggatttggctccccaggtctcagcccaccaccgctcccaggagagcttgacgtcccaagagagtgaggacacctacttgtaaccctggcagctaaggcctccagggcggggtctccatataactacacggttcatgaactgacattccacatcctgcccaccctctgagggccaagctgcctggccactgggctgggctggagtctggctggtccaacacagattctgcctggtccaacacagattctgcctgagcctccttatttattttctttacagtggcactcaggctggcccagccagggcaggcagaagctagggcctggggggtggggcctccttcagccccctcctcctgggggatgctccccagggttagggtgctggtgtgaggggaaagggtggggtgttctttgtgtaaaatagaaacatggttttgtacagaaataaacagccttgtatagag

SEQ ID NO: 24160 - DNA, 5681 bp, Homo Sapiens
caggtgcccgccaccatgcccagctagttcttgtgtttttggtagagactgggtttcatcatattggccaggctggtctcgaactcctaaccttgtgatccgcctacctcggcctcccaaggtactgggattacaggcgtgagccaccgcacccagccccatgattgccttttaagatagggtagctgcactttcactaagacagaggttggccaactccagcccatgggtcaaatgtgaaccacctgctgggttttgttgttgttgtggttttggggcggagtctccctctgttgcccaggctggagtgcagtggtacaatcttggctcactgcaacctccgcctcccaggttcaagcgattctcctgccggctactgtactccgagtggccgggactacaggtgcccaccaccatgcctggctaattttttgtgtttttggtagaggcggggtttcgccatgttggccaggatggtctcgatctcctgacctggtggtccgcccgcctcggcctcccacggtgctgggattacaggcgtgagccaccgagcccggcccaccacctgccgttttttaaacccataagccaggcatgggttttataattttaaattgttcaaaaaaccaaaagagtaatattttgtgacatgaaaaattatatgaaattcagatgttgatgaataaagttttattggcacagagcgtgcacatctgctcgcatgctggcttgtggcagggctgaggggctgtgacagccccatatggcccacaaagctgaaaggatttgctgtgaggccctttacataatgcatttgctgatgccagctctaaatatccatatttgcattcagattggtttcagaaataaatatgcgttgaatgcagctgggcctgtgaacgtggtggttgaattcagctgggcctgtgaacttggtcgttgtgtttagaatgtgttgtctttcccaggtgttgtgtgtttgtgctgccgaagctgctgaaggcggcctgtagagggcaggggcccaggcaggcacagtcacttcactggtgtcttggttggtgcttggagcacctcaggagggaatatgtccttaaggaaggaagacaggccagacagaggggcctcggagtgttggcttctaccaggctcctgctgaggtgggcgctcagggagacggctggaggatccgaggagagccaaagccccaggcggtgccctccccttctccttctagagcaaagtcctggcccactgcctgtttaaaagcacttttttccaacaatacacactgtaaaatttgaagaagttttcagtgaacaccgccgctgccactcacctccggagtttgccgtgggcatttgctgtgctggtgccatcacacctggcatcaccccggcctcctggcatcaccccagcctccgtgcttcctgccctgtgctcacccgtcctcctgcttggggtttttattgtaaaatacacagaacgtaaaattgaccatgacagccaccttaacgtgcaccactcgggcacagtccattcacagcgtggtgcctccatcccttctacctgcttccaaacagtccatcccaagaagaaaccggtactcatcagcaggccctccccagcacccacccccagccccggcagccactcagccgcctcctgcctctgcggaccggcctgttccggaggcttaatgagcaaatcacagcctgtgtggcccttgtgtctgcttccttccctcacatgaagctttccagggccgtgcgcggtgtggggtgcccttcctttcgatggttgggtagtgtgccgcggtacgtgcgtgagtttcctgagacataacacgttaccacaggccaggtggccttagcggaaatggattcttgccggattctggaggccagaagtgcaaaatcaaggtgtcagccgggcccctccccctcaggctctccaggaaggtccttgctgtcccctggctggtggctgcgtcactccagtctcggcctcggccttcacccggcatctctactgcatgtctgcgtctctaagggcccagtcataggattgagggcccaccctggcccagcgtgacctcatcttagctcactacatctgcagagaccctacttccaaatgtggccacacccacgtagtacacgccggccgcactttgtcgtctgccgatgggcgctcagggtgctcctgcccttggccactgagtcgtgctgccctggacgctcgtatgcaggcctgcgtgtggacgtaagtttcagtctcttgggtgtacagctaggagtggagttgcagcgtggaactgcagggtcacacgataactgggcttctgggggacagttaccagttgactttgaaatctagacgtgtacagacatacgagggcctgtgtatttatgttgaaaatagatgcacgtgtttagaggccagctcctgcgagcatgcagatgctggtgtcaggctgggaggaggcagacggacacattccccacctgaagaccaagcagaagtggaggcgaaagacagcgtgggctgaccgtggagcggccccatcgtgcacgcacgcaggcgatgctgaggtttgggctggcgtggagcggccccatcgtgcacgcacgcaggcgatgctggggtttggccgagctctgccgctggctgggacacagggtggtgctggcttccacggtccccgacacgctcttggcaccatgggcagctccccaggccagaagcacctgcagaaggcgctcattcctcctccccgtgctcttccctgcagatgggatggggtgacctcggggtgtatggagagccctccagagagaccccgaatttggaccggatggctgcagaagggctgcttttcccaaacttctattctgccaaccctctgtgctcgccatgtaagtcagcggggccctcgcccccaggaaggggtgagcccaacaggccgaggcctcccgggtccttccagccctgactctgggcggctgcatcaaccttgtctattcctactactgcagggagggtggcaggtgggctcaggcctttctcatcaaatcccagcccggctccgtgccatgtggggtgcggcacctgctgggttttcagggtcgaagttgcggtattgttggtggctgctgttctgtttcccagagtcgagtgctgtggccgcctggggagaggtgctgcagtgtggctccgtctcagggtacctgggaagcaggagtcccactccctccctccctggggagagtctctcctgctggagacagaaacatgtggtgttgatcgtgaggaagaggagaaggcagggcacggggctggtgctcgaggatgggggcgtgtggacctgcacgcccagtgggtgtcccaggagcctgcgaaaggaggcggggtcttggggacaacgctgagctgcagggcccaagggccacgcgtctttcagtggaatgggtgccgtgccccacccaggtggtggagacgctaacggggattgacaggcgtggcagccccttgtaaacctgcgcgtgcctcgtctgtcacgcgtctgtctactcgttggggctcttgttgacgcccggggtctgagccacacccttcttatccagtttctgtttctgtcacctccacatagcgagggcggcactgctcacaggacggctacccatccgcaatggcttctacaccaccaacgcccatgccagaaacgcctacacaccgcaggagattgtgggcggcatcccagactcggagcagctcctgccggagcttctgaagaaggccggctacgtcagcaagattgtcggcaagtggcatctgggtcacaggccccagttccaccccctgaagcacggatttgatgagtggtttggatcccccaactgccactttggaccttatgacaacaaggccaggcccaacatccctgtgtacagggactgggagatggttggcagatattatgaagaatttcctattaatctgaagacgggggaagccaacctcacccagatctacctgcaggaagccctggacttcattaagagacaggcacggcaccacccctttttcctctactgggctgtcgacgccacgcacgcacccgtctatgcctccaaacccttcttgggcaccagtcagcgagggcggtatggagacgccgtccgggagattgatgacagcattgggaagatactggagctcctccaagacctgcacgtcgcggacaacaccttcgtcttcttcacgtcggacaacggcgctgccctcatttccgcccccgaacaaggtggcagcaacggcccctttctgtgtgggaagcagaccacgtttgaaggagggatgagggagcctgccctcgcatggtggccagggcacgtcactgcaggccaggtgagccaccagctgggcagcatcatggacctcttcaccaccagcctggcccttgcgggcctgacgccgcccagcgacagggccattgatggcctcaacctcctccccaccctcctgcagggccggctgatggacaggcctatcttctattaccgtggcgacacgctgatggcggccaccctcgggcagcacaaggctcacttctggacctggaccaactcctgggagaacttcagacagggcattgatttctgccctgggcagaacgtttcaggggtcacaactcacaatctggaagaccacacgaagctgcccctgatcttccacctgggacgggacccaggggagaggttccccctcagctttgccagcgccgagtaccaggaggccctcagcaggatcacctcggtcgtccagcagcaccaggaggccttggtccccgcgcagccccagctcaacgtgtgcaactgggcggtcatgaactgggcacctccgggctgtgaaaagttagggaagtgtctgacacctccagaatccattcccaagaagtgcctctggtcccactagcacctgcgcagactcaggccaggcctagaatctccggttggccctgcaagtgcctggaggaaggatggctctggcctcggtcctcccccaaccctgcccaagccagacagacagcacctgcagacgcagggggactgcacaattccacctgcccaggacctgaccctggcgtgtgcttggccctcctcctcgcccacggcgcctcagatttcaggaccctcctcctcgcccacggcgcctcagacctcaggaccctgccgtctcacgcctttgtgaaccccaaatatctgagaccagtctcagtttattttgccaaggttaaggatgcacctgtgacagcctcaggaggtcctgacaacaggtgcctgaggtggctggggatacagtttgcctttatacatcttagggagacacaagatcagtatgtgtatggcgtacattggttcagtcagccttccactgaatacacgattgagtctggcccagtgaatccgcatttttatgtaaacagtaagggaacggggcaatcatataagcgtttgtctcaggggagccccagagggatgacttccagttccgtctgtcctttgtccacaaggaatttccctggacgctaattatgagggaggcgtgtagcttcttatcattgtaactatgttatttagaaataaaacgggaggcaggtttgcctaattcccagcttg

SEQ ID NO: 24161 - DNA, 8511 bp, Homo Sapiens
gccggagccgggccgggccatggccgcctcggagcggctgtacgagttgtggctgctctactacgcgcagaaggacctgggttacctgcagcagtggctgaaggcctttgtaggtgccttcaagaagagcatctcactgtcctctctggagccacgaaggccagaggaggcaggtgcagaggtcccgctgctaccactggatgagctgcatgtgctggccgaacagctgcaccaggctgacctggagcaagccctcctgctgctcaagctcttcatcattctctgcaggaacctggagaacatagaggcaggccggggccaagtgctagtgccccgagtgctggcactgttgaccaagttggtggcggagctgaaaggatgcccaccaccccagggccgaggcacgcagttggagaatgtggccctacatgctctgcttctctgcgagggcctctttgacccttaccaaacctggcggcgccagcgcagtggggaagtcatcagctccaaggagaagagcaaatacaagttccctcctgctgctttgccccaggaattcagcgccttcttccaagagagcctacagaatgcagaccacttgcctcccatactgctgttacgtctcatccacctcttctgcgccgtcctcgctggaggaaaggagaacgggcagatggctgtaagtgatggctctgtgaagggcctgctgagtgtggtgcggggctggagccgtgggccagccccggacccgtgcctagtgccactggctctagaggcactggtaggtgcagtccatgtcttgcatgccagccgcgcacctcctcgtggcccagagcttcgtgccctgcttgagagctacttccatgtccttaatgctgactggccagctggtctgagctcaggccccgaagaggcccttgtcaccctccgggtcagcatgctcgacgccatccccatgatgctggcatgtgaagaccggccagtgctgcaagccaccttcctcagcaacaattgctttgaacacctcactcggctcattcagaacagcaagctgtacctgcagtcccgggcgccccccgagggggacagtgacctggctacccggttactgactgagcccgatgtccaaaaggtcctggaccaagacacagacgccattgcagtccatgtagtcagagtgctgacctgcatcatgagtgactccccctcggccaaggaggtgtttaaggagcgcatcggctaccctcacctgcaggaggttctgcagagccatggtccccccacccatcggctgttgcaagagctgctcaacatggctgtggagggtgaccacagcatgtgcccacctccaccaatccgcaacgagcagccggtactggtgctggcgcagtggctgccgtcattgcccaccgctgagctgcggctcttcctagcgcaacgcctcaggtggctctgtgacagctgccctgccagccgtgccacctgtgtgcaggcaggcctggtgggctgcctgttggagacactcagcacagggctagccctggaggcccgctgccaagagcagctgctggcactgctacaagcactgggccgtgtatcaataaggcccatggagctgcgtcacctgctgcgcccccggccaggattggactcggaaccaggcggagctgaggctggaaaggcccgacacgcaggtgctgtcatccgcacattatcaggcatggccaggcaccagggtcctgcacgtgctctgcgctactttgacctcacgcccagcatggcgggcatcatggtaccccctgtacagcgatggccagggcctggcttcacctttcatgcctggctctgtctgcaccctatggatacagcacctacccctgcccccacccgaccactccagcgaaagcagctgtacagcttctttaccagcagcggctcagggtttgaggccttcttcacggcggccgggaccctggtggtggctgtgtgcacacggaaggagtatttgaccatgagtttgcccgaagtgtcctttgccgactctgcctggcactgcgtggctatcgtccatgtgcctgggcgccggcccttcagccagaacctggtccatgtctacaaagacggccatctggtcaagacagcaccccttcgctgcccctccctcagtgagcctttctcctcctgctgtatcggctccgctggataccgcacaacgaccaccaccacagggctgcccacaccaccagtccccgccaccctggcctacactcaccccgccctcacccgctcccagtcagtcccagcctccacagggcttggctgggggtccgggctggtggcccccctgcaggagggcagcatcgactctaccctcgcaggcacccaggacactcggtggggcagccccacatccctggagggtgagctgggggctgtggccatctttcacgaagccctgcaggcgacggctctgaggaccctgtgcaccctggggcccaatgagacggcacccttcaagcctgagggggagctgcatgagctcagcaccaggctgctcctccattactcacctcaggcttgtaagaacaacatctgcctggacctgtcccccagtcatgggcttgatgggcgcctgacgggccacagagtggagacctgggatgtgaaggatgtggtgaactgcgttgggggtatgggtgccctgctgcccctgctggagcgagtagctgcacagcccaaagaggctgaagcaggtccagctgaaacgcatgacctcgtgggtcctgaactgacctctggtcacaacacccagggcctggttctcccattgggtaaatcttcagaggaacggatggagaggaacgcagtggctgcttttctgctgatgctgcggaacttccttcagggtcacatggtgaaccaagagagcctggtgcagtgccaggggcctgccatcatcggggccctcctgcgaaaggtcccaagctgggccatggacatgaacgtgctcatgtccgcccagctgctgatggagcaggtggcagctgagggcagcgggcccctcctgtacctactctaccagcatttgctcttcaactttcacctctggaccctcagtgacttcgccgtgcgcctcggtcacatccagtacatgtccagcatagttcgggagcacagacagaagctgcggaagaagtacggcgtccagtttatcttggatgctctgcgcacccactacagcccgcagcgggagcgccccctggctgctgacgacctacgcaccgtgcagacctccctcctgggcctggcgagggagttcctggtgcggagtctctcagcagatgacgtgcaggtcacgcagaccatgctgagctttttggcggccacaggcgatgacggtcaggcggtgggtgcgctggacctgctgctggccctgctgcacggttccctggtgcaggagtccttggctgtctttctgttggagccagggaacctcgaagtgctactggccctgctagtgcggccagggtcactgcccctgctgcccgatcgagtctgcaagatcctgcgcagactgcagcagaatgagcggctacctgagcggagccgccagcgcctccggctgcgggagtgtggtctccagggtctggttgcctgcttgcctgaggggactgtttccccccagctctgccagggcctctacaagctgttcctgggggcagattgcctgaacctctcagatctgctggctgtggtacagctgtccctccaggctgacctcagcgttcgcctagacatctgtcgccagcttttccacctcatctacggacagccagatgtagtgcggcttctggcccgacaggctggctggcaagatgtgctgacccggctatatgtcctggaggctgccacagccggcagcccccctccgtcttccccagagtcacctacctcccccaagccagccccacccaagccacccactgagtcacctgctgagccttcagatgtcttcctgccctcagaggccccctgccctgaccctgatggcttttaccatgctctctccccattctgcacgccctttgacctgggcctggaacggtctagtgtaggatcaggcaacactgctggtggtggcggcagcagtgggactcttactccagccagccagcccggcactccttcgccactggatgggccgcggccctttcctgctgctcctggccgccacagctccagtctctccaatgtgctggaggacggcagcctcccggagcccaccattagcggggatgatacctcgaacaccagcaacccacagcaaacctctgaggaagagttgtgcaatctgctcaccaacgtgctgttctcggtgacgtggcgtggcgtggaaggcagcgatgaggctgcctggcgggagcgtggccaggttttctcagtgctcacccagctgggggcctcagccacacttgtgcgcccaccagactgcatcaagcgcagcctcctggagatgatgctggagtcagccctgaccgacatcaaagaggcccccgtgggggtcctggccagcctcacccagcaagcgctttggctgctgcgtctgctgcaggacttcctgtgtgctgaaggccatggtaaccaggaactgtggagtgagaagctctttgaaggtgtatgcagcctacttgatcgcctgggagcctggccccacctggccaacggcacagctgatctccgtgagatggcgcagattggcctacggcttgtacttggctacatcctgctggaagacccacagctgcatgcccaggcctacgtgagattgcacatgctgctacagactgcagtgccagcccgccgcgaggaggcctgctatgtgctctccaagctggaggctgcactggggcgggtgctgaacacctcttctttggagtcagccactgatgaggcagggtccccacttgcagctgcagcagctgcagcagctgcagagcgctgctcctggctggtgccactggtgcgcacgctgctagaccgtgcctatgagccgctggggctgcagtggggactgccctccctgccacccaccaatggcagccccaccttctttgaagacttccaggctttttgtgccacacccgaatggcgccacttcatcgacaaacaggtacagccaaccatgtcccagttcgaaatggacacgtatgctaagagccacgaccttatgtcaggtttctggaatgcctgctatgacatgcttatgagcagtgggcagcggcgccagtgggagcgcgcccagagtcgtcgggccttccaggagctggtgctggaacctgcgcagaggcgggcgcgcctggaggggctacgctacacggcagtgctgaagcagcaggcaacgcagcactccatggccctgctgcactggggggcgctgtggcgccagctcgccagcccatgtggggcctgggcgctgagggacactcccatcccccgctggaaactgtccagcgccgagacatattcacgcatgcgtctgaagctggtgcccaaccatcacttcgaccctcacctggaagccagcgctctccgagacaatctgggtgaggttcccctgacacccaccgaggaggcctcactgcctctggcagtgaccaaagaggccaaagtgagcaccccacccgagttgctgcaggaggaccagctcggcgaggacgagctggctgagctggagaccccgatggaggcagcagaactggatgagcagcgtgagaagctggtgctgtcggccgagtgccagctggtgacggtagtggccgtggtcccagggctgctggaggtcaccacacagaatgtatacttctacgatggcagcactgagcgcgtggaaaccgaggagggcatcggctatgatttccggcgcccactggcccagctgcgtgaggtccacctgcggcgtttcaacctgcgccgttcagcacttgagctcttctttatcgatcaggccaactacttcctcaacttcccatgcaaggtgggcacgaccccagtctcatctcctagccagactccgagaccccagcctggccccatcccaccccatacccaggtacggaaccaggtgtactcgtggctcctgcgcctacggcccccctctcaaggctacctaagcagccgctccccccaggagatgctgcgtgcctcaggccttacccagaaatgggtacagcgtgagatatccaacttcgagtacttgatgcaactcaacaccattgcggggcggacctacaatgacctgtctcagtaccctgtgttcccctgggtcctgcaggactacgtgtccccaaccctggacctcagcaacccagccgtcttccgggacctgtctaagcccatcggtgtggtgaaccccaagcatgcccagctcgtgagggagaagtatgaaagctttgaggacccagcagggaccattgacaagttccactatggcacccactactccaatgcagcaggcgtgatgcactacctcatccgcgtggagcccttcacctccctgcacgtccagctgcaaagtggccgctttgactgctccgaccggcagttccactcggtggcggcagcctggcaggcacgcctggagagccctgccgatgtgaaggagctcatcccggaattcttctactttcctgacttcctggagaaccagaacggttttgacctgggctgtctccagctgaccaacgagaaggtaggcgatgtggtgctacccccgtgggccagctctcctgaggacttcatccagcagcaccgccaggctctggagtcggagtatgtgtctgcacacctacacgagtggatcgacctcatctttggctacaagcagcgggggccagccgccgaggaggccctcaatgtcttctattactgcacctatgagggggctgtagacctggaccatgtgacagatgagcgggaacggaaggctctggagggcattatcagcaactttgggcagactccctgtcagctgctgaaggagccacatccaactcggctctcagctgaggaagcagcccatcgccttgcacgcctggacactaactcacctagcatcttccagcacctggacgaactcaaggcattcttcgcagaggttgtcagtgatggtgtacccctggtgctagccctggtcccccaccggcagccccactccttcatcacccagggttccccagacctgttggtgactgtgagtgccagtgggctgctgggcacccacagctggttgccctatgaccgcaacataagcaactacttcagcttcagcaaagaccccaccatgggcagccacaagacgcagcgactgctgagtggcccgtgggtgccaggcagtggtgtgagtggacaagcactggcagtggccccggatggaaagctgctattcagcggtggccactgggatggcagcctgcgggtgactgcactaccccgtggcaagctgttgagccagctcagctgccaccttgatgtagtaacctgccttgcactggacacctgtggcatctacctcatctcaggctcccgggacaccacgtgcatggtgtggcggctcctgcatcagggtggtctgtcagtaggcctggcaccaaagcctgtgcaggtcctgtatgggcatggggctgcagtgagctgtgtggccatcagcactgaacttgacatggctgtgtctggatctgaggatggaactgtgatcatacacactgtacgccgcggacagtttgtagcggcactacggcctctgggtgccacattccctggacctattttccacctggcattggggtccgaaggccagattgtggtacagagctcagcgtgggaacgtcctggggcccaggtcacctactccttgcacctgtattcagtcaatgggaagttgcgggcttcactgcccctggcagagcagcctacagccctgacggtgacagaggactttgtgttgctgggcaccgcccagtgcgccctgcacatcctccaactaaacacactgctcccggccgcgcctcccttgcccatgaaggtggccatccgcagcgtggccgtgaccaaggagcgcagccacgtgctggtgggcctggaggatggcaagctcatcgtggtggtcgcggggcagccctctgaggtgcgcagcagccagttcgcgcggaagctgtggcggtcctcgcggcgcatctcccaggtgtcctcgggagagacggaatacaaccctactgaggcgcgctgaacctggccagtccggctgctcgggccccgcccccggcaggcctggcccgggaggccccgcccagaagtcggcgggaacaccccggggtgggcagcccagggggtgagcggggcccaccctgcccagctcagggattggcgggcgatgttaccccctcagggattggcgggcggaagtcccgcccctcgccggctgaggggccgccctgagggccagcactggcgtct

SEQ ID NO: 24162 - DNA, 3070 bp, Homo Sapiens
atcccggtggccacggccgccgcgctgctggtcggctccagcaccctcttcttcgtgttcacgtgcccgtggttgacacgagctgtgtccccagctgttcccgtctacaatggcatcatcttcctctttgtcctggccaacttcagcatggccactttcatggaccctggtgttttcccccgagcggatgaggatgaggacaaggaggacgacttccgggctccgctgtacaagaacgtggatgtgcgaggtatccaggtccgcatgaagtggtgtgccacgtgccacttctaccgcccgccgcgctgctcccactgcagcgtctgtgacaactgtgtagaggactttgaccaccactgcccctgggtcaacaactgcatcgggcgtcgaaactatcgctacttcttcctgttcctgctgtcactcagtgcacacatggtgggcgtcgtggccttcggcctggtctacgtgctgaaccacgctgaggggctgggagccgcgcacaccaccatcaccatggctgtcatgtgtgtggccggcctcttcttcatccctgtcattggcctcactggcttccatgtggtgctggtcactcgggggcgcaccaccaacgagcaggtgactgggaagttccgcgggggtgtgaaccctttcacccgaggctgctgtgggaatgtggagcacgtgctgtgtagccccctggcgccccggtacgtggtggagccaccccggctgccgctcgcggtgagtttgaagccgcctttccttaggcctgaactcctggaccgagctgcaccgctcaaggtcaagcttagtgacaacgggctgaaggctggcctgggccgtagcaagtccaagggcagcctggaccggctggatgagaagccactggacttggggccaccactgccccccaagatagaggctggcacgttcagcagtgacctgcagaccccgcgcccaggcagtgctgagagtgccctgtcggtgcagaggaccagccccccgacacctgccatgtacaagtttaggccggctttccccacgggtcccaaggtgcccttctgtggaccaggcgagcaggttccaggccctgattccctgaccctgggggacgacagcatccgtagcctggactttgtgtccgagccgagcctggacctccctgactatgggccagggggcctgcatgcagcctacccgccatccccaccgctcagcgcctctgatgccttctcgggcgctttgcgctccctgagcctcaaggcctcgagccggcggggcggggatcatgtggccctgcagcccctgcgctctgagggggggccccccacgccccaccgtagcatttttgccccccatgcactgcccaaccgcaacggcagcctgtcctatgacagcctgctcaatcctggctcgcctggtggccacgcctgccctgcccacccagcagttggcgtggccggataccactcaccctacctgcatcctggggcaacgggcgacccgccacggcccctaccccgcagcttcagccccgtgctgggcccccgcccccgggagccctcgcctgtgcgctacgacaacctgtccaggaccatcatggcatccatccaggagcgcaaggacagggaggagcgtgagcgcctgctgcgctcccaggccgactcactcttcggcgactcaggcgtctatgacgctcccagctcctacagcctgcagcaggccagtgtgctgtccgagggcccccgaggtcccgcgctgcgctatggctccagagacgaccttgtggctgggcccggcttcggtggcgcccgcaaccctgccctgcagacgtcactgtcctcgctgtccagctccgtgagccgtgcaccgcggacgtcgtcctcctccctgcaggctgatcaggccagcagcaacgccccggggccccggcccagcagtggctcacacaggtcacctgcacgccagggcctgccctccccgcccggcactccccactcaccatcctacgcgggccccaaagctgtcgccttcatccacacggacctcccagagccaccgccctcgctgaccgtgcagagggggcggattggcacctgcacccgtggatgggggcggcgtggccagccttgggtgcctcctgggctgcacctgtgccaccttggccgcccggaggaccgcccaccactgcgggccccctggagccaggccgccggggcacccccacgcggggccatgtgccgcctgcacttggctgcctccagtcttttccccagcctctcggggccctagcaggatgacaagtaggcggctctggggcccaggacagcccagctggggacccaggaggtcagactgcagtggaccctggggcagggctgggggtgggctgggctctctgctccaccagccacagcttgacagattcccagcctgccagggcctgagaccctgtgtccacatgacctcagggagtcccccacctgctgcagggggtccagcaccccacaggggggcagtcccagagctgtggggaccggcacgacctttgcccagcctccctacccaaccaagcactttagactaagccacttcctcctcggggagcccaggcctccgtgggttgggctgggtggggggggggtctcaggttgcccctgaaggtctctgcactcctcctgcccttcccctgacacatgaacagatgccttaacttcctggagccaccagcctggtgagccattggcctctgcctgccaccaaggtcctgtggtcttggccagctccgcctgggccccactggggctgcctgcacccagagacgatgccggcgggatctcagagggcctgaggcccaagccctgtgtcctccagcagtggtacggcctgcggcagggtggcactccggccagcccttctccgtcacagggtccctgtccctgggtccaccctgggctgtggctctacatctcccatttggggacgagaaagccacaaaaccattctctattgttcttaagggtacccctgctaattaattccccaaataaaatttttggtgttgatc

SEQ ID NO: 24163 - DNA, 2459 bp, Homo Sapiens
atctctggctggggcctggagtggggaacggtgcatggggccgacgagtgtcctccgggctggactcactccttcctgtctccccccacccagtggtgctacaaacgggtctgtgtcccctttgggtcgcgcccagagggtgtggacggagcctgggggccgtggactccatggggcgactgcagccggacctgtggcggcggcgtgtcctcttctagccgtcactgcgacagccccaggccaaccatcgggggcaagtactgtctgggtgagagaaggcggcaccgctcctgcaacacggatgactgtccccctggctcccaggacttcagagaagtgcagtgttctgaatttgacagcatccctttccgtgggaaattctacaagtggaaaacgtaccggggaggcctgctcgctcacgtgcctagcggaaggcttcaacttctacacggagagggcggcagccgtggtggacgggacaccctgccgtccagacacggtggacatttgcgtcagtggcgaatgcaagcacgtgggctgcgaccgagtcctgggctccgacctgcgggaggacaagtgccgagtgtgtggcggtgacggcagtgcctgcgagaccatcgagggcgtcttcagcccagcctcacctggggccgggtacgaggatgtcgtctggattcccaaaggctccgtccacatcttcatccaggatctgaacctctctctcaatcacttggccctgaagggagaccaggagtccctgctgctggaggggctgcctgggaccccccagccccaccgtctgcctctagctgggaccacctttcaactgcgacaggggccagaccaggtccagagcctcgaagccctgggaccgattaatgcatctctcatcgtcatggtgctggcccggaccgagctgcctgccctccgctaccgcttcaatgcccccatcgcccgtgactcgctgcccccctactcctggcactatgcgccctggaccaggtgctcggcccagtgtgcaggcggtagccaggtgcaggcggtggagtgccgcaaccagctggacggctccgcggtcgccccccactactgcagtgcccacagcaagctgcccaaaaggcagcgcgcctgcaacacggagccttgccctccagactgggttgtagggaactggtcgctctgcagccgcagctgcgatgcaggcgtgcgcagccgctcggtcgtgtgccagcgccgcgtctctgccgcggaggagaaggcgctggacgacagcgcatgcccgcagccgcgcccacctgtactggaggcctgccacggccccacttgccctccggagtgggcggccctcgactggtctgagtgcacccccagctgcgggccgggcctccgccaccgcgtggtcctttgcaagagcgcagaccaccgcgccacgctgcccccggcgcactgctcacccgccgccaagccaccggccaccatgcgctgcaacttgcgccgctgccccccggcccgctaggtggctggcgagtggggtgagtgctctgcacagtgcggcgtcgggcagcggcagcgctcggtgcgctgcaccagccacacgggccaggcgtcgcacgagtgcacggaggccctgcggccgcccaccacgcagcagtgtgaggccaagtgcgacagcccaacccccggggacggccctgaagagtgcaaggatgtgaacaaggtcgcctactgccccctggtgctcaaatttcagttctgcagccgagcctacttccgccagatgtgctgcaaaacctgccagggccactagggggcgcgcggcacccggagccacagctggcggggtctccgccgccagccctgcagcgggccggccagagggggccccgggggggcgggaactgggagggaagggtgagacggagccggaagttatttattgggaacccctgcagggccctggctggggggatggagaggggctggctatccccccagagcccctcttcagcatccgccccttccagttcacatagtgagacccccccctccagggtgggtctggggaggggacagctgttcaccccagcaccctttgaacccacccttagggagtccccaacactccccccctcctttgatcggaatatgtactgtgaagagtaggggtggggaggtggtctgccggtgccctgccccccagcactgccctacccctccactccgagctgggggggaatctgtgtctgctatgggaggggggggggtagcaccacctccctgacaccctcccctgacctgactagggggaggatccaccccaacctctgccctgcccgccccaggggcaccccgacatccaggccaccccctcatggtgctacagaccctgccctggggcccacacactcctgccaggaagccctacatcaataaagttctgtcttgtgtagatttctacg

SEQ ID NO: 24164 - DNA, 5878 bp, Homo Sapiens
ggccagccctcggtacctgcagcccggcggggagcagctggccatcaatgagctgatcagtgatggcaacgtggtctgcgcagaagccctgtgggaccatgtgaccatggatgaccaggaactgggcttcaaagccggggatgtcatccaggttctggaagcctccaacaaggactggtggtggggccgcagtgaagataaggaagcctggttccccgcgagcttcgtcagattgcgagtgaatcaggaagagctgtcggaaaactccagcagcacccccagtgaggagcaggacgaggaggccagccagagccgccacagacactgtgagaacaagcagcagatgcggaccaacgtcatccgggagatcatggacaccgagcgggtgtacatcaaacacctcagggacatctgtgagggctatatccgacagtgccgcaagcacacaggaatgttcaccgttgcgcagctagccactatttttggaaacattgaagatatttacaaattccaaagaaagtttctgaaagaccttgagaaacagtacaacaaagaggaacctcacttaagtgaaataggatcttgctttcttcaaaatcaagagggctttgccatctattccgagtactgcaacaaccacccgggcgcctgcctggagctcgccaacctcatgaagcagggcaagtacagacatttctttgaagcctgccgcctgctgcagcagatgattgacatcgccatcgacgggttcctgctcacaccagtgcagaagatctgcaaatacccgctgcagctggccgagctgctcaagtataccacacaggaacacggtgattacagcaacataaaggcagcatatgaggccatgaagaatgtggcctgtctgatcaacgagcgcaagcgcaagctggagagcatcgacaagatagctcgctggcaggtgtctatcgtgggctgggagggactggatatcttagaccgaagctcagaattgattcattctggggagctgaccaaaatcactaagcaaggcaaaagccagcagcggacgttcttcctgtttgaccaccagctggtgtcctgcaagaaggacctgctgcgcagggacatgctgtactacaagggccggctggacatggatgagatggagcttgtggacctgggggatgggcgcgacaaggactgcaacctcagcgtgaaaaatgccttcaagctcgtcagtaggaccacagacgaggtttatttgttttgtgccaaaaaacaagaagacaaggcgaggtggctgcaggcctgtgcagatgaaaggaggcgggtgcaagaggacaaggagatgggaatggaaatttcagaaaaccagaagaaacttgccatgttaaatgctcaaaaggcaggacatggaaagtcaaaaggctacaacaggtgccccgtggccccaccgcaccagggcctgcaccccatccaccagcgccacatcactatgcccacaagcgtcccccagcagcaggtctttggcctggcggaacccaagaggaagtcctcgctcttctggcacaccttcaacaggctcacccccttccggaaatgaaaacaggaggctgtgcttccatggagctgggtgtcaagagaagaactgtctttgtttcttgtgtgcttcaatccagggaaagtttcttggacccagtgataaaaacttccttttagggatcaatgaaggagagaaggtcttggaatcaccttcagtctttggagacccagctgcctttgtggaagggaggagacggtcatgacacaaagctttatcctacacagaaacacccgtgacccgctatgagatggcccagatgtgggacccagtaccatgctctaaagcgagtgattaggcagcagctgaagccacccctgctgatgatgagcaagtgcctgctgcaggtccaaacacagcatccagggctttgcagttcctaaggagtgatgaggttaggggatcacttctgcatttgattttcaaggatgccgtcaagacggggttgacacaatgctgcacgtgtctggtcacacttagaaattgagctcttactctcttctgtaatactgggggacctacagctgccgtggagccgaccacggtgttccctggcatcgtctgtgtccacacagatgctaactggtagtgcaaatgtcatcctgcaaggttcctcttcctgcaagcaaagtggagagaaacaagatgcatctgtcaccttcatcagggtcctcagtgcagagcaacttacgcatcctcaagaatccactgcttttcaggcaaggagggagaaatcctgctgcacactggctttgtcccggagtcggattccctcctgcctgcacgccttcagtaactccgagcagaaatcacatcttgcccacatgctgtaacctaagaaactgctatgcaaggctgggtgctgtggctcatgcctgtaatcccagcactttgggaggccaaggcaggtggatcacctgaggtcaggagttcgagacaagcgtggccaatatggcaaagcccagtctctactaataatacaaaaattagctgggcatggtggcgcatgcctgtaatcccagctactgggaaggctgaggtaggagaatcttttgaatctgggaagcggaggttgcagtgagctgagatcgcaccactgcactccagcctgggagatacagcgagactgtctccaaaaacaaaaacaaaaacaaaaaacattcaaacaactgtttgcaatataaaaagctcatttactgtaatatttatgatacagtgaatatgaaaatgcactggtcagaaggcactctcaaagagccgcactgctcctgacatcgtccttagcaatgaaatcacaaagacagccaaagcagtcctgcttcttggaaatcagaagctgcctttatcacatataaagccaaacagggcataaccatgtcacgtgagcatgtcatcaggcttctgaggacttgttctttataaaaaaagaccttcacaaaatatcttggcttagagatagcagtctttattaacaaaggccacctaggctgacacctgcagataatcatctccttttctttgtctatgttgtacattttcatgatataacttttaactatgtctagagaaggcaggctctgcaagagaggtgccctttcaacccgctcagtgccctggacaggagatgctgtgttaaactgttaatggatatctatatgagaagctcatttttgtatgctatccctgcagtttttttttttctaacaggcccatgtttgagaataaacaagtctgtgatgtcagagacaaaggtgtattcttcagtctgcaggtgtgtggcacctcccttctcccctgcagccccccacatccagagccgttcctgagagtgacatcatgcatcaagaaaacataaccttggtcctcaggtgaacccttggaacattctgtgaccgcctgatgtccattctgagccaccttggcacacatgcttacaggcagcactgctaagggttcaggtgccccatggctgacagcccgagttgcttctgtggaccatcatgccgctcggcacgtcctgagacagaagttgctgcaggaaggagcttctggagaggtcctgtggcatgtgtgggggtgtgtgtgtgtatgtttccttcttgaacagacattccaactttagatgtgtttatagaactgacctttttactaacaaaatacaatgatatatgttggaaactacttaatatgcttttcctgcacaccttagcaataactgtaggggtctctgctagagttgtttgtatgtacagcaattttgaacaaattgttttaaatgtaatataagagaattagtttaaggaagtaaagagaatcatttgcttgtgttacattttcagtgaggattcagtttaagagtcattcttaggacttccatttcctaatatttattcatgggtaatgaagaaatggtttgcattttgtggccagtcctaatttattttccagctgagccctaacttccggctcccacctacctccacggacttcctaacagagacttatgaataccaggatgtgtttttgttaagtcaggttcaattcgttgcccctgtcagttttatagagtgtgagggtcactccattaaagatctctcctgggtggatcctacttggatgttcaggtgattttgaaaactgctaacatttttaaaaggctagaacatcctttgacttcttgaaaatctgcatgtctggcttgggttttattaccacatgcctgagttcttcaagaatggaaggctcaagtattctcatcttccatttgccaaacttccttcctgatttgagtcacatgttccacttggaaagaaagggaacagagagcctcctccatggacagtgtatgaatttcattgggaatcttgctctctcccgcctctatgcctttctctctttttaaccttactttacataatattatagatgggccaagaaaagaaaagatgacataacattttgatgaatttcacctattccattcttcacgtttcagaattggtcgactttgttagaagataattgaagtagccttgggtcaaaagcaaccttttcaattgtgatcatacctaaaacatataaaaaccctgccgtagattaaaagcaattataaaatcataaaattgaatgtttgcagaatcctggagcagtagatttctttgtctttggcctgcggactagaaagagggcagcagtagtatgctggagcttccctgggataccagccacatggtttcttttcattagatctgatttttgtttcccactgtagatctgattttgtagttgaaaacatttcaccaccatcaaacactatttctgaatattgtgcctttttatacctagcctagatgaaaaccgatgccattcttattcagaaaatccccccatcctacatgactgttatctagacataaagcaaagtgcatttaattcaaaatttggttcacaatataagtattttgtaaaagccagctgaaccagcattttatcaggtggaaatctctgcaagccaaattgctgatactccttcatgcagatcaacttggtgtcccagtcagaatagaacagcataattacctggagttagggggagtatttctgcactattacttgtcagggagagaagaaacttagaattgtccctcaaaggagtgtcaagaagtatgaataaatgtcctttcaccagctcacaggccagaaatggaggacccaagtcaactaggtgaaactactagcagacccagctttcccataataacctaatctgcaaattgttctattaaagtctcattgttttcaggatgcaatgaaagtggatttcaaaaggctttggaaaaataagtggaacatgactgatcttgaaaaaaaaagcaaaagcttaaatatttgatacaagtttacttagctacaacatactttacattgttgcctttagttatctcacaggcactgacattttatatttagaaaatacttttaatctttctaatctttttttgtaaatattagtgtccattctgtatgactcgctaacctactttgcaaggctttgggcaacattttagctcattaacttcaagatgatgtgtcatctgtataggtcaaagaatgggacttctgaactgaggaatttgctgttgacagccaaagtatagtgtacaagattgatgtaacttgatatgtatttttgttgaagttttttgtaaaaaaaaattatttacaatgttatttgaatgatttttttaaatgctgtgaatctatatttgttgttttatatattaaaattcatttgcc

SEQ ID NO: 24165 - DNA, 5381 bp, Homo Sapiens
gaggcctcactttttaagaaactcccccactccacccctgccaatgaggacattgcttagaggtatttctatcagtgttgagtagaagagatcatttcttggtgttgaatttcaggtaaggatgccagcttctgcatatcagggtggtgatgtttgggctgcgacaggtctagacagcagtctgaaagggggctcaaggaagtagctgtgaaaggcccctgggatgttttctgctcccctttctgcaaatcccctggagggagatcctgttagtcactacgggatgtgtgtgtgtgtgtgtgtgtgtgtgtgtgtgtgtgtgtgtgtgtgttcatcacttgttgcttggggtgggaagagacaacaacaacctacagaatccatagttctcagttcatctcccatcctagtccaatcatggcctaacatccttagctaccgatcgcagaggagactgcgcatttgtgttcatgtggccttggatgttggcagattcagattggtgccccaggcatctgtgctgtaactgcagtttcagcgggctcaggaccaggctaaagggcctccaagcttcctccagtttcctggtgcatgcatgtgcaatatgctcccctggcctgggtctttcctgccgcttcttgccagttgggtcagaactagcttattaaccagtttttcttctgagctttaatcgaactggctccaaccagttggaggcttgaaaagggctacgtgctagttatagatttttaaagatatattattattttagagtagttttgagtgtacagcaaaatggagtgcagagtccagagatctcatatgccctcaattcctgtatactctcgggtcactccaccaacaacctcctacaccagagccactttgaaacattagaaaatatatttgagcattcagaaatgtataaactaggcagccccagactgcaagcagctcagaggtcccacagagaggcttagggagggtgggggaagaattttatatggtgaatgtggaagaaaaagaaaatacttgattgggtgaagtggagcagtggcctcatttggaacattacagtggaaggtctctagttagatgttagttggtggtttctgattggttcttacatttccttttattatttacactgagtcaagttttggtttatttaaggaggaattgagtgcacggcagccacctcagcctcatggccacctgtttatttgattatttttaacagagaagatccttttaaaaatatctgttaccgtggctggagtgcagtgacgtgatcacggctcactgcagccacaaccttccggctcgggtgatcctcccacctcagtgctccccaccctgagtggctgggactacaggcatgtgccaccacaccaccatgctaggctaatggtttgtgtttgtttgagagatgcagtttccctaggttgcttaggcttcttttgaactcttagactcagatgatctgcctgcattggtctccccaagtgctggaattacaggccatctaaatcttttatctcaggtttgccttgtgacaaaaggtggggtactttttctgacatgatgaggcagagaaaggtgaggtgggtgcatcctgtgcatatgattttctcaggtgatgggaatatggtgggctcttgcctaatgggatatattttctctttgaatgatttggcaagatatcagatgagagaagttgaataaatgttagaagaacatagaaaaaataggttatacacattgggtttctgaagaaatgatgtcattggagaaacaaaacttttattgatttctggaaacatttagggccaattttttgtgtaagtaatttgaatttatgatgatatctctgaccactttttgatattttttctggttcaggtgagtggtgtcattgagcaaacacaaagtcgggctcatccaaggatgagattttgccagagaaaggatgagcagcaagtcagggagcttaaggtaattatgagacagtgactatctaaaattgcttaggtagaaggagacagattggatttttgtgtgtttggtatttgggataagagggatgtgggtgtgtacttgagatgtgttgtttattttctctcttttttctttttttttttttgagagggagtctcactctgtcacccaggctggagtgctgtggcacggtcttggctcactgcaacctctgcctcccgggttcaagggattctcctgcctcagcctcccgagtggctgggattgcaggcgcctgccaccacgcccggctaatttttgtgattttttttttagtggagacgagatttcactatgtgggcgaagctggtctcgaactcctgacctcagatgatccacccgcctcggcctcccaaagtgctgggattacaggcgtgagccaccgcgcctggcctgtttattctcttaagagagaaaatgaggggattaatggactgtagttctggacaaggtggaaaactcttaaagtggaagtactggggcaagtgctctgacagggtaggatggtgcagtcagtcccttcacccagaaatcagtagaatgttagcagttcagactcaaaccttgtgaaaaacaggtggtggaaaggaaatccctcacagcaactggcaccataatcaagacaatgtttacaggataaatggagttacctgctttcagccccaggtcgtagctattgtctgccctgctgatatgtgataataatttgtgatcctgttgtcttaaaatggggtcactcatctccagtagaattaagtccacagtgaagttgtccccccatccccaaagagataaacatatatgaatgaactcacgtgataacaactactgctgcctgggatcatgagagacctgaactgaactgataggaagtgaaaggtggctgagataatgagaatagacccatctgcagaggatcataaaaccagcaaagacaagatcttgtctaagatgccttcacaagctttgtccatgagaactcttaaggatttcaccagacctgttggctgctgctgtgatctctgcccaagaggagcctctgaccaacatccaaagggcttctggacccactggactcctctggagcgtcagcctcgagtttgaccagcagcaggggtcggtgtgtccctctgaatctgagatctatgaggcaggagctgaggacaggatggcaggagcgcccatggctgctgctgtacagcctgctgaggtgactgttgaagttggtgaggacctccacatgcaccaggttcgtgaccgggagatgcctgaagctttggagtttaacctttctgccaatccagaggcaagcacaatattccagaggaactctcaaacagatgctttggagtttaactcttctgccaatccagaggcaagcacaatattccagaggaactctcaaacagatgttgtagaaataagaagaagcaactgtacaaaccatgtatctactgagcgtttcagtcaacaatacagctcgtgttcgacaatattccttgatgacagcacagccatccagcattatcttacaatgacaataatatctgtgaccttggagatacctcatcatatcacacaaagagatgcagatagatctttgagcatacctgatgaacagttacactcatttgcggtttccaccgtgcacattatgaagaaaagaaatggaggtgggagtttaaataactattcctcctccattccaccgactcccagcaccagccaggaggaccctcagttcagtgttcctcccactgccaacacacccacccccgtttgcaagcggtccatgcgctggtccaacctgtttacatctgagaaagggagtgacccagacaaagagaggaaagccccggagaatcatgctgacaccatcgggagcggcagagccatccccattaaacagggcatgctcttaaagcgaagtggaaaatggctgaagacatggaaaaagaaatacgtcaccctgtgttccaatggcgtgctcacctattattcaagcttaggtgattatatgaagaatattcataaaaaagagattgaccttcggacatctaccatcaaagtcccaggaaagtggccatccctagccacatcagcctgtgcacccatctccagctctaaaagcaatggcctatccaaggacatggacaccgggctgggtgactccatatgcttcagccccggtatctccagcaccaccagccccaagctcaacccgcccccctctcctcatgccaataaaaagaaacacctaaagaagaaaagcaccaacaactttatgattgtgtctgccactggccaaacgtggcactttgaagccacgacgtatgaggagcgggatgcctgggtccaagccatccagagccagagtgaggccatggccctgcagtcgatccaaaacatgcgtgggaacgcccactgtgtggactgtgagacccagaatcctaagtgggccagtttgaacttgggagtcctcatgtgtattgaatgctcaggtatccaccgcagttttggcacccgcctttcccgtgtgcgatctctggagctggatgactggccagttgagctcaggaaggttatgtcatctattggcaatgagctagccaacagcatctgggaagggagcagccaggggcagacaaaaccctcaataaagtccacgagggaagagaaggaatggtggatccgttccaaatatgaggagaagctctttctggccccactaccctgcactgagctgtccctgggccagcagctgctgcgggccaccactgatgaggacctgcagacagccatcctgctgctggcacatggctcccgtgaggaggtgaacgagacctgtggggagggagacggctgcacggcactccatctggcctgccgcaaggggaatgtggtcctggagcagctcctgacggggtggacgtcatggcccgagatgcccacgggaacacagcgctgacctacgcccggcaggcctccagccaggagtgcatcaacgtgcttctgcagtacggctgccccgacgagtgcgtgtagtatctgttttatttgactgcagtctccttggtgcaaaaacaaaatgggaaaaataaggataactcagaatttcaaaaggaaatcacaaattcagctagtaatagcattttcagtacttttcgtaaactaagtaaatacacaaaatgttgatttttctgaccataagacatattttatgtccttttgccaaggtggatgtgttagtctcaggccctcctggccacattgcccaagtcacacaggcttctgtattatgtatttagataaaatgtgtgaaaatatatttgaaaaaaaatttc

SEQ ID NO: 24166 - DNA, 4845 bp, Homo Sapiens
accactttgtaatgtgggttttcaaccttggctgcacgttgcaatcacctggggatcccccgcaaccgcctgacaaagattctgatgttattggtctgaggtgctgcctgagaattggtgtttccaaagctcctctggtgttttgtgtttttctagcacaagaaaagttgtgagtcactgtagtgcaatacagttcgatcacaattgccacaattgtgtagggtccatcagaaccacctgaagggcttcatagaccacagctggctaggagctacccctaggcttctgattcagcaagtgagaggcagagcccaaggctgtatatttctaacaagttccaggtgctgctgctgctggtccagagaccactgcattagaggccagagttctcaactattgactgcacattagaaccatctggacaatatttaagacatactgatgcctatacaccaacccagactaactgaatcaaaatctctggtaatggggctccagagatgttttttaatgctcccaggggattctactgtagagcaagttgagaaccacttgtaaacaaaagaaaaaaattcttactaaaaaggttaaagagacatacaccaagtttgcaggctttctagacaatggaacttcaaacataggatttgcctgtggtatttattctttcttggggcccacttgcagtgtactttataggatgatgtatcagaaaccttgacccagcagcctaaaaatagcggtcagcatcgatgagtctcatctgttacaacaaaaaggaaaaacagttacaaggccccactccaggggaagctcaggcaccccccttggagatgtgcccaagaaatggctcctaataggccactcaaattctgccattgaaagggaacacatgggcaagatatatcttgcagcctagaattgtttttatttatgtgactttagtctcttctttgtatagtgactttgtagaggaagagaaattacaacaccttacatgcctaagtcatggggactcttcctccaggttcccagagcaaaaagcaaaaagccctgtactccctggtgcccacctggtcatcttgcccacggtttttccatcccagaggtactgctgcaggcccagagccctccaggaaaagaactgacatctaggaactcctcccccaagccctttcttcaactcattcttgctatgacaagagtgtgggttgcagtgatatctcagaagtttattccatcatattaaattctcagtaaatcaccctttggcaagtcagtttaaaggatacgatgtagacagctagaaaagacactatttctgggccaggttttcccagctgtttaataaattgctcaaaaaatctctaattcatcctatttttgtcactagtcatcatgtcagaatctctggtttcataaagaaaacttttctggcctgacacacagccactatctactgaactttgccgcagaccaaaatgtcttctgagatctccactcagcaatctttaatattttgaggacagaaatttacaagtgtgcccttgatacataaaaaggtcacatattctagggtccaagggtctcactgatcccggtgatgtctacatctccccttctagccggaaaactcaaatatatgtgaggtgtgcaacaaatggggacggctgttctgctgcgacacttgtccaagatcctttcatgagcactgccacatcccatccgtggaagctaacaagaacccgtggagttgcatcttctgcaggataaagactattcaggaaagatgcccagaaagccaatcaggtcatcaggaatctgaagtcctgatgaggcagatgctgcctgaggagcagttgaaatgtgaattcctcctcttgaaggtctactgtgattcgaaaagctgctttttcgcctcagaaccgtattataacagagaggggtctcagggcccacagaagcccatgtggttaaacaaagtcaagacaagtttgaatgagcagacgtacacccgagtagaagggtttgtgcaggacatgcgtctcatctttcataaccacaaggaattttacagggaagataaattcaccagactgggaattcaagtacaggacatctttgagaagaatttcagaaacatttttgcaattcaggaaacaagcaagaacattataatgtttatttagctattcttatctcctcccttcagatcctctggcagctagctacgcaatgtgcctgtggtcccactaatctgtgactgctcctgtggaaactccacatcacaattctccaaaatttatcattgccattttaaaaccgtcttttcagctttcaataaaattcaacaccccttcatgttaaaaattctcaataagctaggtattgaaggaacatatcccaaaataataagagccatttatgacaaacccacagacaacattatatggaatgcgcaaaagaagcattccccttgaaaacaagcacaagacaaggattccctctctcaccactcctattcaacaaagtattggaagtcctggtcagagcagtcaggaagcagaaaaaaataaagggtatctaaataggcaaagaggaagtcaaactatccctgtttgcagacaacattgattctatatctagaaaaccccctagtctcagcccagaagctccttctgctgataaacaatttcagagatgtttcagaatacaaaattagtatatgaaaattactagtattcctatacaccagcaatagccaagccaagagccaaatcaggaaggcaatctcattcacaattgccacaaaaagaataaaatacctaggaatacagctaatcagggaggtgagagagttctacaatgagaattatgaaacactgctcaaagagattggagatgacacaaacaaatggaaaaacatcccatgctcctgtgtagaaacagtcaatatcattaaaatgaccatactgcccaaagcagtttacaggttcaatgttattcctatcaaaccaccaatgacattcttcacagaactagataaaactattttaaaattcatacagaaccaaaaaagagcccaaatagccaaggcaatcctaagcaaaaagaacaaagctgaaggcatcacgttaccccacttcaaactatattacagggcttcagtaaccaaaacagcatggtactggtaccaaaaaaaaagccacatagaccaatggaacagaacgaagagcacagaataagaccacactcctatgaccatctgatcgtcgataaaaacaagcaatgggaaaaagactccctattttataaatggtgctgggataactgggatagaagattgaagctagacctcttccttacaccatatacaaaaatcaactcaagatcaattaaagacttaatgtaaaatcaaaaactatgaagactctggaagacaacctaggcaataccatcctggacataggaacaggaaaagatttcatgataaagacaaaagcaatagcaacaaaagcaaaatttgacaaatgggatctaattaaacttaagagattctgcacagcaaaagaaacaatcaacagagtaaacagacaacctacaaaatgggagaaaatatttgcacactatgcatctgacaaacgtctaatagccagcttctatagggaacttaaacaaatttacaagacaaaaagaaacaaccccattaaaaagtgggcaaaggacatgaaagacacttttttttttaagatggagtttcactcttgttgcccaggccagagtgcaatggcgtgatcttggctcaccacaacctctgcctcccgggttcaagcaattctcctgcctcagcctcccaggtggctgggattacaggcatgcaccacctgactgattttgtattttagtagagacggggtttctccacattggtcaggctggtcttgaactcccgacctcaggtgatccacccacctcggcctcccaaagtgctgggattacaggcatcagccaccatgcccggatgaaaagacactttccaaaagaagatacacatgcggccaacaagcatgttttaaaagctcaatatcactgatcgttagagacatgcaaattaaaactacaatgagacaccatctcacaccagtcaaaatgcctctttctaaaaagtcaaaaaataacagctagtaaggttgtggagaaaagggaacatttatacactattgatgggagtgtaaattagttcaaccactgtggaaagcagtgtggcaactcctcatagtgctaaaagcagaactgccattccacccagcaatcccattactgggtacatacccagaggaatataaatcattctaccataaagacacatgcatgcaaatgttcactgcagcactattcacaatagcaaagatacagaatcaacctaagtgcccatcagtaacagattggataaagaaaatatggtacacatacaccatggaatagtatgcagccataagaaacaatgagatcatgtctcaggaacatggatagagctggaggctattatccttagcaaactaattcaggaacagaaaaccaaataccacaggttctcagttgtgagtgggagctaaatgatgagaactcatgaacacaatgaagggaacagacactagggtctacttgagggtggaagatgggaagagggagaggagcagaaaaagtacctattggtgatgaagtactctgtacaacaaacccgtgacaagagtttccctatataacaaaccttcacatatacccctgaacctaaaagtttttttaattgtaaataaatggatcattaaaaaaaattttaataat

SEQ ID NO: 24167 - DNA, 4512 bp, Homo Sapiens
ccgcggagccatcggcagacgccgcggcctcccttgagccccgacccccgtcgtcagaacaaccccgggcccactcccccaaccccacttccgcttcgcgccgctatcgcgatagcgcccgggcccggggcgcgagaaaaaggcggcgggcgctcgcctcccccgcctgtcgcgatacgctcctcagcggcggcgccagctcctgtgcgtccgtctccaagagagtatgaagagagtgcgtctgtagggcagggaagatggcggacaagcgcaaactccaaggtgagattgatcgctgcctcaagaaggtgtccgagggcgtggagcagtttgaagatatttggcagaagctccacaatgcagccaacgcgaaccagaaagaaaagtatgaggctgacctaaagaaggagattaagaagctacaacggctgagggaccaaatcaagacatgggtagcgtccaacgagatcaaggacaagaggcagcttatagacaaccgcaagctcattgagacggtaggagcccagagcctgagtcccagagaggtgggaaggtcaccagattcttgagatcccaaggggcggaggcagagcggccagaccccagaggtcctcaagagaagtaaggtttctgcacctaagggaagtgaagaggcagcggactcagagctcagaaagtagggtcacgaggctcaggtcggagtgtctgctggcccttagtcagctcctttcccacctttgagagcccccctgccaactgcactctctacagcaaatggaacggttcaaagttgtggaacgagagaccaaaaccaaagcttacagcaaagagggcctgggcctggcccagaaggtagatcctgcccagaaggagaaggaagaggttggccagtggctcacgaataccatcgacacgctcaacatgcaggtggaccagtttgagagtgaagtggagtcactgtcagtgcagacacgcaagaagaagggcgacaaggataagcaggaccggattgagggcttgaagcggcacatcgagaagcaccgctaccacgtgcgcatgctagagaccatcctgcgcatgctggacaatgactccatcctcgttgacgccatccgcaagatcaaggacgacgttgagtactatgttgactcatcccaggaccccgacttcgaggagaacgagtttctctacgatgacctggacctcgaggacattccacaggcgctggtcgccacctccccccccagccacagccacatggaggatgagatcttcaaccagtccagcagcacgcccacctcaaccacctccagctctcccatcccgcccagcccagccaactgtaccacggaaaactctgaagatgataagaagaggggacgttccacagacagtgaagtcagccagtctccagccaaaaacggctccaagcctgtccacagcaaccagcaccctcagtccccagctgtgccgcccacctacccctccggccccccgcctgctgcctctgccttgagcaccactcctggcaacaatggggtccccgcccccgcagcacccccaagtgccctgggccccaaggccagtccagctcccagccacaactcgggcacccctgctccctatgcccaggctgtggccccaccagctcccagtgggcccagcacgacccagccccggccccccagcgtccagcctagcggaggcggaggcggcggcagcggaggcggagggagcagcagcagtagtaacagcagtgccggtggaggggctggcaagcagaatggcgccaccagttacagctcagttgtggcagacagcccggcagaggtggctttgagcagcagtgggggcaacaatgccagcagccaggccttgggccccccttccggcccccacaacccacctcccagcacctcgaaggaacccagtgcggcagccccaacgggggctgggggcgtggccccaggctcagggaacaactcagggggacccagcctcctggtgccactgcctgtgaatcctcccagctccccaacgcccagcttcagtgatgccaaggcagccggtgccctgctcaatgggcctccacagttcagcaccgccccagaaatcaaggcccctgagcctctgagctccttgaagtccatggcggaacgggcagccatcagctctggcattgaggaccctgtgccaacgctgcacctgaccgagcgagacatcatcctgagcagtacatcagcacctccggcctcagcccagccgcccctgcagctgtcagaggtgaacataccgctgtcgctgggtgtctgtccactgggccctgtgcccctcaccaaggagcagctctatcagcaggccatggaagaggccgcctggcaccacatgcctcacccctctgactctgagcgtattcgtacctcccccggaacccctgtccgacgcccccctaccaccaccagatgccacccccacactcggacactgtggaattctaccagcgcctgtcgaccgagacactcttcttcatcttctactatctggagggcactaaggcacagtatctggcagccaaggccctaaagaagcagtcatggcgattccacaccaagtacatgatgtggttccagaggcacgaggagcccaagaccatcactgacgagtttgagcaggtgagggccccgccccctctcttcccgctgctagggttggggtagagtccccaggctccaggcagcccctgctggcctctgctcccttgcctccacctttcagctggcgcagtccctcagcctgaccaagtactcctccctctggctgtctgctcagcctggaacaccgccctctcatcctccacttggccagctcctaggcctcctgtaggtctcagcccaaatgtcccttcctcaaagaaaccttcctggagccacccagcccagtgcctcccctttgcagtgctgggcacactcgcctggggtgtgggattttcccagtatgtgtccctgcaccaggctgtgggctctgctgccgagggaccttgatggcccccacttcacctccaggtcccagcactcagcagggcaggggctcagtgcggaaactattttttttgaatgggcttctcaagttctaatactgggaaattcctgctgcttgcaaacactctggaaccaacctacctgggtttcagcccagtgcagctgggcgactctaggcaagtcactcgaacctctgtgtctcaattaacttatctgtaaaaatggggggaagaccacctacctaatgcagttgttatgaagattaaatgagttaataacatgtaagtacttaatggtgactgctacatagtcagtgtcatggattttttttttcaaattactttcagttggtgtgttctacagtgatgtttttttccaccaaatacttccctgatgccgagccccttcatggggatgaagtagtacaaggtccttgtcctcagagaactcagtcccctctcctggttctcccaggttgccatctttgaagcacttaagacattcatttagaacctaggtcctctcccattgtgtcctcagatgttaaccacagacttcctgtcctttcctggtttggcccaaaaccatcctccaagttagtacatttcagggcatccagtcattcagaaattcccacaccacttcgtcaccaataaaatgtccctgcagagtgcttggatttagactctgagactgttccattctctagaacaagggtgacagtacccactgcctcgaggtctttgtgaagattaaatgctaggctgtgcatcctgtactcacgtgagaggtgctcaaaagccacagccctcgaggaaacgaaggctgtgcactcacacctggggctggggccccgttctggcagctggcttcggtggaacctctgcggccccctccgtttcctcctcgctgaagtggcatgataacatttcctacccaagaagaaccttgtgaggatggatgagagtgtgtgcgtgcagggcagctggcccggtgcctgacacatccacagccctaagaattgtcccctttgtctgttggtccggcccagatcccagaccacctcctcgtccactcactgaccgccttctcccccggccagggcacctacatctactttgactacgagaagtggggccagcggaagaaggaaggcttcacctttgagtaccgctacctggaggaccgggacctccagtgacaccggcccctccctctacccacccccttcccccgcatgctgatccccctgcccaggtgagggccctgccctggaagactggagggaggccccaagccacggggcatccccctctcccaggaagcagggagggggccgggaggttttcctctcagccccaccctgggggcccgggggcgagggctgccccctcctcccctccccagtgagggacattttttggtaaacctattttcattttggaaaatatttatgaataaatagttttatatg

SEQ ID NO: 24168 - DNA, 4160 bp, Homo Sapiens
gaatgaataagtgactaaatgaattcccataaagcgactgtgatctcagagactcccataaaaatgaactctatctgtgggtgtggaactcctcgtggctgggtgtccttatgccttcgcttctatgacagaggctgtgtctccatcgtccatgctgacgtctgaatggccaggtcccgggatacagtttctagttgcagcaggtttgccaaattgctcctcagagcctctgtactgactcccatgcccacttatgtgagcctctcaatctctctgtgcctcggcttcctcactggcacagcggggataacactcactcgcagggtgtgggaagggaaagatatcgcacgcggggaagtactcggcgtaggcggagaagatcagagccgaccagcgaggcgagcagttgttcactcggcccatgatgtctgggaagagccccagccagctcccgtcctggacaagcttttttctcatgggggccacctgcttgccttggcacagcgaggacagggccttggcagccaaaggagacggtcagctgtctccacctggtagtggagatagtcacagtggggtgatccttgagctggttttggtcacagagttggtgtctcccaagtggaaagtgggagggcatcattccacacagaggagccccttgtgcaaaagaggtgccagccctcggccaccctgggagcccgctggggtgggagaaggcgcgtgcggctgagcttggccttggtcctgaagcctggggaaacacgggagtactgagcacccaggatgcatcagcaagaatgcagaacagtccctgcctagtggagacggacagacagctaacaaacgaaggcgactggagatcacgatggtgccaggaagttaccaggatgggacagcacccgaggcagcatagggtgccccgtgggaatgttcacagagtgaggaaacttcagagcaagggaaacttccctgcagccagacaggaggaaggaaacctggctgcagcctgcaagacctcccacccgcgcctggcagggagcctggcctgggggctgcccatgctggcccttctgatcctgagcagaagtgatcacggacccttgtgcttccaataattcggcccctcttcctttggttctgggtttcctgtgtagcggtgggcaggatttcatctatctttccatctgccagagtctggcaagggagctaagccacataaacagactctggtggtgcagggggattgtgacctgctgcacagaagggcaaagccgtttcccgccaagcccaagaggcgctggaacatctgctctgggtgttggaaagcaccctgcatgactgcgctttcagggagggatacgctggcagcagacgacccttgccgtgagcttgtaatgcaggacccttcttgcagccttcaccttactcttgccctgcgctctgagtgccttgggggcccctgcccaggtcgaggggcacagtgcaaggtgatggcctgcagccctctgtcatgccttctcagtctctgaggggttcatacctgctctgccagggcctctcccttcttcctcatcatgcatggatgcctggggagtagggaggctggcctgagtcctcctcagctttgctctgaggtggtcgggtctgacgcctgggccacttaggcatgctggacccctgcccagtccaagccctatgccttgatgggtgtccactctacagcctctgccagccagtgccagctacccacgccctggccctcgccagcaggagctgctgcatcccacacacccccttctggagcgaggggcatccatgtgctgcctgaggcccattcattaacatgagatccctctccattctaaccacctgcttggccaccatgtgggttggcctccaccctcagcagagggtctcatctcagtgggaagtggagcccagaaccccggggactatctgcatctcaccctaaggcgggggcagcggtagggatagggctccggctccaagcctggtgtgggctcagcagcccgccccccaccccggcagctgcttgctgccccctcccccacaccgttcctgtcccctgatgccacagctctctcctcccatagcggcattttccttccctctttccttaggtcacactggtgacagagcagcggcagaatatgatgtgtgggggaataaaaatgcattgttctcaaattacatggtggtgctcaaacggacccaggtgaccgagctcagtcacgggatgggccgggccacacagcctctgagacgggcgtgtggggggatgccagggccgggggtggcacgagccctggccacttagggcccctctttgaaaggaaactcctcactgagccccccagggctctgtggccagggacagccgacaagctcagcagagttccagggaggcagggccgtcctgcagccactgctagcaagaatcagaatccctgacttttctcggcctttccctgtcagtggctcgcagtggccgagaggcccctgggggacactgggctctggcctgaggcctcggccgtgtccttctgcgtcctgcagcctcagcagcactggtccttccccgttctgcagcatttccctttctgatgaggcatccggtcagcgggtgggaaggtcagtccctaagtggtggcatggctgttgtttccccaaaggcgacgcagccagcggggagagctccagggctgggtcacactcgcggatgtgcctgggcacagcagcccctccagctctggaaaacacaggggcatgtgcaagctgttcactcagacctctcccgatggtgatggccaggaggagagccagggtgggtgtaagggcgaagcccaggtggagcattctgtgcatggggtcccagggaaacagcttgggctgttggaccctcctgtaatttgatgacagtttcattcagcctgtactaggtgctggggatttcacttttgtcacgcatgtccgtgtgaagagaccaccaccaggctttgtgtgagcaataaagcttttggatcacctaggtgttgtttttacctaaatcagtctggcctggtgtatgacaacataaactcaaggatagagcccaaaaactcgccaaccaagcaaataattatgctgaacccccttgggcactctctaattggatgtcctgggtcctcccaattcttagtcctttaatacctgtttttctccttttattcggacgctgtgtcttccgtttagtttctcaattcataccaaactgcatccaggccatcaccaatcattctatacgacaaatgctccttctaacaaccccataatatcacctgttaccccaaaatcttccttcagcttaatctctcccactctaggtttccatgctgcccctaatcctgctcgaagcagccctgagaagcatcacccattatctctccatatcacccccaaaaattttcaccaccccaacacttcaccactatttcattttgtttttcttattaatataagaagacaggaatgtcaggcctctgagcccaagctaagccatcatatcccctgtgacctgcacatatacatccagatggcctgaaacaactgaagatccacaaaagaagtgaaaatagatagttcctgccttaactgatggcattccaccattgtgatctgttcctgccccaccctagctgatcaatcaattgaatttgtgaacaatacaccctctccgcccttggggtaatgtactttgtgatattgccacccgcccccgccggacccgcccttgtgaatctactttgtatgatacaccctccccacccttgagaagatactttgtaatattctctccccccaacttaagaagatacttagtaatattcttccccacccccatccttaagaagatactttgtaatattgtccccccctaccttaagaagatattttgtaatattcttccgcccttgagaatgtactttgtaaaatccgtccccagcccacaaaaaattgctcctggccgggcgcggtggctcacgcctgtaatcccagcactttgggaggccgaggcgggcagatcatgaagtcaggagatcaagaccatcctggctaacattgtgaaaccctgcctctactaaaaaaaaaaaaaaaaa

SEQ ID NO: 24169 - DNA, 2163 bp, Homo Sapiens
ctttattagatgccaacttacagaattcattagataataccaattttgcatctgtgactcagccacagaaacagccagcttggaaaactgggacgtacaaaggaaaaccacaagtttctatttctatcactgaaaaggtaaaatccatgcaatatgataaacagggtatagcagatacatggcaagttgttggaacagtgacttgcaagtgtgatttggaaggaatcatgccaaatgttaccatcagcttgagtctccccaccaatggatctccacttcaggatattctagttcacccttgtgtaacttctcttgactctgcaattctgacttctagtagtattgatgcaatggatgactctgcatttagtgggccttacaaatttccattcactccacctttagagtcattcaacttatgcttctacacttcccaggtccctgtcccaccaattttgggtttttatcaaatgaaggaggaagaagtacaactaagaataaccattaatttaaaacttcatgaaagtgtgaaaaataattttgaattctgtgaagcccatatacctttttacaatagaggtccaattacacatttggaatacaaaactagttttggccagcttgaagtatttcgagagaaaagcttattgatctggattattggccagaagttcccaaaatcaatggaaattagtctttctggaactgtaacttttggagccaagagccatgagaagcagccatttgacccaatttgtactggagaaacagcatatttaaagcttcattttaggatcttagattacacacttactggatgttatgcagatcagcattcagttcaagtttttgcatcaggaaaaccaaaaataagtgcacaccggaaactaatttcttctgattattacatctggaattctaaagcccctgcctccagtaacatatggatcattattattgtaatagtctcatgtttaaatgggattatatgatgataacagtttaaagaaaatcataatcttatatttttaatgtggatgcatataacctgtgagtgaaaaatcactgaatgatttaattgtaaaagtagtcttatgtggtgtttgtagtctgatagagcttgaaaggacattttaaaagctaatgtctccaattttgttaaccttcgattttatgccagtataattcagaacatagaaaagtaatgattcacttgggctcattttatactggtcctgggtcaccctgccacacttgtttcctagtgtttctgtggcagacattgctaatcaattacagcccttttctgtactgagccttggataaagggtcaggctcctttttagttcagagattcaggcagccactcccagtgggttgtagataatgtgcaagataaaaactattttctcttccaaatctaagtactaagctcctagtataaggtgttgttacagaataccagagaccatgttagagacaactacatctcttcaaaaaacagccaacagagacaaaggaaaagtgtttaaatagtaagctgttcttcttaatcagaactatcctattgactaataaataatctgcataattctacttaaggtgtgtaatctctgttctagagttagtttttaagtaagcttgttaatctgccactttgacattttgcttaggatgtcagtagccatattaagatgtgtagaataccttcagaagatgatcatagtgttttgtaatcatttaatgtctgcagccaaatttttaaaggtaatttagacctaatactgctcttgctgtgtcttattaagttaaaattaatgaatgaattctggtaaaaattcaaaaggcactctgtgagtagagagtatcatttaagcttattttagtcacatgtagtatatatctccttaaagctgtcactctcactttcttaccattctcttgatttcttcagaaaccatctagtcatcatctttatactctacctgcttctgcaattatatatcatattatgttttcagagcagttcattgtcaagttggactttaagtgaccattcaagaaaagatgaaatctcacgaacctcaaaacttcattcatgtctttttacaaatgagaaaaaaaaatgcattaaagattaatactcaaaaaaaaaaaaaaaaa

SEQ ID NO: 24170 - DNA, 155379 bp, Homo Sapiens
gatcttgggttccaggcagacatcatccaggtccatctggaactttcagtgatagctgccttcagccagcatctttgggggactctataatagcagcttgagatcagtgtctagaagactgttctgcaatttgctgccaaatgcatctcaggtttttaaagtcattgtttcttgctcatggtggctcatttattacatagtcccctcaccccactaatggataatgggaggaaaagttgctgcttccttcagcatcaaagcctttccttgggaatctgcctccctccatggcaggggtggattcgggagctgggagtaaccaggcaaagtcaaccagatgcctagctcctgctgagacccaggtcctatggcagctcctcattagattaaaggagaccacttccaaagcaggtgctgcatggctcaccatcatatgccccaaacaactgaaagttggcggttatcaccagactgtgagtttctggcaagtagcttggggaagctgaataaactctaggcccagggctactaaagacttcaggatagaattctccatcaaatatacagcataagtaaaactgctctgcactgtttaatccatttccaaggggcttagaaaagctaacaagggtgtgtcccctgtcctgccccaccggtttgctggctttgtaataacataagaccattgtggttgttggtgtcagataccttcccatcctgagctctctcacctacctgctctctctcctagagcaggatactggggtacttttaagaagggtgctccttttaagatgcccagaaaagctgtatttaactcttgctatttgtaacttggggatggtctcccctgccccagggcacataagagcaaaggctccaatggtcagtggatgactctgcaaaagtgaccccctgtgccagaagctatagccctctccccaacaggtctctcttgttggccagagggcctgcttcccatgggcattgcaagtgccaccgtgcggggcctggctctgcacacccaggaaaagtctgcagacccccagccctccgcaataattcaccagaccagaagccactggtgtacagagaacacttaaaaaaatgtattttatgtgaaaaaaaattaaaactctgtatactgtatcagcagctttgtgtaaaaatggcaatcaagagagtctaatatatttaaaacttttttaaaaaaaatcttcgcagatctttgatatcgtactgaggtaacttccacgtagccccttgccacgcggcaccggtgggccttgggtccaaaactgtggctcagccacatcccaaagggggcacatgtccctggagttgcttccagctgccaaggcctgtgacagaattcgctgttaagagtttttaattaaaattattaaattccttttaataacacctgctagtgtgagtgattattgctgtgagctcacttgaacagtgctgacttgaattcacaaagaggaggttcctggaatagagggtgggtgagagctcctagtctcttcccccttaccccacccctttcccacagagggctttcccatgagacccctgaaatagagggagctctgggggctcagacctggagcagatgtctccccagactaggagatggtgaaaactgatgaattcaagaaaaggtgggtggttgggaatgaccttcattctgtcaaataatctctttgaaattaacatgaggccgtatagtagcatatatttattccatacattttcaaagtttttcctgatatttatttatttatttttatttttttaagatggagcctcactctttcacccagtctggagtgcagtggcgtgatctcagctcactgcaacctctgcctcccgggttccagcaattctcctgcctcagcttcccaagtagctgagattacaggcgctcgccgtgatgtccagctaattttttgtatttttagtggagatagagtttcaccatgttggccaggctggtctccaactcctgacctcaagtgatcctcccgccttgagctcccgaagtgctgggattataggcgtgaaccaccacgccccgcctctcatgacatttatatgtaacaagggtgcccctctcctctgtcccattcttggagtgaactgacatgtcctgtcctcttccccctgccccattccactctttcccctcgtgtgcttattgtggggaagtacgatactataaagtacttcaccttatgacagcaatacagcagctaaggccccggccattctcattttttacctcgagcattaaaggcatagagaagctatgtggttgcacagcctcagaccacagtccttggtccttgtcccacacagaactttgttggtgtttttcttgaaagaggatgaaaagggtgtcggatcacaaggtcaggagttcgagaccagcctggccaacgtgatgaaaccccatctctactaaagatgcagaaaattggccaggtgtggtggcatgagcctgtaatcccagctactcaggaggctgaggcaggataatcgtttgaaccctggaggcggaggttgcagtgagccgagatcacgccattgcactccagcctgggtgacagggcaagactccgtctcaaaaaaaaaaaaaaaaaaaaaaaaaagaaggtgctctcttgcagcctcccggaccctggataccagcgcagggacacatggaagtccccacacttattcttgagaaacttcacaaagggatggggatggggagaggagaggtagagagggagaggcgtctcaacagcggcaggcattcatccatttaaaaaggttattggttgctaaataataatggtaacatctcacatttatgacccacttttcatttacataaaaaagatgacgactgaaaattgactgttggatttagctctgtggaactcatgatgaacctgacaagaggttttggtaaagcagtgggggttttagcctgattgaagagggctggaagggaactggagacagcaagtatagacaactggtttgagggtttcttttcttttcttttctttctttctttttctgagacagggtcttactctgtcacccaggctggggtgcagtggtgtgatcatagttcactacagctgcaaactcctgggctcaagtgatctcttgcctcagccttcccactggctgggaccatcatgagcactgccatgcactaaaagttaggcgcaccaccatgcccagctaacttttgtatttttttgtaaagacagggtctcactatgctgcccaggctggtctcaaactcctgggctcaagtgatcctcttcccttggcctcccacagtgctgggattacaggtgtaagtcaccatggccagccacatctgagattctatgctgcaaaaataagaagtgagatggggagctttagaggaatgtagggtcaagagagggttgttttaagatgaaaaatatttcagcatgcttgtaggctgatagaaatgaatcggtaaagagggaagctgatgttccaggagaaagaagaagattgctggagcgatgctggtgagtagtagaggggctggaaatgcccaggcagaggggttggggttggatgggcacaggcacagttcatcaatgcccagtatacgggcagagatgcagacaggaaggtagactagatggccgcacgtggacgttcccttcttactgtttctgtgttcttgctgacatggaagacaagctgtcagagaggaaaaggtagagagaatgagggaaatgcggcctaccaggcagtttttttgtttgtttgcttttgttttgttttgttttgtttttagatggagtttcgatcttgtcgcccaggctggagtgcagtggtgctatctcgactcactgcaacatccgcctcccgcgttcaagtgattctcctgcctcagcctcccgagtatctgggattacaggcgtacaccaagacacctggctaatttttgtatttttagtagagacggggtttcaccgtgttggtcaggctagtctcaaacgcctgaccttaggtgatccgccctcctcggcctcctaaagtgctgggattacaggcgtgagccaccgcgcccggcctcctagcaggcagtcttacggattatgaatttaaaacatgaccagtcagtaagcatggttacgctctttttgttttttcttcagccctgtagggctgccggggtgcaggtggaaagtagggtataaccacggttggttggggttttacaaggcaaaaatcgatgaaatgagagaagactacccgagggtgtaatcaaaggagcagtcctaatacgatgagccggtattctttgaatgaatgaatacatggttaaaggcaggtgataaaggcgatatggttggccatgccaaagcactgagagcctaggagcagcgtggccagagtctccgggagtcggcacctgcctctcctcgttgtctaggcctgactgtccctggccttgcacggccgcgcagcggggcgaccggcagggggcgcgctgggatggccaggagctcggctctccccgctctgtccctgctctgcggcccgcctcgcccctgcaagtttaaattcctcttagcaagcccagcatcgcagccaataacgcatcagggggcggagccgtagaggcttgcgccccgcctcgctccgctattggaaggaaagcagccaatgggagagccgaggcggggaggtgcggccaatggcgcgggcctgtttgattcaaaggttgcctataaagcgggactgcacgccggtttttgtccgagggctgtcgagtccgagcgccgccatggctctgctgtccgagggcctggacgaggtgcccgccgcctgcctgtcgccgtgcgggccgcccaacccgaccgagctgttcagcgagtcacggcgcctggctctggaggagctggtggcgggcggccccgaagccttcgcggccttcctgcgacgcgagcgcctggctcgtttcctgaaccccgatgaggtgcacgccattctgcgcgcggcggagaggccgggagaggagggcgcggcggcggcggcggcggccgaggactcgttcggctcctcgcacgactgctcttcgggcacctacttccccgagcagtcggacctggagccaccgctgttggagcttggctggcccgccttctaccagggcgcctaccgcggcgccacgcgtgtcgagacgcacttccagccccgcggcgctggcgaaggtggcccctacggctgcaaggacgctctgcgccagcagctccgctcggcgcgagaggtgagcggccctccagggccctgggtcgcacgggagacccccttcaagaatgggaaattgaggcctgctgggagtacgggccggggccactacctcctctgcgccctaccggaagcgcgcgcgggctaggtggtcccagggtctccgactcacaccccactctgcgtgtctcccccggatcccccgggccgctcctcgtggcaggggatagtgggaaagcctcggttcccaaggatgcgaattgtgcccgggttccatctcctaacgttcatatccctgaaggagggaccagaagtactctgagttccaaatttcagttaaaatcaaacttggaaaattgcctatttccctgtctgtcagccaacgctagatcccactttcaggagcttcttaggagactcattaccaaagaacttacgcagggaaagttccagaaagatggtctccagagacaactacggggcattaggaagcaattattattgctaattactttcatgcatcttttgctgtaaaaagcagataaacacgagagtggcaaagtgagagccctgccgctttttctttcttgtcttttttttttttttttttttttgagacagattctcttttgcccaggctggagtgaagtggtgggatctcagttcactgcaacctccgtcccccgggttcaagtgactctcctgcctcagcctcccaagtagctgggattaccggtgcccgccaccacgcccggctaatttttgtatttttagtagagacggggtttctccatgttggccaagctggtctcgaactcctgacctcaggtgatccacccgcctcggcctcccaaagtgctaggattacaggcgtgagccaccgcacccggccccctgccgctttttctactgccagagactggaggggaaactggggcaaggggtttgttttccataggctgggtctgtgccagattgcagtggtctcctaaaatgcagatacatttgcattagatcggcttctgtattcatagtgggttttggtcctactgtctgactcttagtatggcatggtcatgggtgcaatggaggtcttgtctgcttgccagcctcgataaagctgcagcagggtgctggggatcaaggaggaagaaggcagcctgcaggtgggtgtggcacatagagtgtcgtggcagacaccttggtctggagccatggtcaggttgcttgctgactggcagtgcccagctccctggctatctgcctgtgccagggacatggcagataaagccccagccatgttaagacttgttagggctggtacctgagtgtgtctgagtgtgggtgaagataccagtgcattgtcaggttgacatgtccaagccccgactctcaccaatgttcttaatgttctttccctgactggtggggtttcagtggtagtggatacagtgacctagtgccttgcctttgagggagtggttgtgggctgcagctaggctcttaccagccctgaggtgctttgggtggactgagggttttttgatgcagcagacattttccttgcgggttcagtgaaaagattaaaaagatggaaaaggcagacttgtgtaggtatgcatccccaaagctcatgtccagtagaacttgagcacttggaacctgaaaaatgtaaagaactggtctgtatagtgagagctgtggattgttctagtcttttgcccagccccaaattttagtgatagcaaaagggcactggaactagaggccagagggaaactattaaactcacgtgctggcgtgaggaggggatggagccaggagctcagactctccctcatctcacgggcattttgtaatactgacatttccagatagaacctgctgccctagtctagctacccacagttccctccgagatgctgtatttggaacctgggcagttttaactgagaaaggtggtacattacctttaaatccaatgagtattggctgggcacagtggctcaagcctgtaatcccagcactttgggaggctgaggcaggcagatcacgaggtcaggagttcgagaccagcctggccaacatcgtgaaaccccgtctctactaaaaatacaaaaattagctggacgtggtggtgcgtgcctgtaatcccagctacttgggaggctgaggcaggagaattgcttgaacctgggaggtggaggttgtagtgagctgagatcacaccactggactccagctctgggcgacagagcaagactccctctcggaaaaaaaaaaaaaaaaaaatccaatgagtattttcagtgtgtccgatagatgccaaattatttgcttactcattgcctgctgtgtatcagacactaccatggctggggccacaggggaaggcatcatccttgccaacacttgagagtggacagtgtgctgatgggaaacagtgaggagtttgctgcaggtactgcggaaagggctaaagaaagaaagtctccggagtggcagtgacctcagagctgggtggggcttgccagacctagggtatgggggctggcccacaagtgtttaaggacctggaatgtttgggggcagccaaattccccacagcgggttagtggtaggagaggaagctggggtaagggatgctgaaatgagttgggtttgagacagtgctgaatttgaggtcccaaagacaatctcttttgtttaaaaaaaaaaaaaaaagccaggccatggtatcatgtgcctgtagtcccagctactcaggaggctgaggcaggaggatcatttgagcccaggagtttgaggctgtagtacactatgactacgctgtgaatggctactgcactccagcctgggcaacacggggagaccctgtctctttaaaaaaaaaaaaaaaaaaagtaatgctttctgtttgccaggcactgttctaggtgatcccaaggaaggtgcgattatcatcttcattttacagctgatagaactgaggcatagagaagttaagtggccccgaagtcatgcagctagagaatgaaggagcctgtactcaaattgaggcacagaatgtctgaaccactgttaaccaccacactccctgtggagggttcaggagcctgtgctcaggtggggagaggtgacagcagatctggtggctagctaagagctactactatttatgggcatgcattgtggacaagggagtggctgtgtcaccttgaccacatcctttgaaatctagtacctgtgacagcgaggaccatgaaggtgtaggtctcaggctgctttcaggatgaaatgagaagctgttctgcatccgtgttctgatagcaaaggtacctaatggtgatatgattgagcactttgaatgggtcagtttctgtgctaaacccttgacctgaattacctcatttaaccctcccaacactgggaggaggctacaattaagaaaagaccaggcacagagaagttaagtaacttgcctgagatcacacagttagcatgggacagagctgggctcaagcccaagtctgtctagttccagctctgaagctcaagtgttttttttttgttgtttgttattattttttttaagacagagtcttgctctgtcacccacgctggagtgcagtggcatgatcttagctcactgcaacctccacctcctggattcaagtgactctcctgactcagcctcccgagtagctgggattacaggagcacaccaccatgcccagctaattttttctttttttttttggagacagagttgctcttttggcccaggctggagtgcagtggcacagtctcagctctcagtaacctctgcctcccaggttcaagcgattctcctacctcagcctcccaagtagctgggattacaggcaccctccactaatttttgtatttttagtagagatggggtttcgccatgttggccaggctggtcttgatctcctgacctcgcgatctgcctgcctcagcctcccaaaatgctgggattacaggcgtgagccactgcgcccggccaatttttgtgtttttagtagagatgggtttcgccatgttgcccaggctggtgttgaactcctgggctcaagtgattcacctgccttggcctcccaaagtgctgggattacaggcgtgagccgctgtgcccggccactgaagcccacactcctaatccctgctgcatacagcctccctgccatgaggaaggattggagctttggtagttttcaacaggctgaaggtttgtaacagttgaagattgggactttttaatttccatgttgcgtattctataaacaggaaaatgacaatgactagacctgtccttttcaggaagaaaacgaggtggtcagtttttagagtaggaggcattaaggctggcagagaacctcctcaacccatcaagtggggaaggtggttcatgatgccaggagaacataggtctctgagtttaggttttgtaaactagagtgtgttttcctctccctgggaaagatagagccagatagatgtttctggtacctggagcagagggatctgtgagaatcttttggtgggtgaatgaaggaactttgaatgccacatgaagggtcccacttaaccccagaggttggggccaggctgcagtagagcacggtcgaacctcagtgttcgctccatgcagctttatctgccttcactgaggtggtctgaggaccaccctgcatcttcaggaatgtctctggaaggagccaggatacgaggctccttgaccagagtataggcacaggaagccagggttacttggtaaatggtagggcctaatcctggctttgcagcctgaagcgctggttctgggataggttttatccagcagctctctgaccacacagaatcactcagtgtgtctgatacataaaagatgctcagtaaatactgtaggggcctattatgtgcacctttgctcattcagctacatgctttgaggagaaataaagggcagggggaagggagcggtagataggaagaaaagtagttcaggtgattctgtctgcctttccactcagcaagtatttgtccctgggtggctgtgcctggggtttgtgaatctgccagccccttccttgactcttgtttctatatacctttcaaagtgtgggcattctgccacactgaatgaggtacagtgtttaaaaacaaatggtttggccatgcgcggtggctcatgcctgtaatcccagtgttttgggaggtcaaggctggaggattccttgaggccaggagtttgagaccagcctgggcaacatagcgagatcccatctctacaaaaagttaaaaaattagccgggtgtggtggcatgtgcctgtagttccagctactcagcaggctgaggcaggaggattacttgagcccaggagttggaggctgtagtaagctatgatcatgccagtgcactccagcttgggtgacagggcaagaccctgtttctaaaaaataaataaaaacacaattacgtatagcatggcttgaatacaagctggctgcttaccaggtgctcaggcgagcttcaccaaaattggaggaaatactgttttgaaccttttgagaacccatatgtttgtttcctaagcaagtttttggataatcttgaattatacaggatattttccctacatacttgctgtagatccacccctccaccactgtatctgttgatgacgcattcagctttttgcctctgttgctgtgtgaactgggatttggctgggctgtggccgcctgcctggaagggctacatagcctcattttggcaatgtgcttatgaattggctgtccggctattcctggtttgttgaatgagagttcagaggcaaagctggtaccaccacgaggttccaattcctcagagtcacgtttcttaccagtgcctattctcttttgttccaaagaggccacttttgctatgacctcaccctcgggcatcctcttgataacctgagcgttagtagtggggatcattgcgttcccagagagccctgccaggaggagtagcagcttaggaatctgttgggggcccctggcatttacttggatgtatctgaatgaaggctttcctgttcttgcacaactttcctctgcattacagtagagcctgtgtggtgtgatcagtttctgttccaaatgctcatgtcagccccaagcagggcttctcaccctcagcactgttgaccttttgggttggataattctttgtcctgaggggctgtcttgtacattgtaggacgttgagtagcatccatggcccccattcactcgatgccaatagcatccctcacaccaggtagtcatgatattcagtgtctccagagtgggaaatagtgagttactgatgaatgggcacagagtttctgtttggggctatgaaaaagttttagaaacagatggtagtgatggttgtgaatgtaattattgccactgaattgtacacttaaaaattattaagatggcaaacttatctattttaccacaataaaaaaatgtctccagacattgctaaatgccctgtgggggcaaaatcgccctccagttgtgaaccactggcctagaagttctcactagtgcatcattatgggacattacccactggactgaagtgttgctactatttatcccttccttttgatttcatgtgtcaggttaaggattttagaatttagccatttctctttaaaaatattgtggtaaaaaatacgtagcaaaatttaccattttaaccatttgtaagtgtacagttcagtggcattaaatacattcacactgttgtgcagctgtcactagccgaatctccagagctgtttcagcttcccaaagtgaacctctgtacccattaaacactagctcttcataccctcctttcctggccccggcaaccaccattctactttctgtctgccatttctttctttctttttttttttttgagagtctcgctctgtcgccaggctggagtgcagtggcaccatctcagctcactgcaacttctgcctcccgggttcaagcgattcccctgcctcagcctcccaagtagctgggactacaggtgcccgctaccacgcccggctaatttttttgtattttagtagaaacagggtttcaccatgtcggccagcatggtctcaagctcctgacgtcgtgatctgccctcctcggcctcccaaagtgctgagattacaggcgtgagctaccatgcctggcctctgtctgccatttctttattcttttcccttagcgtctagcagacagtaatgaagctgcagaattcttctctgacttctttatggatagaaggtatgttacttcaggaaaaaagcaagcaaaacccaaaaatgtagtggatatattggcttaaaaaaatcttgaacccggtctctactaaaaatacaaaattagctggttgtggtggtacatgcctgtaatcctggctacttgggaggccgaggcaggagaatagcttgaacctgggaggtggaggttgtgatgagccaagatcgtgccattgcactccggcctgggcaacaagagtgaaactccgtctcaaaaaaaaaaaaaaaaaaaaattcttgatgcaaatgatataacctctggaagggaatttggcaatatctagcaaaatttcagttatatttacccattgatctaccacttccacttctctgtatcttgatatattggcaaaaatatgaatagttgtagacaataggccatgcgttgcaacactaattataatagcaaaacacaggaaagagttcaggtgttcgtcagtagaggatgagttcatcattgtgaatgaaccgattcgtctctgcagtggaacatcctgtagctctaagaaggaatgaggactagctctgatatgcggtatctagaatggtactgaccagtgtagtagccatatgaggctattaaaatttatatggattaaaattaaataaagattcagttctgtcatcttggaaggttctattgggccacgctagtctagaacaatgtgtagtattccatgctaccttttacctatagggggatataagcacatatacatagttatatacataatacacatgtttatataaaacaaatatgtttatatacacctgtgtatacttgtttatattgaaaaaatggaagaatatacaaaaaactattggaaatattatctcaatggggaggagggacaaggatggaaactaagtatctttgaaagtaccttgttttgtaaattggattttggaactaggcaaatgttttacatacttataaaataaaaacaattcaaaatgataagccctcctccccctaccccctaacttcttggtgcttttccctcccctttgaaaagcccacctgcttgtgtacttcatgctggaatagtacagagtactgaatagtggtcagtccctccagagatcagtgaaaactttgctcctgccaccctctggtggccctgccagcactttcatctaatacttaaattgttttatttggttgcttgtttgtttgtttgagacaagttctcattctgttgcccaggctagagtgcagtggtgcaatcatgactcactgcagcctcgacctcccaggctcaagtaatcctcctgcctcagactcccgagtaactgggacttaaaggcacatgccaccacgcccagataattaaaaaaattttttctggagacaggatgtcaactgtgttgcccagagtggtctcaaactcctggcctcaagtgatcctcccaccttagcctcctaaagtattgggattacagatgtgagccaccgtgccgggcctaaattgttaatttgataatagcctctgaaacagagggagaacagtgcacacaagcaagtttaggtttcgctgtgggaatttacattcttttttgtttttaaaccccaaagatgtcaagatagttacttaaaggtttttgacaaaatcccaaggagattatttctgttctattaaaacatgtaatacatggagagaaaatatatcttttgcttttttagcaagagggtcctgagagagttaggagaggaagtgaagggtcaatggaggccatgtggtcagctgggagaatgcagcagccaggatgttattgaccacagcacaggctgacattgagtgggtgcagatctttggtggaattccaagcatgttgcacacctgacctcactttatgactctgggagggaagggagggaaactgaggtgcagtgagaaggggtgatcggtacgaacttcctccttcacacagaggaagaagagctagaatgagaactggaatgactggccctgaggggcctgttggggctgcacatgtgcctggtcagagcctagacctgcccattgagtgtgtatgaatcactgacttcgcagagctggaagggttccttgtttcaaggacaccgagactcagatggaatggcttgtccagggatagtgacggaatcgggactaagaatatgagtagctgccatttaagggctttccatatgccaggaactgccagcaaacactatgagataggtactgtcaatcatccgtggtgagcttgagcccatgcacttcatgggctacgccactgatcctttagtgtttgttctaagcttccagtcatgtgaaaaactgcccattaaacttggttggaatgatataaaatactgagtatagtactttttttagatggctccggagtcacagagacctgggttgaaattccagcccttgtacttgtttaagtttgtcaccttgaacaagctacctaacctctccaagctttggctttctcatctataaattggggatgacaggtaatggggttttgaaatttctagatagcacttttgagcttttgtgcaagaaggcaagcagaaaagagttcagttctatgtggcaagtaacataaacagggtctgtgaccttcccagagaccaagaaggccatcatgacgtctgctgttcaactacataggttcccaagtcccttggtacaaatcaggaggggacaggtagaaggactgagagaggtaggcttgtgatttgttacctgagatgatgatgtgagagtggacacacatgcagctgctccagatatggctggagaagtgcaggaacagtggggtcctggtcagcaggccggccattatgcccctgaccagctggatgcgtcctcctcacgtctcctgttgtaactgacttgcactgagttgcaaattgcaaatgggtgttgaccctggaagggactcttgaaagtcaccactctcacgactttctagtccttagagagtgggtgggctccatgcagcacagactgggagagtgccatgactgtgggcacttgatgtgcaagggctgcctgccttccagacatgccattgtccttcgcacattattgcctccaggagtgggagcagtggccaaatacacatcaggtgtatttctggacccacaggctgcagcaagagcaccggatacctaggagttgcatcctggcttggaaagcaggactcggccggttagtggatgagtccaggtcattgctcagctcagtgaagagagtgtcccttcagtctagccccaggtctacttcagctatgcagggattggttgcatgagggctgggacacaggaatgggggatggggatggggatttgaaggaagacttccctactgattgcttctacagtaggactatggacttttcctctgtaaaagacaagtacttttggctgggcatggtggctcatgcctgtaatctctgcactttgggaggccaaggtgggtggatcacttaagctcagaagttggagaccatcctgggcaacatggtgggattctgtgtctacaaaaattagccaggtgtggtggcgtgtgcctgtagtcccagctacttggaaggctgaggtgggaggattgcttgtgcttcagaggcggaggttgcagtgagccgagatcacaccactgcactccagcctgggcgacagggtgaaactgcatctccagaaacaaaaaaatagacgaatatttttaagagtcctgctttagtaagaaaggagtggatgctgggtgtaggggaagtcaggggaagaaaaaaacctccatcaaccctacgcaccctgatggtgttaaggactagtgttcaaatccaacgcacaggaaagggtgaggctttaaaaccaaacaatggaacaaatagcaaattaggtatttactcaccatataacaaaggtgttgcacaattgttttgttaagtggtgaatcaaaattcagcttggccgtgccttgtgctgtgggcccccaggcccatgcccctgcctccagcaggtctctaatccagcagctgggctgggtttttctgatctctgttccagtagcactgagggaacgtgtcctttggcccgtcacactctgttacccctggcttgtctcctgtctcattagactgcgttcttgaggacagggattgacactagatcctcagtgctcaacacctgcctgcctcgattgggtccacaatgaagatttgaaagaagagtgggaaatcagagaggcaagcaggtgtgtgcattttcctctttagctttctcctgtgagctctactctcatttgtacacctgcatattccaaacctctttttgaaggttttactgccacctcaaaatccgtttcgaagctcacccctcactcttgcttcttgtcttgtgtttcctgtttccttgtatctgaatatccctctccctgtcatcctcagcccatgtcgcccactgctcggctctcccatgatctccttccctcttctgcaaccctcattgcttctgccgtgctactgatttgtcttcatctggtctctagtcctcctaaacatttattgaagttgcttaacctaaagaatatccacgtgactgctgtgttgcaggtcctgtgttggaggaggtgggcccagatctctgacctataccaatctcttctggcatcagtttcttccatcctgttggattcttcacttcgaactcattactcttatacaggcaatgtggggaagattgaaactgattccttggttggcattcagggccttctgtgatcttgctcattcatccgtcttttccagtcatgtcccgtggctccctttcatgcatgctgtacgttccagccagactggtacataccccgtcatgccctacctcttcctctgttatcatgtggcttcctgcgggaatgccttctcctcccttcacttctcccatgcccttgtccaaattttgtccttgtgcttcagctcaaatgccatctcctccaggaagccttccctgctcttatctggtaagcatttgagtacctatagtgcccatagtccaccactggaggagacaccttgtttttgttttgttttgttttgttttgttttttgagatggagtcttgctctgttgcccaggctggagtgcagtggtgcgatctcggttcactgcaaccttcacctcccagggtcaagtgattcttgtacctcagccttcctagtagctgggatgacaggtgcatgccaccatgttcatctaattttttgtatttttagtagagatggggttttaccgtgttggccgggctgctctcaaactcctgacctcaggtaatccacccacctcggcctcccaaagcactgggattacaggcatgagccatcatgcccggcccccttagtttaattgcttaggctgtatatatcattttgcctctctgcatcctgtgtcctctccttgaggtaagttgggtctatgtcaaattcctcatagccatctttctgcctagtgcagtgtgcagcccacagcgtgctctgaggaggtgctggctgcataatagcacctgtttcctgccttgccctccctgtgctaagccctttccatgctttgtttcacttaatcctcacagcagccctttgacccagatgctattaattttgtcttcctgaggaggaaactgaggctcagagagattaagccacttgcccagggtcacacagctggtaggtggtagagctgggttctatgcccagaacttttgcctttaattcctgttgtatgacccgaatgagtgggatgaatagaactgtcaaaataggatgtgtaaagccagtggaggatgtaaacttcagaggatgccacaaattcagaaagaacgcttctcattttttaaatcactgtgttcagtgggtttcagccatgccctttaccaagaatagcccacagcttagaccatcattaaaaggggtggggtgggaaaggcagcaggagagtaactggtcttctcaaccccctcacagcaatgacttcccaggaactggtgtttcagggtctcacatcctagtagaccaggccctggagtgttggagaaagacagccaaattgcctttttgcctcttcattccttctttaatcccccaaatccttaaggagtcatgactgtcatatactgtcctaagtcctctgggaccacagaaatgactcaatcccattcaagagcctttgctgcaggagaaggagtgaaacccataaatgaataatcctaactttcagaaaaagagttaatgtgattctgagagacaggcttttactgtggaaatggggaggaaggagaaacccttatatctccagactacagaagagcccccaagcctcggcttccttagttaacacccccaacttctgactcagtttgtcaggacctgtttctaagcctggaggtttggacacccccactgccctgccaggagtttgctgaggaccttggttttaagcctgcaaaaggtgtgattagaggcattgtggcaggagcagcctgtctttaaaagagcgaggaaagctaggcggtgtctccctgtgttgaactgtctggacggctccagctctggactggtaaagtgaataaacgagcagatactaagggatcctttgtaccttgcactttatgtaacatagtcatttagttctcgatacaaccctattttgcagctaaggaaacagacatttgaaacagctgtaatttgcccaggaatgcatggctaaaaggtagctcttaattgtagtctgatgctaggtgtggaaaatcacttgggaggcatgaatggagccatgttgttggggagaagaaaggcctgttctgagcttaagggcagaatccttaggaaatatttccctgttctttgctgtgggcttgcactatggacggataccaaagaactgcagagagaaccttttactgaggagaggccagtgcagtggaagtcatttggttagaacctgcccaacagacagctgatcaggcctggctggtagaaagaacagaatgttaacaaatatggtatgcagtgttagggaggcagaagaagggagaatccatgggcctgcttcgattgctttcgagtcatgagttggtggtgaatgggacaggccttaaaaaagtcagagattatgattcaaaaccagacaataatttaaaaaatagatttcgagaatgctaccctccagaagggccctcagagagaatctgaggttttatttacttgtttaacggacagcaaactgaagcctggtggggaaagcaacaagccaaagatgacagtgtgttacccacagaaccagacagcttgctgatctgaataagcctgtaagacaggagtttagtggaggaatagaaggtgaatggagcaggttcataagagagcaaggcagtggattgatctgtatttttgagaaacctcccagcatggagttgggagtgttagctaggccaagtcaagatttctaggacacggggcccaagtgtctttggagatgcaaaagagtccatggtgaggggggcaccaacactgcagaagggggagggaaggataactgttggatagggatcatttcccagttctgagtggagtccagagtccagagagcgtgctgtaaggtggtgtcctataagcttatcatgtgctcttccctgtttcacctgtaggtgattgcagtggtcatggacgtgttcacagacatcgacatcttcagagacctgcaagaaatatgcaggaaacagggagttgctgtgtatatccttctggaccaggctctcctctctcaatttctggatatgtgcatggatctgaaagttcatcctgaacaggaaaaggtttgtggtacactatatccagtttcaccatagtcaacaaatatgaccaagcatccattatctacaagctggctggtggcggtatccctgtttacaaggaagggactgaggctgtgagcaaagtcatttgcctggtcttacagaaaacaaacagtacctgtgacctggcaattctcctaggtgtctacccaagagaaatgaaaatatgggcccccacaaaaatttatgtgtgagttttatagaagcattattcataaagccaaagagtggaaacaatccaatgccaatcaactgataagtggataaatgatatgttgtctattcatacaatagcatactattcacctataaaaaggaatgaagtgctgatacatgctacagcatggatgaacctgcaaacgtgctaagtgaaggaaaccggtcacaaaagaccacatatgatatgattccattaagtcagaatagggaaatctatagagacattgattagtggttgcctagggctggggagttgggggaaggacgggattattgctaaagggtactttattttagcactttctttttaaactgatgagaatgtcctaaaattgactaacggtgatgatggttgcatatatctgtggatatactaaaaactacagaatttgtgttaattgtatgatctgtgaattagatctcagttaagctctttaaaagaaatgttaggattcaagaccttggcctctcccctgtactgtcctgcctcttaatagagcctggaccagctcccttgttgaaggcctgaaggccaccctggaagttgctgcttttgacagtagctccaggaggctgcccttttaatcacagcaaccagtattttttgagcccccactctgtctttggcactgctccatgctttttttttttttttcctgagatagagtctcactctgttgcccaggctggagtacagtggcccaatctaggctcactgcaacatccctctcccaggttcaagagattatcctgcctcagcctcccagttagctgggattacaggtgcgtaccaccacacctggctaatttttgtatttttagtacagatggggttttgccatgttgtccaggctggtcttgaactcctacctcagatgatctgcctgcctcggcctcccaaagtgctgggattacaggcatgaggccccatgcccagcctgctctgtgcttttaacaaatgttatgtaactgaatcctcaaagcagcccctatcaggtaagtggcacctgtgttttagaccaggaaatagtgacacagagaatccaagtgtccaccacttcaaagtagtgggcctagggtctgcctccttgtatgtctgcctccaaccccagtgtctgtaatcactattacatgctgctgctgttcatttctcattattgtaaaattagattttatgtctatttctctgattctgaaaatgacctaagtgtttcagtggaagcctatacaacatagctagcttggtcactttcatggaaagaagaaagaaaaattgtcatatttattacagaatttgtttttttgttgttgttgtgtttttttgagatggaattttgctcttgttgcccaggctggagtgcagtggcacgatctcagctcactgcaacttctgcctcccgggttcaagcgattcttctgcctcagcctcctgagtagctgggattacaggtgcccaccaccacacccgactaattttttgtatttttaatagagacagggtttcaccatgttggtcaggctggtctcaaactcctgacctcaactgatccacccgcctcggcctcccaaattgctgggattacaggcataagccaccatatccggcccagaatttgttttttaaaaattaagcaacccatggcttctcagccttttggctaagatcaagtgtaaaaattaagcatcttaacctgtgagcttcagaactttatttgttcatcacctgtatgagtatctattatgcactgggtactagatataaagcagtcagcaaaacgaatttagtctttggtactataagttactgcctaagagactctaacttaccaccttattattaccaagcaatttggtttacagaattcagattctcccacagagttcttgttggttgcctcatgataaagacaggattggggtttctagaccaattgagatgagacagccatgtaacccaacaggtggttagaaaatgagtccaggtggacccaaggaagatacactttggcatggaaaagagcattatcagctagccaggtaaagaaatggaaggtatcagtgtttaatttcaaggtactctttctataattaaggctatgcattagcagagaaatcacagaattgttctggccacaactttggtcaagtgattttctctatttatctactagacagaaatctatgagcaggcaccggttcagttgcctactgttggttgttgccttcataggtgtccagatcctctgcaggggggtttaagaaggcctatttctggccgggcgcggtggcttacgcctgtaatcccagcactttgggaggccgaggcgggtggatcacgaggtcaggagatcgagaccaccctggctaacacggtgaaaccgcgtctctactaaaaatataaaaaattagccaggcctggtggcacacgcctgtagtcccagctacttgggaggctgaggaaggagaatcgcttgaacccgggaggcagaggttgcagtgagccgagatcgcgccactgcactccagcctgggcaacagagagagactctgtctcaaaaaaaaaaaaaaaggcctatttctctggcctccccagtttttgtagttttacctccttcctggggaagcactgtcttccctggttgcttgtgtctcctgttcctctctgtgctagtgaatttgtgccccttgctgtatgggggctgatgtccccatgctctgcctctgtagctggttcagaatgttgggttgtgctgtctgtaggaacttggtcacacattgatgtgcaggcgctcacaagtgctttggccacgatcacagaggcatatgcaacattcagatgtgtgtcaaagggaaagatacagaaaaccacacctaatctgcccataatggtattcttatgcttattatatgttgatcctttaagacttggctcaggggtcatcacctcctccaggaagctctcctcccaccaagtccaggtgtacctctatgacattccctagtcgtttttctttttttaatttttattttgaaataatttaagatttataaagaagttacaaaaataatataagaaattcctgaatactcttcacccaagttctccacatgttaacatcttacaaacctcagtacaaataacaaaatcaggaaataaacttgatatcaatactatctaatttacagacttatacatttcccggtcgttccactaatgcccttttttatggtccaggatccaatccagtccaggatcacaccttacatttagttgtcaagtctccttcatgtgatttaatctggaacagtttctccatctttctttgtcttttagggtcttgacctgcccccaccccccccccaccaccccaccccccgtttttttttttaagagataaggtctcgctatgttgcctaggctggtcttgaactcctggactcaattgatcctcttgcatcaaccagcctcccaagtagctggaacgacagacatttggcactgcgcccggctggatcttgacacctttaaagaatactagctagctgggtgcagtggctcacgcctgtaatcccagcactttgggaggttgaggtgggcagatcacctgaggtcaggagtttgagaccagcttggccaatatggcgaaaccccgtctctactaaaaatacaaaacaattaaccaggcatgatggcaggtgcctgtagtcttagctactcgggaggctgaggcaggagaattgcttgaacctgggagatggaggttgcagtgagccgagattgtgctactgcactccagagtgagactccacctcaaaaaaaaaaaaaaaaaaaaaaacaattttttgtagaatttgggtttgtctgatgttttatcaaagttaaattcagattacgcatttggtaagaagaccacagaagtagcattatgtcttgccatagttttgtgttttatttttagcttattttgaatattgatagattaacagaagttgcaaagattgtacagaaaagtttcatgtacccttcacccagtttccccaaatgttacatcttatgtaacttatggtacaatgtcaaaacctggaaattgacattgtatacagctttgtgccatgttatcgtcatgcatgcatatccagacagaagtttccatcaccacaaagatctccctcctcctgctcctttatatagtcacatcactcccctcactttaacccctagcaaccactaatttgttctctatttctataattttgtcgtttacagtctattttgtaaatggaattatacagtatgtgacctttcaagatttgctttttttctctcatcacagtgcttttgaaatccatccaagatgtgcacgtatcaacagtttgttccttttcattgctgagtattgtatggtatcttataccattcagccactgaaggacatttggatatttccagtttttgtctgttatgaataaagttgctgtgaacatgtgtagaggttttgtgtggatataggttttcatttctctggatgctgttatgtgttactgtagtttctaaatcaattagttttctctctcttattctagtccttgaaggtaaggagcatgccttacatctctgttgtctcacggcttggcacatagtaggggctctctatgtttatggaatcaatgagtcaaacaaaaatcttacacgtttaatttaaatgtgtaagatttctaacgatatagagccactggtctgctccagagaatgcagattgttgtagtattttgtatgccattgtttatacatttatgtgtgtcattttacaggaataattatgcatacatgtgcagtatattgccccagcataccactaccagtgtacgtttttggtaattatgtatttgtaggagatgtgacattgcttgttaagccacatgtgatatgagtgtttctgcctcagcaggcctgtactagagaaggcctgtcctgtgttcctattctccatacccattatggtgttgagggtgagtgaggatggactgttactctaatgtgatgccattaaacaaacaagttggaggaagatcagcttaccttctttcagactttgctaaaatgttctttattactagcatgttttctttgatgattttatcccacacattttgcttcagaatcatttcttggattctgttgtttagtatcccaaaaaggttgagtgttcttttagaacacatacacgcatgaactaagggtctcaaaagtaaatataagaaaagaacagatgagaagatggaccaaatgtagaagtaacatcacttgaggcttgagaactgtctggctagtgtaccatgtatactgtcactaaatggtgaccctaagccacgcatatgccaataattatatctgggaattgtaaactaaggctttttgtcctaaccatttgctcagcagatgagtattgctgaattgttcatttatatttctcccactccctgccaacagttaatgacagttcggactatcacaggaaatatctactatgcaaggtcaggaactaagattattgggaaggttcacgaaaagttcacgttgattgatggcatccgcgtggcaacaggctcctacaggtaagtctctaacccgtccaaggcttattaatctaaactcttcagaagaagcatgtcatgtaaaggtaaaagccttttcctctcaatgggagcctgtatggccatgcattctgatatgcgtgcatctgtgtatagcagctggttatcaaagcctcctgttagaggcagtttgggtgggggtcacttcccctgtcctgtagtccatagattaaaatgcagaagttgaacttgtattgagacaacacagtcagcaagtcctagatttcaagccttggcccaggtctgcaggggacgaactgggggttaacagcaacacacagtctggaatcctggttccttagggatctggacccagcttgccctgctcacttgaaggtaggggcagttgcaggcatctccattagtgttgaaggcagagccagagctgtcagctttagactcaaatcctccacgttgcttcaagccttgtaatttagagctttagtctagaaaatactgattatgtttctgacccacctttgaagtgtcacattggcaatggcatcttaaggtagagagcaggaaggttgaagagagggtggggataatgagcggtttacatgaatctctagaatttgtgccatttgtacatatgtggctccaatggttgtatgttctgccgcctctgcggtagattgtctgatggtttgcatgaggtgtgtctgtagaattttaaaaagaaaaccccatttttgaagaaacacacaaccctgagtgataattacgtgtcagccctgggtaaaggtagaaatgtgaaggcttgtggaaaatgaggcagtaagatcaagaaaatcttgacacctttctttttcaacagtaccctcattgctcagaacaaaatttgaactttcttcaccaaagaggctgtgggaaaaaacaaattgaactctttttcttggaatttccttttgtaagaagtttattaaaaaaatttgtttttaacctaagtaggatttatctatattaaccaaacttagctacaaatggacttttgctgttctaaaatataaaaactaccctctccaaatgaaattgatgacgatgatagcttccatttgttgaggaggttttataatcttggtgttggataggtgctttatttacattatctcattgaaggctttcttttttttttttttcgtgatggagtcttgctctgttgctcaggctggagtgcagtggcgccatcttagctcatttcaacttctgcctctcagattcaagcgattcctgtgcctcagcctcccgagtagctgggactacaggcatgccaccatgactggctaatttttgtatttttagtagagatggtgtttcgccacgttggccaggatggtctcagactcctgacctcaggtgatccgctggcctcggcctaccaaagtgctggggttacaggtgtgagccactgcgcccggcccagcctcattgaaggctttcaaaagaatcttccttctcaggctttgaaggcagttttcagggggactttgcattagccatatcttggttacaggagacagagttgactgtgttctatgatctctgtttgaaacctacttctggtacaaataccaccattagtggggtgatggcaagtgtcagctaactctcaaacgtactgactcgaagaacccggaaggaagcatagaaaggtacagttggttttcagttcatcttgacgtaggagccacacgctgatcagaacactatatcctggttctgatgttttcgagttgacttttgttcttaggcaggctctccctttgaagtcaacgatcctggctttgtttattttttgtttttgagacaaagagtcttgcccaggccggaatgcagtggacgatctcggctcactgccaagttccgcctcctgcgtttacgtcattctcctgcctcagcctcccgagtagctgggactacaggcgcccgccaccacgcccagctaacttttttttgtatttttagtagagatggggtttcactatgttagccgggatggtctcaatctcctgaccttgtgatccggccaccttggcctcccaaagtgctgggatgataggcatgagccaccgtgcccagccagatcctggctttcttatatggcctttagtagctgtctcccaaagggtgaaactctttcactcagaattactatcaatcccttctgtcagaatccatttgataaagaaaaaagaaatctctgaaaacttacttggctctggtgggatcacatgcccaccctgaatgaatccctgcatccaagggaataggatactctggccagtgtggaccacatgcctgcccctattgtggttggagagagtatgataatgaaagctttctggggtacaggtgggtgtgagttctgctagcagaggagggaggcggggaagggacaccgtacaggcaagggcacatggccactaatcagctctaaaatgttttgagccatggtgttttgtgaaaatggcagcacagccccatgactgtgggtcctccactgttagtgaggaagactacttcagcagccacaaggacaagcttgagggcaggaaggccactgatgttgccactcaaacagtagcaaggagcagggcattagcaattcatagggcctagggtctgatctggagtccagcagtagctcccctctgtgataatccctttatctggtttccttacctttaagatgggggtgctggcctaaatagttttcttacctttaaaatggggatgctggcctaaatatttagaagccctattttttatttttaattaattttttgagatggagtctcgcccagtcatggaatctcgcccagtcatggaatgtgcagtggtgtgacctcagcttaccgcaacctctgcctccggggttcaaacaatcctcccacctcagcctcccgagtagctaggattacagtcatgcaccaccacgcctggctaattttttatgtgtttttactggagacagggtttcaccatgttggccaggttggtcttgaactcctgacctcaaaggatctgcccacttcatcctctcaaagtgctgggattacagtcatgagccaccgcgcctggccccctttccagtttttaaaaactctgaggcaaggaccaggtgaggtggctcacacctgtaatcctagcactttggaaggatgaggtgggaggactgcctgagccgaggagttcaagaccagcctgagcaacatagcaagaccccgtctcaaaacaaacaaacaaacaaaaaaaccctctgaggctgagcatttagtgtgtttgttaaacagttggcctttttacttttatggtaacacacataaatgttatatatgtgttaaggctagttaaatacatgcaaatggtaggtatgatatcaccaaatttgtgacccttatgtggtaagatacctgtactatattattcagatggacagtgagtaaaacaaaattgctcatccttaccagctgctgtttgtttctttttaatctttaagttttacatggacggatggcaaattaaacagcagtaacttggtaattctgtctggccaagtggttgaacactttgatctggagttccgaatcctgtatgcccagtccaagcccatcagccccaaactcctgtctcacttccagagcagcaacaagtttgatcacctcaccaaccgaaaaccacagtccaaggagctcaccctgggcaacctgctgcggatgcggctggctaggctgtcaagtactcccaggaaggcggacctggacccagagatgcccgcagagggcaaggcagagcgcaagccccatgactgtgagtcctctactgttagtgaggaagactacttcagcagccacagggacgagctccagagcagaaaggccattgacgctgccactcaaacagagccaggagaggagatgccagggctgagtgtgagtgaggtgggaacacaaaccagcatcaccacagcatgtgctggtacccagactgcagtcatcaccaggatagcaagctctcaaaccacgatttggtccagatcgaccactactcagactgacatggatgagaacattctctttcctcgaggaactcaatctacagaagggtcaccagtctcaaaaatgtctgtatcgagatcttccagtttgaagtcttcctcctctgtgtcttcccaaggctctgtggcaagctccactggttctcccgcttccatcagaaccactgacttccacaatcctggctatcccaagtacctgggcaccccccacctggaactgtacttgagtgactcacttagaaacttgaacaaagagcggcaattccacttcgctggtatcaggtcccggctcaaccacatgctggctatgctgtcaaggagaacactctttactgaaaaccaccttggccttcattctggcaatttcagcagagttaatttgcttgctgttagagatgtagcactttatccttcctatcagtaactgctccgtgttcagactcctggtttcttccaggcttacagtggacatcatcagcttcctgctttaaaaaatatcttatgtccctaattgcctttcttttacctgactttgtcacctttgttgtctttgaattctttaggctgcatattattttacatgctttgttttgtcatgtatataccaggtattggttttatggtttaaacactatggatacaggggtttgttttgcacaattttaatagtcatgcactacataatgatgttttggtcaatgacagaccacgtatatgttggcagtctcataagattataatactgtatttttactataccttttctgtgtttagatacaaataccattatgttacagttgcctacagtattcagtgcagtaacatgatgtacaggtttgtagcctgttttgcatttttcttaggttgtatgctcttctgttttaaaggtttgaatcaccagcatttttgtgatcaaaatcctatttagaaaaaataaaactactttctgtttatctctttagaatatctgtgttcttagcattaaataaatataaacttgtgcttctgtactttttccccccctctgacacttttctctttaaatctgggagtatgtcacaaattaatgcacctaatagatataggtatatagatatctatatctgaaggttttttaaatagtgtcagggtgaggaagaagtagatgatccaaactatagaagagaaaatagatccacttaaccttcctcagcatcatgaatattgatgttactctatagtttaagtgaggaaactggccagaaatagcaggcctttgcacatgctctgccttttctcttttcgaagaaaaagcctgagctatttcagtaggtccttggtactctggtactctgcttgtctaccaaaggaggcgttagtgtatgttcctatattcattcccaatattaactctggtggccccatgggcctcatttcatcagctgggtgtattgacagtgatttagccatctaatatcccagagtaggggcaaaagaggacactgacaattatcccagtttcctggtccagtggcaggcagtgtaatggtttctacatccttctaatcaggattggtatggctgtggaatcctgtttttgtctcattctcatggacagacaaaagggaagagagttaaatgatgccttcctccctctcctgacttagctacagcaaaaaagatctataacaggggaaggtgtctgccacataaaatgctgatgcacttgtatcatgagtgtccctacactcacgcgtgtgccaggacttccttatgatggtcaggctatttgctgggttagtgctgtaatctgtggctataaagaaaaggaaaggaaggaaattgatccatgtctgcttagaaacaactctgagctaagcctcgagtaaacatattgttatttgaaatcatcttacagacttaagtcacttcatatatgccatctttgatctttgcagcaatgtagcagagagctatgcaggttaggtagctgttatttccaattttcagatgaaactgaggcactgattaagtagcatattcaagatgacatggcttgtaaatggtgatgcaagaatttaaacacaggtttctagattctaagtgcagtactctgttacatgactatttctctacacggagtatggaagcaggagagagtgtaccttgagaaatggcagttactgcaatggtgaatggaaaactaaaacagcctcattaacaaacgttaagtacaggctgggcgcggtggttcacgcctgtaatcccagcactttgggaggctgaggtgggcggatcacctgaggtcagcagtttgagaccagcctcaacatggagaaaccctgtctctattaaaaatacaaaattagctgggtgtggtggtgcatgcccctaatcctagctactcgggaggctgaggcaggagaattgcttgaacctgggaggcggaggttgtggtgagccgagatcacgctattgcactccagcctgggcaacaagagccaaactctgtctcaaaaaaaacaaaacaaaaacaaaacagcaaaaaaagcaaagtacaacaaaaaaaagtaagtacaaagtcctaatctgtgatacttctttttgtttgtttttgaagcagtctcgttctattgctcaggctggagtgcagtggcacaatcacagctcactatttttttgtaaaggcagggtctcactatggtgcctaggctgctcttaaactcctgggctcaagtgatcctcttgcctcagcccctcaaagtgccgggattacaggcatgagctactgcattcagcctgtgataatgtattttaatttagtttgaaattttaactgaatgttctatggaactgttaataggatgacataacaaaggttctgtgtttagtgtgagaaactgggccaaagaaatgtaaacaaagttctttaatgcaggactactcagaactctgaagtaatgatcacagtgaatttctcagagcagggcaggtatatggcttaccacaaactacctaccacagagtgctctttttgtggagcaggactcaaaaccattattctctgaaagtgtggccaacaattagaaataagagcaagagccgggcgcggtggctcacgcctgtaatcccagcactttgggaggccgaggcgggcggatcacgaggtcaggagatcgagaccatcctggctaacacggtgaaaccccgtctctactaaaaaaatacaaaaaattagccgggcgtggtggtgggcgcctgtagtcccagctactcgggaggctgaggcaggagaatggcatgaacccaagaggcggagcttgcagtgagccgggatagcgccactgcagtccagcttgggcgaaagagtgagactccgtctcaaaaaaaaaaaaaaaaaaaaaaaaaaagaagaagaagaaaaaaggccgggcgcggtggctcacgcctgtaatcccagcactttgggaggccgaggcgggcggatcacgaggtcaggagatcgagaccatcccggctaaaacggtgaaaccccgtctctactaaaaatacaaaaaattagccgggcgtagtggcgggcgcctgtagtcccagctacttgggaggctgaggcaggagaatggcgtgaacccgggaggcggagcttgcagtgagccgagatcccgccactgcactccagcctgggcgacagagcgagactccgtctcaaaaaaaaaaaaaaaagacaaaaaaaaaagaaataagagcaagagatacatggagtcctaagaaaatgacccagtctctcaaagtaagcagtctttctggagttgagtccagaaagtatcatttatatggcagagtttttcaaagtgagatctgaggaccacctgcatcagtcttggggtgcttgggtgcttccatttaaaatgctgattactggtttcactcccaggggagcggggtatgagtgtggcagcctatgtagttcaaaaatatttgttattcctccctgggagaaaattatatccctctgtctactgtcagatttggccatcgcagacttagctgtgaatatttcagcatatatatctaaaagataactgttttagaaaacataatcatggccaggcgcggtggctcatgcctataatcccagcactttgggaggccaaggcgggtggatcacgaggtcaggagtttgacaccagcctggccaacatagtgaaaccccgtctctactaaaaatacaaaaattagccgggcatggtggtgtgcgcctgtagtcccagctattcgggaggctgaggcaggagaatggcgtgaacccgggaggtggaggttgtggtgagccaagattgcgccactgcactccatcctgggtgacagtgagactctgtttcaaaacaacaacaaaaaagaaaaccactttaccactgtcacacctaaacaactttgatacaaacttatcaaataaatattcagtgtttaaattcagttgtctaatttttttctccccctgatggtttgtttgaattagaggttgatccatgcaggcttgacattctcctattaaaggaatcaactgaagaggtggccggccaccccacctctgtaggcagttgggctggggagtatctgtcgtttacttatgggacttaaagcgactaacaagaaaagctagggtacaaggtcgtgtaaatgaaaagttacatgaaggaaacccaagggtgagggataaaaagtggagtctggaatgaggcttgaagagcccgccatgacatacacacctacttcatgaggccacacgtttaagctttccaatagtgaatacagagaagcctggtcagatacaccattcgcagtgtccttaagattaaagtaaatccagatacagaaaggacagttattccccacggtggcatatgcctgttgtcctaggtatttggagggctgaggcgggagggtggcttgagccagaaaggacgaggctgtagtaagctgtgattgcaccactgccctccagcctgggtgatagagtgagaccctatctcaaaaacaacaaaattattccaggcactaagataatttctttcaaggatctttttataaaaacgatacttataaaaatgacattctggtaatcacattccgataataaacaatgacagatactctggggcatgcccggaccctgaactctgcagaggcagttgtctgaagcagtaaatgaggtgaatgtattcaggtgtattctgtgagcatggaatacataccttatgttgaatatgtttagatctacattgttaggctaagtttacacacacacctagatgtatgccccagtttgcctggcagagttccagttgatgcctcttatccccaagtcccatctggttaacacctccttttattctcaaaagtgtcccagtttgaactataaagtatataggcatcctatatagaaagcacctcgcagacctaaggaggctgtccccagttcacccaacttcattgaattgtgtgtccctcaggccaaagaaacagaggctcctctggctgcggaatcctttccagtggatctttccacaactgtacccaaatctttgaagctgcgtcagcacttttgcttatgctaataactgtgtgaacgtgatcatttgtgtgcaaaccaacaaaccagacaggtttacatatgttacagcaagttgtggaagactgcaccttagactcttgggaaaatcctgatataatgcaatttagtacagcaattctgtaaaggaccaccacttttcagtctggggatggctgcctgttgtctagcttgatggtggcaaccaaagggcagttagcgtttctcttaggaagctaacagttgtagcgggttgatacatggatggttgtaatggacatctattatttttgcttcattcattcaatcattcatcctctggtaatctcacgctcagatttccctctgaggaaccgttctgttcccagctttcagtccatgtgtttctgctgaagctgacctaacccgaccctggatgtggaacatgggaccaaggcctaagtccattagtacattagattcctgggcttagtggttgatttagggatggatacatggcctgtcaggaatacgttgccaaggaattttggaaagaggtttaatgcttaagaggatgtggtggctaaaactggcatggccactttgttaccacgttacgcctgaatcagcagaacgtggatcaatatgatcagaaagaatcctggttatgtggtatgtatcctgatgcagctgtgtctcaagtcagaactactcttggacttttcattttatttttatttatttattttttttggaggcagagtttcactcttgtcacccaggctggagagcaatggtgtgatctcagcttactgcaacttctgactcccaggttcaagcgattctccagcctcagcctcctgagtagctgggattacaggtgtgcaccaccatgcctggcaaatttttttggtattattagtagagacgggctttcaccatgttggccaggatggtctcaaactcctgacctcaggtgatccacccccctcagcctcccaaagtgctgggattataggtgtgagccactgtgcccagccagactttttagtttatatgagccatttctgcttaagagaggttgggttgggttttctatcacttatatccataaaagtcttaactggtacaaaaatgaaaaccctaaattctatgccttcctgaacatggtcaataggtttagtctggaaattcaaagcaaaaaataccctttatcataggcacagaaaaacttccatattgtaacacgattttgaggaacattatctttctggaaagcttatcatttggaagttgcaaaatacacctttatgtaacaaaatgattagacttttatggaattgttggcaatcaactaaataaattctggatgccatctcaagaaatatcagttttaatttcagagcagttattttagcccattctttctgaaaatagttaattaggaagactaagaatctgttgagaccattcctagtttgtggaaataaaaccacaacatcaacatgcaggttattacttaggtattttctctaacagtagtctgtgtaggcaaaataaccccttggggagagttggactttgagaactttctaaggcagatgaactaattttcttccaggagagtgtagctctaatgattttaagtggcccatgtagttgagcaaacactggcctgggaattagaaagcccgagttctagttttagttctgatactaaattaactcattgattctgaccaagtccttttaacttctatgtacctcagtttcctataagacaagaaattcaggctaggtgttaagtatggtctcctccagctttaagattatgatccatgagaccagcctgaccaacatggggaaactgtctctactaaaaatacaaaaattagccgggcatggtggcgtgtgcctgtagtcccagctactagggaggctgaggcaggagaatcgcttgagcccggtgggtggaggttgcagtgagatgagatctcgccattgcttgccagcctgggcgacagagcaagactccatctaaaaaagaaaaaagattatgatccaataatacaggcatggccgatttactgtctcttcataaacaggaaggtttcattatatgagtaatagataaaatagataagttattttatttatttttttttctattttttgagatagagtctcactctgtcgcccaggctggagtgcagtggcggatctctgctcattgcaacctctgccttccgggttcaagggattctcctgcctcaccttcccaactggctgggattacaggtgactactaccacacccggctaatttttttgtatttttagtagagacagaatttcgccatgttggccaggctggtctcgaactcttacctcagttgatctgcctgcctcagtctcccaaagtgctgggattacaggtgtgagccaccgtgccaggccatgaaataatcttaaaagtggcatttatttcattttgccttatattcatgtataaaccttggtttccgtatttgggctgttagtaaaataagacaaaaataaaacaaggaaaaatcaatgtcatgaagaactaaaactaagcctaaagcatgatgtttatctgtatattactcaataggcactgctactgggctacgaatgtgaatgtgccatggtcctcgtcctcagtaagttccctgtgtaatagtggcggcaggtaaaccacagatcaactaaaactaagcctaaagcatgatgtttatctatacattactcaataggcactgttattgggctacgaatgtgaatgtgaatgtgaatgctgacatggtccttgtcttcagtaagttccctgtgtaatagtggcggcaggtaaactacagatcaactaaaactaagcctaaagcatgatgtttatctacactcaataggcacttgttactgggctacgaatgtgaatgtgacatggtcctcgtcctcagtaagttccctgtgtaatagtggcggcaggtaaactacagatcaactaaaactaagcctaaagcatgatgtttatctacactcaataggcacttgttactgggccacgaatgtgaatgtgacatggtcctcgtcctcagtaagttccctgtgtaatagtggcggcaggtaaactacaggcaactaaactacaggtcacttttctcacaaaagtgagaatacagttcctagactacaagggggaatgtttaagttggatagataatttagagctagccctttaagggataaagataatttaaaggatggatggagaattctaggccgagggactaacagatattgagtccctacattaattactataaaaataaatcaaagaagattcttacatgaacctatgcaggtaaattcagatttttttccccctggtggatttgctctgagttgaggtaatgagagctaacattgattcagtgcctgctatgttttgcactgttaggtactttacatgttatctcatgtaatacctctttaaacctcattttacaactaaaattaaatgacagctaggagctaggaaatggcaaagttacgattccaagtctggactggttgtccacaaaagcccctgctcttgccataatgatgccacttctttcaaagaattcagaattttcttcacagctttaaaaatgcatagattctgaagcctctcacttccttccaattagttgcctacctagaaagttatttcctccacttgagctcatcaccccttcttagcgctcctttggattactgtaatttctttttctttgacctcacctttcgtctgatggattagtgtaatctttcccaaatttgttaatctgaagaattcaggagcttctcaaaatgcaggttcccaagccatgctccaggacatcgattcagaattggatcaaggcctagaatctgtgtttttaacaagcatttgactcaagggtatcaaattggaggaagcactgagttggtggactaccttaattgatctacccattttcagtctcttctgccaacccattcgctccaccccacccccagtccgtttttccgttttgccctcaaggtccctgaagacttccatatcatttcgcattgttttatttggggcactgtgccgcactacctgggcccacagcaggcgcgcaatatttactgacaaatacaacccacgaggtagttcctattattacccttcaatttgaaattgagaataaaacagaagtcgacaagttgaggtagcttgtgacatcagtatttcgtatttaatccagaaagcactgcttcaacgcccagtgcgtgcaaggttccactctcgggccagcggtcctctcccaaagcccgttcttcctaagtgtgcggccgccatccaggacacgccacgctcgtaaaaggtcacctgaagcatctaccctccacgctcaagaggtaggcggaggagcgcgcccttttctccaaaatggctgagcagggtcacgtgggctcgggggcggggccggtgcgctcgccggagcctggaagtgggtcacgtggctcagacgggggcggtagctgtgggggcgtggccgtcacacggcgcgatccgtctgggcagcggctcttcgggggccacgccctccgggccctgggggcctagcgcgcgacggtggggtggagctagcctcgtgaccttttaccccaacatggctgcgcccgtgggaccggtgaagttctggcgacccggtaaggcccttggtggaacgctgggcagatgcggcggcctgacttcggtcttggcgccgcggccggcgccctggggccagcagacctgctcgcaggcctgacctcggcgagctgggcgctgccgcctctgtgcggggggagctctggctcaggctccccagtggtcccgagggatttgggggtgctcccctagcgtgagcagaaactctttgtgaccttgttaaagtggtccagcctcctcaggcctcgtcttcctcgttactgatgcttgtcctgcccaccccgcgagatggggaatcctaaagctccctctcgtgtctcgttagcgccctggggttgcgctgtggcccgacagacaatgctgctcgctgctggaggcttgcaagcccaagttatggagtcagactgtccgggttcgaattttcgtctctgccttgtagtagggtgaccttgggcgagtcacttaatgcctctgagccatgacttctttacctgtaaagtgggcagaacaatagcttctatgctgtgggcttaaatgacaagcagaacgcgttgtcagacttagaataaatgctcaaaaaaagggaaagtgtgttattttcttttaggataattgttgtccactccgaatgtctactagaaaagggaacagtccttcatattggctgccagccacttcctctcttacagactaacacgaatcacaatcacaaaatgctttacttgttttgtcttgatatttactcattaatcaggtttttactgaatgtgcatatgccagaccgtactagatgcattacttcctctctgcaaacagtttcttgtaaaaaacaaaagtttttaaattacagctaccagcttgatttttttctaccacctgcacccctgcaggtctggatgtgcaaagtatattgcagcaaaaatgaaatgacaccaagaatgtaatataagcaaagcttttaatttttcagtggttctctgaaattctgaccatgcatataagtgatgtgagagataaacccaagcaagagatatgtttaatgctttttaaaaatttgtagtctgtcacttgacagttttatggttcagcatttcaagtcatcagccaattatccatcctgagttttatttgcatccaaaactaggaacttactaagtaatgaatacttttaatttattcacgcttttagtaacaggtgaaagtgttaggtataataaagagctgaattaattgtttgaaatcagaccagggtactattttggttaaagaacgtggaattactcttaagagttctatttcattatttagttcatccattgagggtacacttattgaaaacctaatcctgtgttcaggagacaaatacagatgctcagggctctgctctcaagttactgtctctctcttaattgaatataaagttagatgtcctctagaagagattttacaatgagacagagtaaggtggtggtaaagaagatgagctctagagtcagactgcagtgcccatcatgtctaccacttactaagttgatgacttgatagtcacttaaattctcaaagtctcagttactccatctgtaaattgggtataatacctaccctacccaaagtagtgttgtgaggtttaaatgagaataacacacaacaggatcttggcactagataggttactattataattatatggaagtatggaagagggagggaaagttgaatgtatggataagaaatacttcattaaggtggtatttttggagtgaacattaaaggatgaataaggttttgtttcatagagaaatggaactcgaagcaaagggtgcagcatgaacaaaggcagaatgggatttgtgcctttagaatgtccagaaagccaaaataacagagcagtgtgatagtgttaagtgctagggtatattttggggtatgacaggagatgaagctagaaaagtaggtaagggcctcattgtgaaaggtcttcatgacaagttaaaaagtttagacttcactgtttttttgttttctttcttttttttttttgagatggagtctggctcagccgcccaggctggagtgcagtggcgcaatctcggctcactggaacttccacctcccaggttcaagcgattctcctgcctcagcctcctgagtagctgggactacaggtgtgtgccaccacacctagctaatttttgtatttttagtagagatggagtttcagcatggtggccaggatgatctcaatcttttgatcccgtgatctgcccacctcggcctcccaaagtgttgggattacaggcgtgagccactgggcctggcctgacttcagtgtttttaagcaggaacaaatcaggtttactttagaaagataacactggcagtggagtagagagtggatggaggaggaaattagagaaggtactagtgaaatccaggagggatgttaaaaaccttaattctgacctgggagcttagaggaggtgcctgttggagagacattttagaggaagatgtgggagaagatgaagtcagtaataactcagatttctgggctgggtgactgtctaggttagtgattctctaattttgctttatagttgaatcacttgggaagctctgaaaagtcctgatgtgcacttgcacctcacaccaataaattagaactttggaggcctaggagccaggcatcagtgttttttaaagtctctaaggaattccagcatgcatcaaaatttgggaaccactggtctaggtaaattgtgttgtcattagttgacatgggaatagctttagtacacagttattgggccgttgctttgtgttagtcactttcatttacacatcttattaaacagtcacagtatctctgtgatgacagtaatactcttattttagtgaggaaattcaagatatgaagtaggttgtgggaaatgcaaggtgaaagtcagggaagctgatataaggctagacattcaaatcatgaacatatcctgtaggcctgagcctgtgattacagaggtctttcagacagtctaagtgagtgaagttgcttactggaggtaatagggagtggtggggactgtggcagagtgtgcatacactggatagtatgtacagtggagatctacagtagagcttacatatgctttctaaaatagggagttgtactcaggtccacctaattgttatcatatgggttcagagttgcccaattttttttttaagaagcctaatatccagatctgaatgggaaaattttatgtgttgttttaaatgaatgatttaaaacattttaacaatagcatgtctgggtaccttaagatacccatttgtggtgtctaccttaggagtgtgacttaagggccttgtatgacctgcctgagagttttctacaaaaatcttttacttaatttgcaagtacacgtggatccgaagggcctgcccattttcgtttgctcatttgataaatatttcatgattgttgaccatgtgcatgacgaaaactttacaataggttttaagctttttttgacttgacccacagtaagatatagcacacatacacaactgaagaaaaagttgttcataaacagtattgctttctggaatgtgctctgatgctttctattctatttcattatttaaaaagtgctggtatgacatactacattgatttcataacccactaatgggtcaccagtaaaatttttaaaaaccaagttaaagggaatgaggaattagggatatcagccttgttaagatagggaaatgaagatgttcatagtttgcaaaagttataaagttgttactcccttaagcatagagcgtacgctcaaggaaaaatcaatcataggcagccacagaggggtgtttatagagggaaagcagccctgatgttctggtttggttgaaggaagtcttttatgaggagaaggtatactgtttatcaactgacatagctgttcttataaaagagctcagctgggcgtggtggctcatgcctataatcctagcacttcgggaggtcgaggtgggtggatcaccagaggtcagaagttcgacaccagcctggctaacatggtgtgaccctgtctctactaaaaatacaaaatgagctgggtgcggtggtgcgtgcctgtaatcccagctactcgggatgcccaggcaggagagtcgcttgaacctggaaggcggaggttgcagtgagctggcatctcgccactgcactccagcctgagcaacagagactccatctccaaaaacaaaagctgataatagaagagatagattggggctgtaggttagagacaagggaggaatacggtagtacaaaagacatgttaaaatattccagagaggatatgaaggtttaaaacatgatttgaaaaggcaggaattcaggacaaaaacacagcagaaaaggataaggtattctttgtcattgttttcttgagtaacaattacaaggaattattaagatgtagtgacaagaagggaaggaaagaaagcctgtctctttgaggacaggcattgttccaggtcctgttccatcttttgtcttgttgaaaggaaggtcaacattttggcaaaagcaacatgacagtgccccacttacctgatttttggccatcttgaacctctgaaacacaactctgttcctggaagtaaatggaaaagggtcagagatctaaagcagtgattctaaacttagctctagggggtctacggacccccccgaattttatattctggtaaattctggtgtgttttttaggagagggagttcatagcctttatcagattgttgaagcaatctgagaaccctaaaaagtgtaaaagtaagtcactgagctgaatattcttgttacaaagctcctgtgctttcacttagcatcacagattctgagttcagaagacctaggagatgatggttattggttattatcactgtagtgccccagcaggaggctgtatagcatgtgtttgatctagggaggatttttattcatttacaaggcagcaaactccagtgctgaaaagtgtgaccttttggaaatatcttccttacattgagttgaattctgaaccctgtgtcatttacttattactcctagttctgtcctagagttacagcagcaaatcagcatgaaaagttatggaagctgctcacaaaatttaaagttatgtttctcctgagttgtttttctgtttgagctaaaactgtatggaaccttcaacaggttttcatgatgggatatggcttccctattcttcaccatcatgatcaccagtttgtcattgttattagcaagaagccggggtgaagatctcttgtttaatctgcccagcatggcggttactgagaatagcatttcccatctatccactcccgattccatggttccaatggggactgtcatttacctcatcccattccactggccatggttgattgtattggggtggggattggacctaagctgggagaagtcagtccctgtctgtccagtataaaagagcctcccccaccccccattacaacacatacctgggactcccagtcccccttacgttgtctttatttctctccatagcacttatgaccacttcatgcaccaagttactttccactgagaggaagaattaaaaaagcaagtgagctccgtgagggtagggctggcatctgtattgttcactgcagtgtttctagtgcttagagtggtacgtgacatggagtgggcccttggtccatccttgctggtccttgctggaccacgatgaatgattggtagaggagttgtaagcgtgaaccctggcactgccggcagccgtctttccagctcctgtacagtagccaacctaaggggctggaaggaacctgcaagacgtgccaagatgagagaaggagaaagccatggctgctttgagtgcccagtttctgtcatctctgagccttattgccatcctacagtaacaagattcatccttttacctcagctaattcccactgggtttctttcacttctgttaagaattcagtaataacatggacatggaggccagaagtaaagacactgtgctctgtaatacacagttctgagtggccaatttggagcccagtgggactgccatctcgtttcttttttctttttttttggagacagagtcttgctctgtcgcccaggctggagtgcaggggcccgatcttggctcactgcaacccctgcctcctggattcaagcaattctcctgcctcagcctcccgagtagctgggactacagacacacaccgccatgcacgcctggctaattttttgtattttagtacaggtggggtttcaccttgttgcccagactggtctctaacccctgagctcaggcaatccgcccgcctcggcctcccaaagtgctgggattacaggcgtgagccactgcacctaaccctgtcttgtttgtttttgacactgcagtgaagcttttagggaagatttttagttcctcgtaggcacttttctggattctttcctaaagttaaggttgaatacctttgagtagtttgagataaaaagtattgcttcttctgtatatcttcatctttgaaagtttataaacttaacacctttttctgttcattgtatcagagaatctgaaaaaaaaacatttctgctgcaggtacagaggggccaggtgtaagcatctctgaagagagacaaagtctggctgaaaactctgggacaacggttgtttacaacccttatgctgccctttccatagagcagcagaggcagaagctgccggtattcaaggtacgtcaaataatcatgttcaacctgtgggcttgaatcgtgtgtctgcattagctttatgctcagcactgaagggaatgatggcctctttctagaacacagtgagctcagagaaacccttactgtaagggatgacttttcatactgtgtattttttagttaaccttataaatcttgaaagtccttaagattttttcagttgcatcgtacatactggaaaactggaggaattagaatgacttttgttttcccctttattcctttcagctgtggacaatttcagatatacagaaaagtagagaaaatagcagttaatttctatataacagattaccaacatatggccaatttttgctttatttttaaagtcactcctttaaacaagtttaattgggaatatgaggttgtttctgctgaagacatcagttaatactctgacttcctctgagacagtgacaggattttggtatggttactacttaccaagtgcacatccagacactcagttttattagcgctcacgaaacagatgtgtgctcagctacaagagaccaaagtgcaaactagaattcattcagaactgttcatttatggctagcaataattctccagtacagatggacacagttgacatatacactttgtccctgttggcacatccacatgggaagccaaattgtaatcaggaagtacagagccaagacaggttacagaaatgtcatacagcccctgatgaggggtgaattctccctgctccacaggatgcccttggaatgacccgagtaggtgtggccaccagcatctgtgtctctttctttctcctggacggtgctgggtgaaagttgctgtgttctatctatctgtctgtctgtctgtctgtctgtctatctatcagacagggtcttcctatattgttcaggctggtcacgaacccctgagctcaagcagttctcctgcctcggcctcccaaagtgctgggattacaggtgtgagcagccaaaaggtgccaagttcttatactcatggagttcttttgactagactgtgctgataattcctcttctattaatgtgttctttctccaaacagataggcaacagcagccttcttaatttagccagattgccttacttggagttttatgtggctcccaatattttagtcacaagtgaactgactgtctctgggtttcttcctcaagtgactaacacattcactatgtatgaatgttagcaagtttgactttcaggagatgaaatgataggtttactattgctttctcaccactgagggacagtttgagctgtgatgaagtgtccggactctggagctagacttcagggttcaaacccaagcttcaccatttgtgtgctgtgtgacctcacttctccattctgagcttcttttctttatctgtgatgtaggactacaggagcacctacctcataggactgttatgaggaccagatgagatcatccatgcagagcatttagcaagatacctgacatgtagtaaatgctcaagtacaagggaaattactgtttactcaagtatttaaattttggccttttcttgactattctttgtctcccaactgtacttacaagataacataaatgaaacagcaaatgaaaaaaaaaaaagcaacaagaagttaagaaatgtttatgaaattaaaatggtaagaagaagggtgtaagttactgatataaagcaaagcagagtttaagtacagttgagatcttataagatgttgaagatgaatcgagacaaaaaggaaaacaagttacctctacgccatcctttttccctttcaaacaaaaagtaaaagtagctttaaaaacagaaattggaggctcggtgtggtggcttacggctgtaatcctataggctttgggaggctgaggcgggtggatcacttgagacaaggagttcgagaccaacctggcaaacatggtgaaaccccatctctactaaaaatataaaaaattagccgggcgtggtggcacatgtttgtaatcccagctacttgggaggctgaggcaggagaactcttgaacccgggaggtgggggttgcagtgagccaagattgcaccactgcactcctgcctgggcaacagagcgagactccatctcaaaaaacaaaacaaaacaaaacaatgttggaactaaagcatcaagagattgttaaagatcactgcctcttccccagcaccattatgaggccacctgttcccttgtctgccttctttaggctgctgtatagacaatagtgactctatcttggatgcaagtctgccatgttcacttctgtttagacccagtcttataaatgcctcctgatttctgctttgtatattgtccttagtgtaagaacatgtcaacctctctgggggcagcactattgacagcttcttgttttgttttgtttttccccaaaaacagtctacgcataaacaagtagatacgtgtttgccctaagaagaatgcagttactagggtattattcacactgttctacatctcacttccttttcttaacatatcttatagttcattccatatcagtacaagtagatatttcctcttcttaataactacaaattattccattattggaatattttatgactgatttaaccaaacttttgttgatcaacatttaggctgtttgaatttttggctattataaacaactctgcaatgagtatgcttgtatttatgtctttgtacacatatagtatgtagcagtatgtctataatttcttgttttttttgttttgttttgttttttttttttttttttttttgagacagagtctcaccctgttgctcaggctgaagtgcagtggcatggtctcgcctcactgcagcctccccccgcctgggttcaagcaattctgctgccttagcgtcctgagtagctagtattacaggcactttccactgcgcccagctaatttttgtatttttagtagagacagggtttcaccatgttggccaggctggtcttgaactcctgacctcatgatccacccccggccctggcctcccaaagtgctgggattgcaggcgtgagccacctcacccggcctataatttcttataagtgaaaatgtaaagggcgtatgcattatgtattttgataagtgttaacacgattgcagttgtattcgctcatactgagaggaacagtacctgagggttagaaatacattttgatagttctacttaaaattcactttcctttgaaaacagctcatttcacaatgtttaaatatcgttgtttaggtcttttgagacaatgtatggctatttgcaaggtgtgttattctttttcagcttaggaatcatattttatacttgatagaaaattatcagacagtggtgattgttggtgaaacaggatgtgggaagagcacacagattcctcaggtgagtacatatttaataagtgtctttacacttcgatttggctggaagaattttgtaacttgagagctctctttactatcatttacatttttaaggtctcctttcaggaaatgttcacttcaactagatattttttattaaacttttagggcttataatttctttggtgagtactaaagtaacagtttgtcttcgatttattataattccaaaatagtaatggaatggccatcttctgaaagttacaatggagatttattcaaagatgtgaaatatagagtttttatccttaaatagttacagttgaaggggtggggtaaaatgaattttgctgtagttgtaaataaaaattggctgttatagtattatgcagtgctatggaagaaccctttcttactaggaaaaatcctatgtgatgtggataggagtagaaagaaggatcaagaaaggccttgtaaaggaattggcatttgaaattgaccttgactgggagctgactgagaagatattccaagccagtgaatattgtggttagaaatactggggtggagaagtgtagggtgagttcagagtgtgtcttaagaaccttaacttgaagagtgaagactgactgagcttgagagaccttgcaggttcttacttccttttttaatgttaattttcttgaggtatgacatatatgtaggaaagtacctatatcataattgtacaccttgatacatttctgcaagtggaatacatctgtgttaccagcacccagatcaagaagcagaacattaccaaaacctcaagaactcttcttctgtgttctgttctcatctctaactgccatgtctgcttacccctacaatcatgaacacaagggtagctcttattctggctactaacctcataaattagttttgcgtatatttggaattttataaaggaataatatagctgcttttgtccaacgttatgtgtgagtcttccttggtgttgaattagttgcagtttgttcattctcattactgcatagcagggttcggcaagtcacagccagtgtgccagatgcagcccgctgcctgttttgtagagaaatctttgctggcacacagccactcctacttgttgatatattgccggtggctcctttcaggctaccacacagggttgaacagttttgacagagaccctacgatcctcaaaacctaaaaattaccatctggccctttacagaaatgtaaaatgtaatgctaacccctgctagttagtattccactctatgagtattctgtggtttgtttatttttcctgttgttactgacatttgagtcattcctagtttttagttatggatagtgctgctgtgaacattcatgtgcttgtctttggtgaacgtatgtgcacattctcctgctgggctctacctaagagtagcattgctggatcctgtgttcaactttagtaaataatgtctaagatattcaaagtggttgtgtccttgtagggtttgcaagcaagtaaacaatatgacaagctgagctttagataaatgattatattgagatataaggtgacttagaaactggaggaggcaggccatagaaagctattgcagtggtctagagaaggatggtgtaacggggtcctcaaccaagaggtgatagtgggataatctggtgaggatgggaaggagaacaatttacaattttagcgttagggtctgtagacattagaaacttaggttggtgcttttgcaccaatctaatagatggatatttgtgatgacaaaggggaagggacaaaggtgcacagtgactgatcacgacttgctgccttggcgaacagtgctagtattaaatgtgatagaaaagtaaagattgtttttttgaggggaaattaatgtgtgtgtttttaaacatatttattttttcctatattattgatggcctttgatgacattagcaggaagtttggaatgggaatctgaagcttggcagaggtcagacgtagaaggtgtggacatagggattgaacatcctgatacatgcaggaaggagatggaacagaaataactgagaagaggattaaggacaaagtccatggagcatcaacattcaggagtcaggagcagaaaggagatagaatggcagccagggaaatgacagaggaaccagcagactcttcatggttagagaaagcaaagacagagtgaggtttctggagaggtgggtaggtggcagtttcagccaacagagcggccagggagcaggagaactggttcagtcctgggttattcatcttggagatagcacgtccagtggtagggttttagggttaagggtgtctaagggtaagatgataaaaatccctttgcatatttgaatatgttaacaatgtgttgttgactgtttggtccagacttgtggtcatgccaggatctgtgtagatctttttttttgtctgctccccaactccattttgaataatgggtttataaataggttgggacccagatgtaggtatttttttaaagtttcccaatagacagctagggaaaggtagacagacctagtaaaggtagatgacctagtaaaggacaacttgaaatgcatgcagcagaggaaatggtggcctggaggaaaaagataaccgtatatgcagatggaattgagagcctagtaagttactcatttcttacaggaagaaacaggagaaaggttaaattactgtgtgattgtcatttagagagtaatataacaatagtataacaagtaataacagtaataagtgctacataaagtgattttacacatgttgatctgtttaatcctcaatgaccctatgaagcaaataccattattatcttcattttataggtgaggacactgtagagagtaatgaggttatggaatatagaacagaggtaaaagaccacatgatgttccagaattgtttgggaattagtctgtgacgttatgtagtcagcttaggataaactatgttctggtaacaaagaacctgaaaatctcagtggcttaaaaacacaaaggtttatttcttgctcatactgtgtggttatcttgggttggctttgagattctatcacatcatcattgggccttaggctgatggtactgctcttatgaggcacttgttgatcttgtggtagatggcagaatcatgagacagctcttaaaacttctgaccaaaagtgggccttctgttcacatttcattggtcaaagcaagttatatggccaggcctgatagcaacggggtgacagtgtatataatcctcccatagggatgggtggcaggtatttggaacaatgataaatatatcacagtgatttggccatttactcctgcaaggcttagctgccagggaacagagagggcctgctgtgttactaagtccagggaaagctggtgggaaggagaaagagcagaggctgaggatctaggctgggtaatgtgggcaaacaaaggtagtttttttttcttttaattttaagatttgaatatttttaatatttttgaacattaataggttcacatgatttaaaattcaaaaggcacaaagggacatacaaagatttccttctgccctgtcttcctggtacccatttcctttgtgcagttataatcagtattatgagtttcttggtagaaattttttcatgcatttacagagaagtgtctgtgtgtgtgtgtgtgtgtgtatgcacatatatgccctattttaaacatgaaacatctatacatgttttagtatgccttgacttttttttttttttttacttattctttcattttaaaaaaaaactgttttgaattgacacataactgtgcatatttatgggatttagtgtaatgttttgatatatgtatatgttgtataatgatcaaatctgggtcattatcatatccatcacctcaaacatttatcatttctttgtggtgagaaccttcaaaatctcccttagctattttgaagtctatggcacattattgttaactatagtcactctgctgtgcagtagaacaccagaacttattcctcctatataactataactctgtgcttgttgaccaaccttttattctccctactccctgttcccctcttccctctgcagcccctagtatccactgttctattctctacttttgtaagatcaacttttttagattccacatgtgagtgagctcatgcagtatttgtccttctgtgcttggcttatttcacttaatatcatgtcctctaggttcatctgtgttggcgcaaatgacaggatttcattcttttttatgactgaatagtattctattgtgtatatatatcacattttaaaaaccagttcatctgttgttggacacctaggctgattccatgtctcggctgttgtgaatagtgatgggagtgtacatgtctctttgatgttctggtttcctttcctgggaataaatacccagtagtgggattgctgcatcatatggtagttctgtttttaatttttcgagaaacctccatattgttgtccatagtggctgtactagtttacattgtcaccaacagtgtgcaagagttcccttttctccacattcttgtcaacatttgctgtcgttcatctttttgatagtagccattctatctggggtgaggtggtatctcattgtggttttgatttgcattttcctgatgattagtgatgttgagcattatttcgtatatatgaaataatacactgtgcatcttcttttgagaaatgtctattcaggtcttttgcccatcttttttttaactttattaaaatactgagttttatttcacatttattttacatatttttgtctccccaccatttccatgtctgaccaccactactattatgtcctatcatgacattccatacatacctaaaaccaagcaaagggtggagttccatctttaaaaatgaaacaggcattttggacaacgcagtcttggcaatggaacctggacaacatttatcaaacacggtagggaaagttctcactctgcattataaaaagaacagccagatatcaactgttgctgcttgcatttttgctttagtgttttctacagaacttttgatattttaggaatttttttcttgttttttgaaggattcttgtccttttgatcttggtgttggtggtattgagtcttttccattctgatttgacttttgtgcattttttggctggagtatcttgtatagctttctttactggggctttttcttcagtttcctcatcatcaaaatcatcatcattagcagcagcagcaagttttacttttttctctggaacgttgctaccacctccaggggcagatcaccttccagatatacttaagaatttcacatcttcttcctcttcatcttctgactctgcatcttcctctacagctactaagtgctgtccactaatatgcactggccctgagccacacttcaactgtaagaccaccggtggtattatttcaaagcccctaagggaaatcattggctgtacagacattttcaaagttgccagtgttactttaattggactgccttcgtaattcattgcctctgcttcaacaatgtgcaattcatcctttgcaccagcccctgagctgaccgttcttaaagataactggtgctcatcttcatcattatccaccttaaagtgatcatctttgatggcctttagttcacaaccaaaaagatagttctggggcctcacagggctcatgtccgtgtccatcacatctttcatggggtggtggcacgtacttaggtgggagagaaggcggatggagataaatgacccctgctccagagaacagctgtgcagggcggaatcacacccttttgctcattttaaattggatttttagttttttgctattgaattgtttgagcaccttatatattctagatattaactctttatcagataatagtttgcatttattttctcccattctgtaggttttctcttcactctgttgattgttttcattgctgaacagaagctttttaatttgatgcaatcccgtttgtctatttttgcgttttgttgcctatgtttttgaggtcatatccaaaaaatccttgcccagaccagtgtcatgaagtgtttcccttctcttttgttctggtagtttcataactttggtcctttcatttaagtcttttatccattttgatttgatttttatatgtggtgagagttagggaactggtttcatttttctgcgtgtgattatctagttttcccagcaccatttattaaatagattgtcctttccctaagatgtgttcttggtgcttttgttgaaaatcacttgactttaaatgtgtggatttacttctggattttctgttctgttccattggtctgtgtgtctgtttttatgtgaggaccatgctgttttgtttatagctttgtaacgttttttgaagtcaggtaatgccttcacacttggtcttttttttcacataatgtattgttggtttttttttccagttccatagatgctagtatgtgaacataatttaccaatccccaattgatagacatttaggttgtttacagttttgtattatcacaatgatgcagtggagtcagtttgcacataaatcattttgcacacatatagatatttttatagaataaataaaatacttatggggttgctggctcaaaacacatgtgcatttgaattgaattattttaaggaattgcattttattataaactttttaaaaataggaaatacatttacatagtacaaaattcaaaaagaacaaaggaataaatggtgaaaagttaatctcctaagctttgctgttgaaaatgactagatcattgtaatagattgtattattggtccaaatatctgctacccctcttatggagtattcccttttctcctagccactcagttccccgtacctgagacagtcactgtttccaacttattgtgaagctaaatttgggctatgatctaggaaaattggaatggctgaggaactaaaggttacagcaaggatacggagcaggtttttctctcttgttagatttatatagtacctttccttgggaaaaaacaatgtgcaaaagcactggatacttaataattttgaaattctacaaactatatgtagaacctagatgattttttttttttttactagagttctgtaaaaaaaaaaaacaaaaataagggctatgaacacaagctcttcttaagtacaatttttattagtactgttattggtggagttcttcctaattctgtcctttagccagaagcccagatttggtgatccttaaaaagagtggagaactcagatggacttcagctacgttttagtgatctccctccgtgactctccactgcctcttgacgttagcactacacctgctttttcagtagctttaaatttccacctctcagcaatcataagcatgccatagaagtctgaatcacacagggtattgaggtgactagctttatggacaggcttatttttatggaaattgtttttctttcacttaacactactgctaagagattggctatgtgtgtttgaagtaggataatatgttgtgttctgtttatgtgtcatgactttggtttgctgagcttgaagtccaggatacagatttttatttgtttccttggacaaattatgtggcctctttgtttcctcatctgtgtattgttgatgatgatgttaccttccttatagaatttgttttgaggattaaatgggtcaatgcatataaggcactcagtacagttcctggcacttaataaggtactcattgactcttagctattattcttatagttctgttttttttttttttgtatttgtgttgattggggtggttggtagtattttgtatatgtatttaatacaagataaactttatagtttttatagcaaaaaccctacattatcttcaaccctttgtttcttacagtcattttctaaactttatttttaactacttttagactaatagaaaaattgcaaaaaacaatacagaattcccttatactcttcactactagtgcagagatcgaaagcaggccattaacattggtacaataatagtaattagactataggccttatttaaatctcatcagttttcttactaaggttcttttttagttctaggatcctacattgcatttagttgttgtttctccctaatcttttctaggttgtgcgaattcctcaatatgtcttcatctttcatgaacttgacactttaaaagactaatgggatttactttgtagaatgttcctcagtttgggtttatgtcatgttttctcatgattagaaggagcttatgtatttttggcaagaatactacagaaatgatattgtatccttagtgcatcatttcaagggttcataatgttgatatgtcttgtcactggtaatagcaactttggtcacttggttaaggttccagcttttgcctgtgaaactactgtctttccctttttagttgatatgtatcttgggggacatattttcacactgcaaatagtctacttttcttccaactctcacctactaagtttagtatccccctcagtggatcttgtctgtagcagtgatgattttcttttctcctctttccctctatctttattaaatgtaattttctgtaaggaagaactgtgctttcttcctcacttatttcttagattatttgcgtgtatcaatatggattcatagatacttatttttttctatgtgttaaagcccaatactgtcattatttattgtgttgctcagattgtttcatctttgaacattagaagctccttcattttggctcctgttttctttctaaagctttcatttttttgaccgcttccttactttctagtactacaagatgtttcaggcttgtcttatattttttcctacacaagccctggttccttttattggagaatgatgtttagaaatcatgatctggggccgggcgtggtggctcacacctgtaatcccagcactttgggcggccaaagtgggtggatcacctgaggtcaggagtttgagaccagcctggccaacatggcaaaacctggtctctactaaaaatacaaaaaattagccgggcatggtgttgcatacttgtaatcccatctactagggaggctgaggcaggagaattgcttaaacccagaagtcggaggttgcagtgagccgagatcacgccattgcactccagcctgggcaacagagcgagactctgtctcaaaaaaaaaaaaaaaaaaaagaaatcatgatccggatgctagagtgctcattgctacgagatgtcattgctgagtctcagtgagcagacttaggaaatatatgtatgaatattaagccatacattataaaaacatctagctatctgtatctgtctatccatctatattttaaacaccatgagtttatgcaaatgcttctgattccaatctaataccatagggctcttttgagcctttctttatttataacttctctgcaacaatgagaagcttagtccttatcatctacagtatatttgtggattcattaaaatagtttcagaattgctaacttgtaaccttgtttggatatttactaactagattacagcatttatgtacagttctttctgtctttagccttacaacatacagtcaagatatatttttccatcattccttaggtaagttcttttcttctccaccccctgcagtgtggttatgttattcatttgtagtatagaaagggtcatctgttagtgtttatatttcctttaggtttccctccacatcctggttggttttatttgtcttctgggtgtttaaaaagtatgtgaaacatgcatggctgtgattctcagagtcagagctacacaaaaagatctattgagagcattgacacgccctctttatccctgttcccctccctccatttccccttctttctacacctttcccacccattccctgtagacaaccatttcttagtatctatattatccttcctttatttcttttgaacacatgagcaggtacacgcagtaacttttaaaatcttttttctattgtagaagtaatacatgttcattgtaaaactattagatgttagaaaaacatgtaactgataaccactgttatccgtattggattttaagtgcatataatcaaataaatacatagatattaaataagtaggtaactcagataaatacacttaatcaaattttttttttttttttttgagacagaatctctctctgtcacccaggctggagtgcagtggcaggatcttggctcactgcaacctccacctcccaggttcaagcgattctcctgcctcagcctcctgagtagtcacgattacaggcatgtgccaccacacccacctacgtttttatatttttggtagagacggggtttcaccatgttggccaggctggtcttgacgtcaagtgatctgcctacctcagcctcccaaagtgctgggattaccggcatgagccgccgtgcctgttcaatcaaattttatatatgtgtactaatctaatggtgtatagtcatatatataaaatccagttgttttatttaatatggctgaaatgtgttgtgtggttgatatttatgttgagccatctctatatgtgcttaaaaattctttgttctacagagttagcactgttttgagtgacctgtggataattttttgttccctgaggcatctgtagtacatggtgattttccaggactggggtgtcagaatgctggaattgcgccttagttcttctgttgatcagctttgatgtgaacttaagtaaatcacctaacattaccaagcctcagatcctccatctgtaaaataattcccaaagttctgctgggacaagaactgtactttttcctttcttagtgattttaacacaatacgggagcatcttgggggagattgctctgcaaaagtggtatcatatgtatacttagatgtgattttgtttgtagtaccttgcagaagccggctggacagctgaaggaagagtggtaggagtgacccagcctcgaagagtggctgctgttacagtgagtttctttttgtgttggaaagattctatctgtgttgtctacatttgtgatttgtttacatttcctaaaggctttaaatgaatagaagttgctccttaagagtttaggtcttcagtttttatgttttttttatttttatttttttcctcagacagagtctcactctgttgcccaggctggggtgcaatggagctatctcaactcactgcaacctccgcctcctgggttcaagcaattctcctgcctcagcctcccgagtagctgggattacaggcatgtgccactacgcctggctaatttttttatatttttagtagagacggggtttcaccatgttggccaggctgttctcaaactcctgatcttgtgatctgcctgcctcagcctcccaaaatgctgggattacaggcatgagccactgtgcctggccaggtcttctgttttaaaagaattatgatttgaatatttttgttaaattgatcctgcacattatgaacgttttaaacaataaagtgctgaggaaataaaaaaacaatatatttttaaaaccccaaatttcaccatccaacataaacaatgtgaacatttgtgaacatcattccaagcttctcctaaagatgaagatgaatggttgactggctggatagaaataattttataaaaatgagatcatatttaatatttattttttattgaatttaacaaaataggaaactttagtgaaataggagtagcgactgtactttggataaatgttcaccgcaagataatttattaaagcttgaaaagtaagaaaaaagagtacaaaaaaattcaagatgttacctatatttcaaattacgccttatagtttcctgttatgaaagaagaggaaattagcacatgtattcttctttccaccttccctttctccatttgttgtagatacagtcctgtcattttcatttcaagatttataatatacatgttcttaatcataattctcacaggtgtttaaccttaattctagcttgaatggattcattactcatcattagttattttctatggttttgctaaccttgaattgcttgttttgcttttatttcttgtattggctgaattttatcattcagcttttttttttttttaatatgcttgagaatgttcagttgtggtttttgttgatataaaattcttgattcacactgtccctgcaaactgcagactttgctcactgccttttggcgttgaggatcactgtgtagaagtctgagccaccataagttttttgttgatagtatgtttgaattcttttgttgtttttaaattagctctgagagattgggtgtggtggctaatgcctgtattcccagcacattgggaggccgaggcaagaggattgcttgagcctaggagtttgagaacagcctgggcaacatagcaagaccctgtctctacaaaacaatttttaaaaaaattagctgggcatgctggcacctgcctgtggtcccagctacttcggaggctgagccagaaggatctcttgagcccaggagttaaggttgcggtgagttatgatcgtgtcattgtactccaacctttaccctatctccaaaaaaaaaaaaaaaaaaaaaggcttaaagaaaaggaagtagggcctttagtttgtggcctttacctggacaaacaattaattctatttccccaagttatttttgttctgtactgagttttaattattgtgtcgttgttttgcccaaagttcattttctaatggtgttcaattaagaagttatacagttttagaagttatgtgtgtgtgtgtgttgtgtttttgtatgaaaatggggctaacagtttggaaaccaagttgcaaatgctgctggagttaatcttttttgtcactaaaagatgactcagttacctaaaattagaacaatttttcctgtttgtggtttggaatcccagctcttaatcagtttgcatcttagttccaaatttgtagccatggataacttccatgaaaccacagctttctcttgaaagagcaaagagcatgtaatatattaatagagctgtcaagtttgaaatgctacatctcagaaagtactttatgtgcagactaaaatctgcaaacaatctcagagcctaaaaacagattgcataagctgttgcttgatctctgtgagaggcaattagtagtgagtatgcttgttgaactcatgtggtctgggtttgacttcaagaccaggtaggtcctccctgacctgtgattcagaataagctctaacacctgtcttatttcagtttcctcatttgtaaatacaacagtgtctcgtctacctcatgggctgtgtgtctatttaatgagatacaaatttgtgaaagcttagagcacagcacttgccagtagtaggtgctcagtgattttttttttttttttggtcttttacctccctttccttttggtctgtcaaaaagatagtatttgtccagtctagttgatgaggttattgggagcagaactaaagtgatagagataaaaatctattaaaaagccaagagaatataaccttgtgtgattataaataataaaaatttaaaaatagagtttgaaaataaaaatacatactttttatagcaaatgtattcaaatagtgaaggagtaagaataaacaggtttggcttttaccttatagacccataaaatgattatatttttacagagatttgttaatttatgctcatttttttaaatttaaaatttttgtgggtacatcgtaggtgtatatatatttatgtatgctcattcttataagcctattttctccataagttcctagtatctctatgcacacattctctacctgtaccatattctgagatttataatataacgacatgtagggttgaaattggaacagtaacaataacaaatctgtcctggtgaaatgctggtcattgggaaatacaaccaccagaggcagagcaatgtaggataactttctggtttcataagacgttttgaaagcctacatgatatagaccagctgccagatgattgatttggttttggcctccccattctataatttcaagtcaccaggcagagctgcttctgatcctcatctgctcttcagtgtcttaaacactgatgggcaggaaacgcctgggtgtgcctagctcagaagctgagggcagggagcctctgccctcctgagcctggggctgctggggtggaaaggctggagcagtaagctctgtctcaggacaccacatgtgccagccatgttctaaagtcaggacttgggaactgcgtgggtgctggggaggttgtctcacctgtgaaagagggagactgaactccttccttctgtggggattggtgtgctgggccctgggaaatctctattaatattgcttccctttggttcttttcatttaggtagtttatgtggtggtgaatactaaactttcttttctttctttttttgttttttgacacagtctctttgtcaccgaggctggagtgtagtggtgtgacctcggctcattgcaacctccacctccccgggttcaagtgattctcctgcctcagcctcctgcgagtagctgggattacaggcgcatgccaccatgcccaactaactttttgtatttttagtagagatggggtttcaccatgtcggccaggctggtcttgaactcctgacctcaggtgatttgcctcccaaagtgctgggattgtaggtgtgaaccaccgcgtccggtcctattttcttttaaattaaactaaatgatattcattattgctcttccacttttatgcttgttcattcttttaaatattttctattaataagttaacttttgaatagccttcttgggggaatgcagagatcttgctgttggattcatttttctctttcctgcattcattttttatttgttatgttttgatggatgaaattttgtctatagtttatggtcttcataatgtattacatattttgtctttcactttattatgctaccttggattttttattgatcttctcatccactcatctgccccctttgttttaaacctgagtttgtctgtatttcccctctcagtggctttggcagctgggacacagttgtgaactgtttcaggtatctcattcttgaaacttagctttttgccttcgatgagaaaatgaaactggcccagctttgaatatggtaattcctgttctgccttcatggtcccgggggatgggttttcttttcgagcgtggagatgaaaagttgtccctggttagtgtgccctttgtttaggaacagggtgaatcttgtcatttcttttactttcctttttgctttggccaccaaatttagagctgaatttgtggctcaacttgaataattttggcatatctatgtttaacattttctcattggctttgatcttttgaaattttttctgtaattttttggatcttgatccgtaacatttttatgtgattttgtttttcattgtgtatgttcttataagttgccccaagaccattatagaatgaagtgagatacataagttaataattggctgggtgtggtggctcacgcctgtaatccctgtactttgagaggctgaggcgggcaaattgcttgaggtcaggagtttaagaccagcctggccaacatggcgaaaccccatctccactaaaaatacaaaaattagctgggcctggtggcgcttgcctgtaatcccagctacttaggaggttgaggcaggaggattgcttgaacttgggaggtggaggttgcagtgagccgagattgtgccactgccctccagcctgggtgacagagtgagactctgtctcaataataataataataaaaattgcaaaagttattatgcttgttctctaataacttgtctcttttcatttttcattgtgttcacatactatttaaaatataaatgacctttagattttccatagtatgtgcgctgtgcagtaatttctatgtctctattttcagcatgatctttcttcccaaaggttgcagggagagtagctgaagaaaggggtgcagtgctgggccacgaggtgggctactgcatccgctttgatgactgcaccgaccagctggccacgagaattaaggtaaagtgctcaagctgcttttcctagtggaaataaggaagaaggttattttgggagaattaaaaacatgtagtccttgctgctgtacaggacattgataccatggcagaaagtgaagaaaagtatcctgacattcagagactttagtcagctaggagacagagagctcttccttttttcttttttttttttttttttgagacagagtctctctctgtcacccaggctggagtgcggtggcacgatctctgcttgctgcaagctccgcctcctgggttcacgccattctccttcctcagcctcccgagtagctgggactacaggcgaccgtcaccacacccggctaagttttttttttttttttttttttgtatttttagtagagacggggtttcactgtgttagccaggatggtctcaatctcctgactcgtgatccacctgcctcagcctcccaaagtgctgggattacaggcgtgagccactgtgcccggccgacacagggctctttcaaagagtcctgcaatcttatcccagaaaggagcttggaagtcaggtttagtccttgattccaaagatgaagaggttaagggcttggaaggttgaatgacttgcctgatattatatgccaatcagtgataggaccaagactcaaagctgtcttttcttatgtgtattttattgtattttcactgactcaaatagcaatcgaaatatagaaacaagcctgtaaaaggcttaaaaatagagtagtataagttgatgaagtgtagaattcatgaatgttgtttcactaattagtacttttccattttcatatgaaaatggattttacatgtgtgttctttggccttgttgctaatgttaaaataattagtatcaatagtaatcagtgtataatcaactcaacagggtgtgtactacctaccaccgtgctagaatcaaagtctaatcagacagtgcaataaaacagtgaatgaaaataatctgatgaaatgaaaattgattattagaatctcagttacctcttaatttgcaacagaggaaaattgaaaatcagatgagctgaatgaccaatgtagtgatttgtaaaaatgtagaccttattttccagattgccatattttgttatattcattttgctaggtgaagggaatatttttctgtaccatcaaatatatttgaactagctaattttcagtggtttgcataaccatgaaaacctttgagccgtccataaaaaccttttgtattccatttggtcacaatttcaaggtgctcagttctcgactggtgatttgtcattggtggaagttctcactacgtatgtatgtggcagctagtaccaggtccaagaaaaatatgatggcaatgcatcctgctcttaaaacaaaaaaagtaaaaaacacctaagatacagcatgcaagggagatggtttaacctgaaaacaaattcagtacgttaagaaggctgttactgtatgtgtctgaagcattttataaagattcattaatctgaaataatattagctgacttttcttaaacactactctgtcctaggtcctatgctaaacgctttacatgtacagtcagtcctctgcatcctgcgggttctgcatctgtggattcaaccaaccttgaattgctaatattacaaaataaaaataaaaaataatgtaaatttaaaaaaatacagtataacaactatttacataacatttacattgttttagtcattctaaataatctagagatgatttaaaatatatgggagggtatgcataggttacatgcaaatactatgccatcttatataatggacttgagcatctgcagattttggtgtgggttgggggggtttctagaaccaaccccacaaggataccgaggaactactatactatcttatttatttttcacattaacttggtgaggtaaatactttgattacctcattttacaaatgagcaatcagggacagagaagatgagtaacttgtccaaggttcacacagcttagtaagaggtagagccaggatctgaactcccagcagtctgacaccatagcccatgtgcttaaccatgatcctatctagagtctgtaaaataatattaattgaagtttaagttaataacctcaagaactgcaatctatagtctttgggacatttgaagagcaattatcttacacttagggtgtttctttgggcagataccagttagtcttcactgcctctttatcgatagtactggtggtgcaagcccagaggaaatggggcatagctgatgttcccataataaaggcaagtgaaattctgctcaaagatttgcaactccagctgaggaccctgtgtttaaagccttttgtgaacaattacattgcttgataacgaaaatatgggggcattttctcacagtcctttgtgggaatttacttgtacacatgctggcaaagaggttgcacttgaacttaaaaaataccattaatatgtagtgtaagtgaattatttctaaagctttgtgtttttattttttagtttcttactgatggaatgctggtcagggaaatgatggttgatccgttgttaacaaaatataggtaaatgtgtttttcttatgatagctttcctagtttccaaagtccccaggtagacggagaagcaggtgtgttagtagctgggattcacgtctgtgttcagctgccccaaagcttttctcttgaccttggctgttgggacccttggtgtttttctcagaatttaaatagtatggccctttacagacactcaaaaatgggcacattaaaattcctatcattacttagtctggtgacttgtcctttttattttgccttgtcacactccagtattgatggtgactgcagagaactaactgccctgtgttaaatgtaatatacagagtccaaataattttttatcacttccccctctttgtctatctgtctgtcactcacagcattaaagctgtcctacctaggctctggtgttctcgaggagagtgtcacatttgaccccctggcccacgtgtgtcacaactgtagtcagctacctctttgactgttgttatagcttaacagtcttcagatggttgggctttgttctgatttttatgtgttctgtggggttataggttggttatgttttcatttaaaatcagatattaaattctgttggaattcagtgtggatggtaaaacgcttaaagataacaatagtacactttttaaaattcaggtatgttaatgtcaccgtttttattaacctaagaattgcctcattgtcaaagaagagtgacttaggtttacttttgatgcaaagtgattgtatgaggactaaatacccagaagctctttgatggtctagatgagatgatgtgtggcttttttagaggctcactgagagcttctctttgattcttagtgtcatcatgctggatgaagcccacgagaggaccttgtacactgacattgccattggcttgctaaaaaaggtatgacttcactgccagcttttcattgtgtgtgtttattttattgcctaattacaaaagcaactgtagcaacttggaaagtacaacaaaataccaaggaagaaaattaaaatcatccataatcctacccattcagagaatatcagtggtagaatgttggtatattttcttctcttttctgtgtgtgtgtgtgtgtgtgtgagtgagtgtgtgtgtacttggatctgttttggcatactagggattgattgaattatatatactaatttgtatcttgcatatttcccttaacattacattaggatcatttttctgtgtcatttaaatattctctgaagatattatttttaatggctatttaatcacatctctatcataaagtatttaacttcccctactgttagcaatttatatggcttgcagattttaaatattataaatactgttgtagcaagcacccttgtaattgaatctgctgcatttctgtttattttctttaactttttattattaaggtttcatacatatcccaaagaagtgtataatgacccccatgtacccttcatctggcttcaacaattacaactcacagccaatcttgtttcaatcttaacctccactctctcctcccttcccatattttctgattgttttctttggacagattcccaattagagtctagaaagaagtggtagaacagggtgattaagagcataggcattgagtcagactacctgggttcaaattctggctttgctgagtttactcatctctaaaatggggaaaatagtagtctctatatctgtgctggtatactttcctttatggtagccactagccacctgtagctattgagataaaagttaattaaaatagaagaaagtaaaaaaattcaggttctcagtcacgttggctatttttcttttcttctctcttttttttctttttttgagacggagttttgcccttgttgcccaggcgggaatacaatggcgtgatcttggctcaccgcaacctctgcctcccaggttcaagcgattcttctgcctcagccttcccgagtagctgggattacaggcatttgccaccatgcctggctaattttgtatttttagtagagatggggtttggttcctccatgttagtcaggctggtcttgaactcccaacctcaggtgatctgcctgcctcggcctcccaaagtgttgggattacaggcgtgagccactgtgcccggccacattggctatttttcttttctttttttttttttttcacgttggctatttttcaagggctctatagccacaggtggctagtggcttatgcatcggacagtacaaataaggaaagttttcatcattgcagagagttcttttagacataggtactgtatattgtgatttgttatgaagcttaagtaagatagcaaaaaacttttaggttggtgcctggcatagggtcacagctagactgtgaggttcttttgtgcaaattagaaaaagatgttccctctgggaggatgtctagagctaggtgggaggcaggtggaccggattgctgaagcccctagccccctcagccaggcatctttgcacagtgggtacactgtgtacctgtatgcagggcctctgggctagcacataagttagtctgtattagttgttattattattattttcattgttattttattccattgccaaagatttagattttttgatactttaagggaattattgtaccatgttattacctttttcaggaacggtataataagagggccgatttcactgaatctttgccaacactgagtattagccttaaaaaaataaatccttgccaatgggatagatggggaaaaaaaaatctcattgttattatatatcttagctgtagctcatttggtcacttctccaatgcctgttgattatgtgtttctttgagtaactgttaatatcttttatctcttttttttttgccatatttctgtcttggtgttatcatttattgtttgtttgcttttaatatactttttcatacatagattcaaactatcttgagacccaggtgtcaggaaaaaatggttttattctcagtaaattcaaatttgggtcttaaagcttctttatagtttttataatttaaaaaaatttactttggaaaattgcatacatttacaaaattggaagtaatagtgtaatgacccccccccccctttattgacaattattaatttgtagtcagtcctttcatctgtaagctcccttacctcctcctcaggcaaaaaagaaaaaaaaagacactgaatttttgaaatacatttcagatatcaaatgatctcatccataagtgttgcactattatcattatttccaaatgtcttcttttttagattcagaaaaagcgaggggatcttcgattgattgtagcttcagccactctggatgcagacgtaagagccttgcctcccctttcctcctctcctcacaaacacttttgtcctatatatccttgggaagttacctctagcaagagcttatctttggcagaatgccctatcttctttatgggaccatctgatgtcctagatttcatataatcagaggttactccttttcagcttgtgaaattagactgtaattaattgagctcataattacctacctgtcttgtttatctacatactgtctttctccccacttacacagcttctttttgttgttttttcagtataagcctgtatttcttgaatttgtttatttatgactatactgtatagatttagatttttctgtgcaattgaagtttctcctgggctgggcacggtggctcacacctgtaatcccagcactttgggaggctgaggtgggtggatcacttgaggtcaggagtttgaggccagcctggccaacatggtgaaaccccgtctctactaaaaatgcaaaattagctgggcgtagtagtacatgcctataatcccagctacttgggaggctgaggcaggagaattgcttgaaactgggaggcagaggttgcagtgagctgagatcgctccattgcactccagcttgggcaacaagagcaaaacttcatctcaaaaaaaaaaaaaagtttctcctgtatatataataatttccatgttaaagttttctgtggctaggtttacattatttttctctcttgtggacctatagtttaaacagcagctcaactcaacaaatacttttgaccacttactatatttacatgcagaaatagatgtttgcagttcagtgtgttcaaagttctgaggcagctaaggagggagcccttaactccagccagctggggggtgtccagaaactttcgcagaggtggtgacctaccagctgtgcttgaaagatggacagccgttttccagatggatgaaggtggggaagggcaccctaaatataagtgaaatcacagggacatgaccatgagttcatggagcttcgagtcttatcttacctgccaggccctcatgggtgaattacccttgaactccctctctgactttatcttcttccactttctccagtgctccctacatttcagcctcactggtctccttgctgttcctcaaaacaacccaggcatgcttctgctctggaggaaccctctttttagaccattccttccccggacagcctaaggttctctcctaatttcattccagttttgagcatttattatctcctcagagaggcgctctctaaaacagcaccccagttgctctttattcccttattctgattttttttatgtttctcacttgtctatcactatttaacattatatgcattgtttattgtgtgtctcctgtcactaaaatataagctccatgaagatcaggactttgtcttattttatctcttccacctaaaacaatgtctagcacagagtaggcacttgggttgaatgaattttgactgactgggaagtaatggaagattaaaatggggaggttggggtcagatgacggaaagccttagaggctcagccagagaggatgaactccatcctgtatctggttgggagccatgggaacatgtgagagagggcagtgacttcatcatgtttgagctctataaagatcattctgagtgctgtgtataggagatgagagtagatatggagtctctagtaaggaggccagttctgaaatccaggtgagatgtggtccctggctcctggctcctagtctccctgtggcttctgggatacagaacaacttggagagagagaaagcttaccatagcgaaggtaaatgtccaacgtgtcccgagactggtttctcagacctttccacaggctgtaggagtctgttgttttaggtctgcccatggtaacttttgggttaaagctcctctgttgccctgtttaattgtcatctccctcacccatggtatctgctggcatgctattttgtggactgtggctgacttcacctctagttagctcctctgtggctacattacacagaacatctgtatctctttttcaccccccaccttaaaaattattaaattaagttaaaaattattccagtttttattatgttgaaaactataatgtccaagtcttttcttagattcattttatttatttatttatttatttatttatttatttattttttgacaccaagtctcactgtcttgcccaggctggagtacagtggtgtgatctcagctcactgcaacctctgcttcccaggttcaagtgattctcgtgcttcagcctcccaagtagctgggactgcaggcatgagccaccatgcctggttaatttttgtatttttagtagagatggggtctcatcatgttggccaggctggtctcaaactccggacctcaggtgatcctcccgccttggactcccaaagtgctggatttacaggcatgaaccaccacgcctggccagattcattgttaattaatacttactaattgttcacaattgccttttattgtcttggtggaacacagagatgaaaaaaatagcttctttcagttctgtctatggtagttgatatagatgactttctggaagcaattttgtaagcgggaagacagcatgtaggaactttgtcatgccttgctctgctgtggtacgggacatgctggacctctggtaagctgggccattccttcttatcctgtccttgctgctcagccagtgcctcctgtgtgaggggaacggtggtttctaagtgtctgtgaatgggggatctgtgtgtgtgagtcatctctgtgtgggttgtgggtccgtgtgtgaggggcctacgtgaggtatgggatgtgagttcgtatgtgagtgaaagaaagaaagaggatataagtgggcgaaagagggcaagaatgaggactatgtgggagtggcaggggggttgggtgtggcttaggaaacattttgatctagaggcgtagggaagtccagaactcatcccctgccccccagcggctgggtctgtgggtgacagactaatttcaaacctcctagagctagggctgctgataggccacctgccgtggtttctctcagggactggggtggcccagcctgcagacaaagacagcagtggctgcagccgggaggcagagacctgcagagcatgatggggctgatcgaatagctgctttggttgctttatctgctttcttaatgtaagcccaattaaacgaacaattatataacatgactggatataattatgaagtatttattgatcctgtatcacgtgatgatattgcttttcttttatttgcgtccaactgcatggcagaatatatggttgctggtagctcccatagtttttttgtcataagtccagctacttgaagagagactaatttctctttccagattcttagagaaggaacttagcatcagctggggtcaggtctccaccctggaccagtctacatgggccaaggctgttggccaatcatgggtgtgttgggtagacatagctgcttatcggccactccagtgggttaggaaggagcaggtaccagggaaggagcctatggtgagctagaagacaaccctgcagatggccatatcatttacattccatttcatagactgtcccctgcctttttatgatgtatgcttcttaccatgtctgtatgtcaatgtgaccccacctctttcaaacctgactcaaattcttcttttctgggtgtgttgaacttattttactcttcttgttccttgattctgcctcaagattcttgcattgttggtactatatttatttacttttttatgtattttgtatttccaaataaagatacaagataaagatcttaaaggtcttgtgccttctcagtaaatgctgagtcttaattctttttgttttgagacagagtttcactcttgttgcccaggctggtgtgcaatggagtgatctcggcccactgcagcctccgcctcgcaggttcaaacgattctcctgcctcagccttcctagtagctgggattacaggcgcctgccaccacgctcagccaatttttttgtatttttagtagagatggggtttcactatgttggccaggctggttttgaactcctgacctcaggccatccacccgccttggcctcccaaagtgccaccgcatgagccaccgcatccggccgagtcttaattcttgaaagagtaactctttacttttcagtaccacatagtccttaacggtaaggtttaggcatctactctaacaaaattgtcaaggcatcatcttcttccttgttctgcttgcttttttggtaacattcacccttgtccaagccctttggtaaaatcttcctccttctccttccatagctcctggagccctgctgacttccctctcctacctccttgttggcttcctcttgggccccttctctgtctgctcttccttctcaaggctgcacacccctgtggtccctggttcagctgagccttcgtgcttgtggcagtcttgactgtgtgcttgcacaccagccttagctgtctgacagctggctagccacagacatcctaaactcataaacttgtgactctctgattctccatctcagtctctttctcatgatcatagtcatttaggccaagacctccattgctttaagaagtttttatccccggtcgagtaagagtcactctagccttctttccaatgtgcacgtgtgtgcacgttcactcactgattgccagttcccaccagctgtatctctggaatgctttgcccaggttcacactttgtctcccctgcactattatgatagcttcattaattagtttgtttgcctcgaatctcttatttcctctgccctcctccaaaatggccactggagtctgggattcagctcacaggtctgataatatcatgcccatcctcactgcccttgtcttgcccatcgaataaagtgccagtgcagctgatcacttgggtcccttcagagttatggctgacatcacttattgagtgccattctaggctagatgtgtgtcacaactatcccacatagtttatttgaacctcacagcaaccttgcagggtggatagcagtttgtccattttgcagatgagagagctgactcagagatgaggaggcctagaccttgcctctgtcctcccttagggacccctttacattttagtccatactgtgctattgtcctgggaagggatgtctcccccttcccagccagtaataatcctccttagcctttacagtgcaggcaagggatactgctttctccatgaagctctccctgaaagccggtagttcttaacttttccttctatcagattgcaatctgcagctctttcctggtcacagggtcatctgcctcagggattattttatgatcaactctttgcacgtctgccttctgtgaactgtttactcttttggggcatggggtgtctgttcccacttgtttgtatgtcacttctagtgtacctgtgctgtgcatgtcatagggatgcaggaaggctgaagcaacttgaagggaatttacccaaaagaaagtgaacaggagtactgtgtggaattctgcatagcaaaacatagttttgttgacatgaggcactttgatgtctgtgcttattcttctcaattttgaggttaatatataacatccctgtattttgtggttaaatccagtttactcttttaaaagtacccctcagagccccttcacttagcgtttgatgccattcgttagcacagctcctgggctcctgggtttcctggagcaggatgggcatgttttgtaaaggtacatagggaaataaagacaagctttgtagttatgtagccaggcctcagggaaatgagtagaggtggggaatggaaagggcacccagattcaaataatggagcactccacccgacgggatatccatgccccctctgcagtgggcaccagctgcttcccatctggtgctcacttgcctgcctgcatggtcacttagctcttctcagtctcagcttctctttgtaccttagggtcacattccccaagagaggatctttggtggcgtttccttcccccatcattggctggagccctcaagacaggtctccttgtgggctgcaagtggtggtcaagtaccattaaataggatgtggacacctgtttggcagaaactgccaagagacacttctcccaacagggtactgcacgagtgttggggaagtacatgattgatggcctaccccatacaaagcctcgcactcactactgtagggcgtgtaaagatggagaagacactatccctgccatcaagtggcctaaaaccagtaacaatggggccggaaacacacctactgttcacagaaggaaaagtttcctatcaaatgatcatatctgtgttttccagatagagttacccaccaacctcatctaacctgtactgaacttgagtcacacctttgacctaatttttgcttaaatgaaatacagaggataggaataatataaataatactaaagctacatgttaactcagatgctatgctgaatgcagttttgaaatctaacctttattatttttattaaaactttagtaaagacactgtcattgaaatgtgattccccacaattacagttagaaaaatgtgaatttaaaaaatgtattttgcaacccataatctgtattgcacatatataatcttgctactcacctgtctttggcaagttttatattattttttctttccatgaatcgctacgaacctttttttctaagagaaatgaagaattaatttttttctttttagaaattccgggatttctttaatcaaaatgaaaccagtgatccagcaagggatacatgtgtgatccttacagtggaagggagaacatttccggtggatatcttttatctacaaaggtttgatgatgcttgaattctggatgatggtgtttagaaaactcagcctctgatgtagaatgtcagaactgcatttgctcacaactctaaaggatggggaggagcatgttttgtgtccctagtcattggtctagaatgttcttaccctgctccggatcactgctgaatttagtttaaactgttcacactgacatgcaagtttccgtaagtctgtggccagtagctcagccagagagagcaaaagtggtgaaaggttttggggagggaagcttgatagttttcagaactggggtttacaaggctgcctgtcagcaggggcagtattggtgatttgaatcatttggctctcagttctctacatccctagcgagaaggcccagttggcatttttaggagtagcctacttggacaaggaaggggccatcctaattcctgtactagtcactggacaaaaaaagaccaggagcctgttccagtggctgataaatccagagtcgtggacttgatttctgaatcgttttgttggagagctcatccatcagggccatccagccgacccatagatgctgctattggttaggagggaaaatgggctgggaagagcgtgggcttcagcactgggaccacagcttccgattttcactggtctgatgtctttgcatactaaagatagcacatctatttgtatgggtatatcatgttatttctttccaaataaagctaaaaatcatagttgacatataattatggattattcttgaatattagatttgaaaaaaatgaatatttattttgtttatcctgtactaattacctactgggcaggcccaaactcactttgatgagctttgctgccagattattagggtaattgatctgtaattaatgagcatattctagtgatgaattcatcccatttgtcttttcagtcctgttccagattatatcaaatcaactgtcgaaactgtggtgaaaattcaccagacagagggagacggagacgttttagcatttcttactggccaggtaatgccactgtacttctctgatgaatagacatgttaagacagcaccaaaagtaatacagagccttgttactttactcagtcatgtatttcatgttttgttgtattttgtggttccataattgtgtagaaaattgatttgatgtcattcatctaccatctagattgtcagggactcgttagcccctgcctgttctgtctgcagagggttaaatgtttttttaaatgtattagctgattccaaaataaactaggtagttgagtgagggctattttgtttgccagaattggatactacattaggtccatgtcctgcacacatgttgctgctgtgtacctctttttccagtgacacctttacagctcatcctggaggtgataagtggccatattactggtaaaacaactgaacagacccaagtgctcgctgacggtggccagcactattcagacctgccctccaactgtaatcttttccactgccaaacactttccatggttcagtaatcttttttggagaaagcttacagtgattttatatgctgcaacttgtctatatgcatgagatgcttgtttgacaccgtatatgtatgctgagtaaaatagtcatcgtttttatttattgggaactcttccattcattgcagatcataccgagtttttagtaactaatagtgtagttgcaaaatttcacccattgtcatcattgtgtattagcatttaattaaataccatcccagagtggaacatgacggcactgaaattcttgaatctgaccaaaattaaagtccagatcccaacttttattttctttcagtatgataaaatagcatgctttaaattgatctcggtttctttggttcctggttcaacgtctttaggaagaggtagaaactgttgtgtcgatgctcatcgagcaggctcgagcactagctcgcactgggatgaagagacacctccgagttctccccatgtatgcaggactgccttcctttgagcaaatgaaagtgtttgaaagggtgtcacgcagtgtcagaaaggtgagactatcctgatgaccaagggtgttggcagccgtctataatcataatgatgctcctttacttgttttgaaacttgctaaacacaaggcagacttctaggtccatatttctgtgtagtagatctaaaagcacacaataaataatacattgtgaagatttcttttttttttgagatggagtctcgctctgttgcccaggctggagtgcagtggcgcgatctcagctcactgcaagctctgcctcccgggttcacgccattctcctgcctcagcctcctgagtagctgggactacaggcgcccgccaccacacccggctaatttttttttgtatttttagtagagacggggtttcactaagttagccaggatggtctcgatctcctgaccttgtgatccgcccaccttggcctcccaaagtgctgggattacaggcgtcagccaccgtgcccggcctgttgtgaagattctaaacctgtcccactgaaggatcactttgacagtagttatcagatcaggtgacttctcttttcttctcttctgccttcctaatatttcccacgacacatgcttactttggcttaagggattgtttagggggattgaggtcagtcaggagcaatagaaaaattggtacacatggtttctaaataatttgttttaagtatcagcttgcctattttaaagggccaagtttaaatcaattaattcaaggtgtggcttaaaaatgtttagccttgaagtgagagtgaggaagggtgtggtggaaagcattggtttgaaggagctggcaggcagccagtccacctgggcctgactctgccttttcctttcattagatgaggactgcacagaaccagcccgaggacagcttttactgtagtagctatttatcaacagatggcagagaatagagcaggtgagggatggtctgaggatccactcccaatttcagaccacctggaagagggtgctcagccccttgaccattgggatggagcaacatgagtctgccctgtcaaacattaattgcagccagccaatcaggagacctggattctgcccctgagctactatgtgccttgggacaactgacttaacctcgaatctgagtttttgcagctgtaaaacgtaaataataataactttcagataggtggttttatagcataacatcttaatcccaactacataaaaatattagaaagattattttataaaatgatcatttataaaataatttttataaaatgatttataaaatgtaaagtgcctgaaaaaagttctaactgctatatatatgtgtcccctgctacttaaacccttcaggggcagctcccaatgtactgggaataaaattcaaatacctcatggtggcccagagaccacatatgattgcatatctgcctccctctgcaacctcatcttgtactttgtattttggctgcactggctgtttctccttcctttgaactgtttcttattcttggatctctatagggttggctgctgcttgttactcaggtctctgctcaaaatctttcacagaggctctgcctggccaacaaaagtaaagtagcatgccctattattacaataatatataatatacatgttatatactacatcatatcatattgcctcattgtgttaatattttctttatagtatttgttgttctctgaaattatcttcttgtttatgttcagcatgtcttcaccctaaacactcaaactagaatgtaaactctggcagagcaggggccttgtctgtcttgtttatcctacatcccagcaccttgaacagtgcttggcaaagtgcacaccctcagaaagtaatcatgatatgaatgaataaatgactatacctgcgcaagatggagggtgatttactttggttatgccaaagggaaaaactaacaaatgctaggctctgatcactttatatattaattgtatatagtcccttcagtagccctaggggaggtggtaaatcttattatgtagatgaggaaacaggttcaggaggttgagtaacttgtccagggtcacatgattagggagaattcaaacccagggcaccccctgacttggaaactcacagtctttctagtatattaaactgcctctcacagattctgcaatgttggaaatgttaaatcttttaggatttttacgagtttgttaaaagcaaaaagaataaaatgagttttattcttctttctgtggggaacgtaggtgatagtggccaccaatgtggcagaaacctctatcacaatcagcggcattgtgtatgtgatcgactgtggctttgtgaaactccgagcctacaatcccaggacagctattgaatgcttggtggtggtgccagtctcccaggcatcagctaatcagcgagcaggacgtggtggtcgtagtcgctcgggaaaatgttatcgcctttatacaggttagtgtggctttccctaagggtttttgactttcttatagtcagcctgggcaacagagtgtagcaaatgtttactcctaatggtagaacttaacataaaatacaggccttcctcacaaggccctgtgtaatcagatccccactgctttcctcactctaaatatggtgtttctttgttactagtccccattggccaaagctggcctgtgagtgactgcttatttgctatcctgttctaacctaacatctgggcacaggcctgtgtagccatttgtccctagggtgtgggctgtgtgtcctggagcctgtctttcttgcctttctttcttgacttaatgtgctgtttttgtattccaagatccctgagtcttgcggagcctcacattgggttccccttttacttctggttcagagcatctttgccaagtgaaaatggaaggtctgtccggagactcattcatagaaaacaaatagttggtgagctcctcctctgtgctgtgcatcatgctaggctctgagggaacagaaggcaattttaatactgtctcagcctttctggagctttctatccagcttgaagacagccttacctatagacagtgatggacccagagctgctctttctctgcacttctcttctgtggggaatgctgctgacattttccccagttgtccagactcaatttccaagtcattgttaattctcttctttatccagtatccatctgcattcacttaaccaggcccagggttttttattttgttttgtttcttctggtgtggctgcccctaaagaaggtccaggggttttagctctgccatttgtctcttcttttcctttctggttattattgtccttgttcagtctttgatgttgatctttcttttagcagatgtttgcagagcacctgctgtatgctggccacggtgctagagcttggagatctggggctagtaaccatggtctgtggccacagtgactgacagtctggtggtggaggtagacctcaaaacagatcagcatattatggtatgatagggagccataaagaatcgggagccttggaagcagagagcagaggcttttccttgggctgttttccctgcccagcagatcttccttatctttcaaatcctctctcagatggcagttccctcatgaagctaccttagatgccttctcctagaagctggtgttatccttctggggatttggggagtacttcacaaccagggtgttgtttgagcctgatcttactggcaatacagtccttatctaggcgaagaggtgattggggagattcaatttcagcgcaccaggcagagggaatggaaggtacaagtacttgcagggaaggaagtgggtttggaacattcacagaagggagggaataggcagaacccagggcctgaggaccaagggcaaccactgaagatgctaagaaggaatgactagagtggaaaagggagagccaggactgaaagggattctgacatgcagagaaggtttcaagacatttttctcttcaaaaattatttattggggtgaaatttacataacacaacattaaacacattaaagtgaacaatttattatattcacaatgttgtgtgaccactgcctccatctagtttcagaacatttcagccactccagaataaaatcccttatgctttaagcagtttctccccattctttctggctaccagtccctggaaatcaccaacctgtgttcttctcaatggatttctctcttttggatatttcatataaaaagtcatacaatatgtgaccttttgtgtctggcttcttttagcataatggttttgaggcttatctacattgtagcatgtacttcattcctttttattactgactaatattctgttgtatagataaaccacactttgtttattcatttattagttgtggacatttgggctgtttttgccttttggctattgtgaatagtgctggtatgaacctgcatgtacatgtacttgagtaggtgtttttaattcgttttggctattacagggttatatgtaattttgtttaacttttaaggagctcaagttacttttaaagaggccagcattatctcatgtgccaagaaatcatggactaaagataggcaggtggatttgggtgaaaagtcactgaatccctttgcatgagcagtttagtggaagtggggttggggagggcccctgactgtaatgagtgcattggtgtccagcctctaggcctccacaggagcctccagaaagtattgctttgaacagggtaccacctgctcagaccctccacattttctcaaaccatccaggatttttcctcagcttatcttctcctactaaccactacaaattgcttctcagctgaactactacacgacatgctctctgcatgagaaacgcttagataccttttccttgagctgtttcctctttgcccaacagatcctccttgtccttcaaatcctccctcaaatggcaacatgcagcttccctggaggccttcttccagccaccctgcttcctccttccctgagcctccatttctctttgggaggaccactccttgggacttttcctatttctccttgagggtcaactgtttctggtccaggtcccaggcccctgcatatcactgaagcttttcaaggggattggctgtgactcctacagcttctggccccatgcttcacacacttgagtcctcaggagagcttgcctgtcattgaacttttaggaaacacccacttcctgtgagcttttcagcagggtggtcctcttatgtgttaactttgtttctcctttggttagtagtgtgcttggaaaatggggttatcctatcaagaagctgtaccccaaattctcttgaaactaaaggaagtagctcatttggaacttcctgctgttggccgtcatccagaaccttctagttagacccaatttgtatcaattagtccacagaatattggttgtctgttttctcaaagaaaacctttctgaagtttttcggggatagtggtatttcttcatggcacttttttttttttcctctagttaactaaagctttatgatctaaatggaagttgggtcacccttgtattgtttaagaagggtgtacatcagttacaatgttgactgatgtgggaggttttggtgggtggagcattctctatataatccttaagctttctgaatatacatgaaaatgagttaatctcttcctcttttttccccacccttcctgcctagcttttataaaaaggccttcttccaaagtctcttctccttccccctccctttctgcccttcctgtcttgggatctctgtgtcttaggatgctttttcctgtgtaaggtcacctcttcttcctggtagggcatgtaaacattcatttcttggtttggggcagcattggattctgggaatgatattgtgtacctggcttgttgatttaaaaatttgatttggacaatttttgctctttataagatttggtcatttgttgtattttggtgatttatcttgaaattgttctttgcttgtatgtgaagctcttgcttccttgacttattccaaacagagatggtggcaactgggaactgatagtgattcagcaagtacttgttggtttgatttaatgttttgctgacaaaaaacattaaaaaacagaattttagataaagttttataaaggtgtattcaaatatatttatctaaggcattttaaaaatagaatggtctttcctaagtataaaaataactttatatcatggtatcatgtgcatctgcttctagaatcctagagacccttgttcaagatagagaagaaaatttgtcccttggcatagtgattgcatttgattgtgacatttggtcccaaacagttctgatttcctatcctcagaggaagcctttgacaagttgcctcagtctacggttcctgagatgcagcgtagtaatttggcacctgtcatcctgcagctgaaagcactaggaattgacaatgtcctcaggttccacttcatgtcggtaagtcctgcctgctgtctggggccatagggaggctagggagctcacagggggatgtcaggacattgtcgtagggcatgccatctttcctttttttccctactcaggtcatgtgttgtgtgtctgctttgcaaccaggccctgtgcaggacgtaggggaaaacagccagacaaggtagcctcaattcctattcttacatagttcctgttcttgtctgctggggaatagagacaagtaagtgggtaattacagagcagtgtgcccagggctctgagagacaaaggaagggcctcccaggtgaaacctgaaacccaaatagaatctcaccaggttaggagtggagagttccaggacagctagtctttgtagaggcctagatgcaggagtaccatgattgggggatccttcctgcagctttagatagagctgcaggaagacccttgtgcctgattgcttcctgagatgatttctaggagtagaatgactgggtcaaagggccgttgtcctgtttagggtcctgttacatggccagattgctttaccaatgtcaactctagcagtgcctgaatgcccaccttgtggtacttccattgtgccatgttatcttctttgggtttgctgatttgattggccagagagaggaaatcacctttattataattatttttaaatttttcataagatagatttttataaaaacatttattagtcagtttttatttcttctgagttgttaagctatttatctgttagaatttgtgtcagttagtgattttcaagagtcctttgaatattaaagacattaatttttataatatttcttacaaatattttctatttatattttactgttttttttttaatgtgtggacattctaaacatattcacagtaatctatttttgcctttatgatttctttggctattctttttttctttctttattttctgagacagtctcactctgtagcccaggctggagtgcagtggtgccatcttggctcactgcaacctctgcctcccaggctcaagtgattcttgtgcttcagcctcttgagtggctgggattacaggtgtgtgccaccacgcctggctaattttttatatttttagtagagacaaggttttgccttgttgaccaggctggtctcaaactcctgagcaggtcaggtgatccaccccgtctgggcctcccgaagtgctaggattataggcgtgagccaccacccccggcctctttggttattcttgcccttatgaagtacttcttatatttgggtcagttaatacatattctctcatattttcttctagaatttttatgatttgagaactttgttttttcccaactgtatatgatatgacaagtctggaaagtctggattcttggatagtaaagtccctaatgtcatatgtgatggtaaactaggtgaatgaaagaatagaacatacaaatatcaactcccccaaagaaaattgtgtacttaccataagtatagggaaaatggaccctttgattattggtgtagagtagaagatattataaagaaaagataaacaggctgagcgtggtggcttatgcctgtaatcccagcactttgggaggccgaggcaggtggatcacttgaggtccggacttcaagaccagcctggccaacatggtgaaaccccgtctctactaaaaatacaaaaattagccaggcatggtggcatgcgcctgtagtcccagctacttgggaggcttgaggcaggagaaacgcttgaacccgggaggtggaggttgcagtgagctgagattgtgccactgcactccagcctgggcaatagggtgagactctttcttaaaaaaaaagaaaagataaacagtatgtgctgatttgaaagcttatgaaaagccccgcatgtaaaattaaagaaaaacatacagtgacagaaatgacagatcagtatctcaaaaaatatgaagagtttttatatgcacatcatttacagtaaatattcactaaataaagctaaaggaaaaaaacagcacaaattcaaatttcaactatcattaggacatgttgagcttctctaggagagaggtgactgcacgttgatatagctataaaggatgactttacactaattttttttttttttgagacagagtctctctctgtcacccaggctggagtgcagttgtgcgatctcagctcattgcaacctctgcctcttgggttcaagtgattctcgtatctcagcctcccaagtagctgggactacaggaaagagccaccatgctcggttaattttttgtatttttagtagagacggggttttgccatgttggccaggatggtcttgaacgcctgacctcaggtgatctgcccaccttggcctcccaaagtgctgggattacaggtgtgagccactgtgcgcagttgactttacactaattaaatgattgagtataaacaaaaatggtgaaatcgaaaactgccacaatttgggaaagtaaattcctcccatgttataccgtttctgtccccatggaggactttctgacaacatttaatgagccgtagaaatgtctgctatttcttctcataaaaatttctcctgaaaaaataattcagaagaagaaaaaaagcttacatatgtgataatgcttatagcatttatattacatttaaaaatataaataatgaaaattatcgtaaaacttttggacagttgaaaaatgaaaaaaaaaatacaaatttatcttcacatatttccttctggttattatcccctgaaattgtggtttttatgattgaaattacagagtacatataattttgtatatttagcaatgttatttacaatggtgaaaaactggaacaatttaattgcccagcaataagaaaattgacttttttatggagtatgattgtcatagagtattatgcagccatcccaagtagttactgtgaagtttgtatgggtgcaagaaacaatgaaaacagaaaaacatgtagtgagaagaccacactaaaactatacataaacagtaattccagatatgttaaaacagtgtttctgtattatcccaaatcagttgaggtcacagagaaatactagtgaatgtgattagatgaaaatactatggataagatttttgtggagagggggataagttttttttgttaattgactggaaatcgggccaggaattgagtcagagctgaccttgttagctttttctgtaattgttaaaagcctagttcagagattgctattcctgttacctcatccactctcagtataaaagatcccacagggtttaagctccttcatttaagtgttgcccattttgcttctttgtagagaaagatgttgtaagcaccaaggaagggctagtggatcatttacatgatttgctcaatggtgatttgttgaatcctctctgtgtaatgaatccaataggtttagttcctgccctcgtgtgttcacctgtgtgtacggtcactacaacttttaaaaaagtttaactttggtctttggcaaacaaagtagggaaggtagactgggaaaaatgaggcctgagttcagctttgccaccaactgcctatatgaccttgttcagctgtcttttccttattgcagttcagtttcctcatctgtaaaactgagctaaaacaatgtgatgaataaaatacatttgttatgtgaatgcatttagaaaaaaatgctatgtgaatttagaaaaaatgcatttagaaaacatcctatgcagtttaaaaatgtactgtaattttattacctgggttattagaaaccacataatttagagagaaaaaatatgatgcctggcacttaggtgctcagtcaagatttgtagaaggaaaggaggtaaagatctggaaaatcagactgaggctcactacatcagctttgcttatgaactttaaggtctctagagctattattttttgaaattcagattcgacatatgttgtagtttccagacagggattaagaaaaaacaaattcagcgtatgttatttacccaccacggggcctggagtgggtctatgggggatgcaaagataaatcatccccgagccctgagtgctgcagtgtcctggggccccggtgtggtagaaggttgagtctgtgaagtaaaaattagaaatgtctcaggagggtttaaggaaaatgaagaggtagtttaagatagggacctatcacgtctgatggaggggaggatgagggagcacttcaaagggaaatgtttcatcaagctgagccttaaaggccaagcagtacaagggtgcctagaaggacaggaaggacatttcaagaggtgccaacagcaagaacagaaacatggaggctgggaagaatggggcatgttagaggggagaatggatttgaaaaggaaacagccacattttaatgtttgttgcccaaataaattgattcaggaagatttttatgttttttccagccccctccagcacagtcgatggttcaagccttggagttactgtatgctctgggaggtatgccagtttctctcatcattctctcttattatgtgttgtcttttgtgatattagtgaggtcatattcactttagggattttagtatcttcaggaatgggattggttctccccatatatataatccccctaatgatactttattgaaataggaagttgggaccataattagacacatgaaagctaattatgacagccagtatataaaacatgccagttcgtcagaagctattagtaagaatcaccagggctacactcctaagagatgtctagagatcagcagttccctaccaggatgtcagatcttacctccccagaccttttttctccacccaacaaccacatccttaaaaatcgtggctcagtattctctccctaaatcctcttcatttcattcctggagttgcttgtggagaattggggacattatcagcttctaacaccatgttacgggggaacttctattcagttgtcgattgaagatgttattaggttggtgcaaaaataattgtggtttttgccattgaaagtaatggcaaaacccgcaattgcttttgtcccaaccttaatagcgtttatcttgacatagagaaaatcatagtctgaattcaccgctttggggagtactgtttcttctgtgattggtaccacaaatgaatataatttccaattttgaattaagttttagtggagattttgctttttgagatttattttgagtgttactttttttttaagtagctgtattgaagtatagtttatgtactatacaattcactcgtttacagtgtacaaattcagaggcttttagcatattttcagggttgtgcaaccatcaccacagtctaattgtagagcatattcatcacccaaaaaagaaatctttacccattagcgccgaacttctcattctctttccccctagtcccccagcccaaggcaaccactctctggttcagtctctatagagagtttttatctctataggtgtgccttttctggacatttcatgtaaatggaattgtataatatgtggtcttttgtgattggcttctgtttcagtctgtctgctgttgctataacagaatgccagaggctgggtaatttctaaagaggtttatttgggtcacgattcaggtggctgaaagctccaagattaggcagctgtatttgaggagggcctcagcctgcttccactcaaggtggaaagcaaaaggagagtgggcgggtgcagagatcacatggcaagagaggaagccaggaagagaaacagaggaagccaggctcttttaagaacctgctgtcatgggaactaatccattactcaccctgggtaagggcattaatctgttcatgagggatcaccctcatgacccatacacttcccagtaggccccatctcccaacactgtcacgttggggatcaaatttcaacatgagctttggtggggacaaactacatccaaaccatagcagcttctttcatttagtatcatgtttcacaggttccttcatgttgtaacgtatattcataccttatccccttttatcactgaataatattctgttgtatggatataccacatattttttatccattcattagttgatagacatttgggttgtttccactttttggctgatataaataatgctgctataaatattagcatataaatgtggttttggtggacattcccaccagcaatgtatgagagttccagtttttccacattgttgccaatgcttgtaattgtcttttgtgttatagccatcctagtgggtgtgaaatggtatctcttggttttgatttgcgtttccctgatgagtcatgatgttgagcaccttttcgtgtgcttgctgcccatttgtaaatcttctttggagaaaagtctgttcaaatcctttgcccatttttatgtgtgctgttgtctttttttttttttttttttaaattgagttgaagttcttcatacattctgggcacatattcttatcagatatgtggtttgtaaatatttctcccatttttgtgttttggctttttacttacatgtacttactttttacttattagtattgtttgcagtacaaaaattttaagtttttgtgtggttccatttatctgtatttttcttttgttacgtgtgcccttggtgtcatgtctaagaaacttgcctaacttgtagtcattaagatattctcctaggttttatagttttggcccttacattaggtctgatccattttaagttacttttttggtatggagtgaggtaggggtccatcttcattcattatgttgattttacttctctgtgaatagccaattactgatttaaaagatctccagtgatttaaaagaccttcagctggatttacataagatcagcctggagtgaatgtgtgttggagaaggtttccacccccttcttctcaagcatgtaatgggaactcgaaagcacatttcctgggctgatctgtagtgaggatgagagaatgttgacagcataggagtttttatttgggctggtttttctccagtcaaacagaatgaaatttaagatatttcctatttcttcaataccctaaataagctggaaaagatagagggaccccccgcctccccccgccagcttcatttgatttcaagctgaattaccacctttaaagagatgtcttactgagctctgccttactgtgagatcttgcagcgtttaagtagtaaaacagtagtctatatcttgggaatccaatacctggatattggcaaggtattgccaatagagggcaagaagggcaggtggggagttgaaagagtcagcccagttcagcaaaatgttcaggaggcagttgcatgaacagggctggtgttggcaccagagggatctgggttagtgtttagattccaagttgctggccctgtagttgctcattgttgttctcattgtggctaataaagagatactcaagaccgggtaatttataaaggaaaggtttaatggactcacagttccacatggctggggaggcctcacagtcatggaagagcaaaggcatgtcttatatggcagcaggcaagagaacttgtgcaggggaactcccatttacaaagctatcagatcttgtgagacttattatcacgataacagtatgggggagactgcccctgtgattcagttacctccactcggccccgcccttgacatgtttacaattcaaggtgagatttgggtgggaacacagccaaaccatatcactcatttagtatgagaagggcacaggacacgggatgccatcgataccatcctggcacatctgtggcctgtccggtcctggaggtggtagaaagtccagacagtgagggggcaatggagatggcagagaaccaggagagttgggggccgggagctggcgaagagtagttccaagaagcagcggccagcagagccgagtgctgctgaggccatcaggaagatgccttgcgtttggtgctacccagttgttaggttcttgggaagagtggtctcttcggagtagtgggaacaggtgaggctcttgtggattgaggagagggtacaagcaggagaaggctgcagggggatttccttataattaagtccttgaatagaagtctttagaagtatcagttttttaaaaaattgggtattcaagagctcagtggagatcttttcttcttttaaggtaatggcactctagtgtcaaatggagtttggtgtagtgcatgaatcatcttttggatactttcttctttttagcatacattatcttttattctctcagcaactgtgtgccttccaacacaatggtacctgccttctgatttcttttgttgttcttatggcaggtctggacaaagactgtcgcctaactgaaccgcttggcatgagaattgcagagtttcctttgaatcccatgtttgccaaaatgctgcttgaatcaggtgggtagagcctgatagcttgaattgattttattttgactgtcagaggtgttgtttgcctgaattctgagcaccctggggaagagggtacaatatggtaaagaagtatatatatatctgtaacataacatttattgttttaaccattttatgtgtgtagttctgtgatacaaagtacgttcacattgttgtgcaaccatcagcaccatccatttctagaactttttccatcttttccattgaaactccatacttggtaaacacaaattccttattctctcctctgccccgcccctggcaaccaccactactttctgtctctatgaatttgactgctctgagaaccctcagaagtgcaatcacacagtatttgtccttgtgactctcttgtttctgttagcataatgtcttccaggttcatccatgttgtagtatgtgttaaaattttcttcatttttaaggcggaatagtattttattgtatatctataccatgttttgtttgtttatctgttgacagacactttggttgcttctaacttttggctattgtgaataatgctgctatgaacatggatacacaaatatcattttgagtccctgcttttatgtttattgggtatatagccagaagtggaattactaaatcatgataattctttaatttttaaaaatgtatttttaattgacaaataataattgtatatatttatgagatagagtgtgatgttttaatctatgtacacattgtagattcagtcaagcaaattaacatattcaccaactcaccaacttatcattttttttgtgctaagaatttgtgctaagaatgttaaaattctattctcttagcaattttgaaatatacgatacattattattaactgtggtcaccatgcagtgcaatagatcactaaaacctattcctccagtctaactgaaactttgtaccctttgatcaacacctcctctttctccattcaccccctgacccaggggatctcccagcctctggtaaccacctttctactctctgtttctatgagattgacttttttagattccatatatgagtgagatcatatggtgtttgtctttctgtgcctgccttatttcacttggcataatgtcctccagttccatttatgctgtcatgaatgacagtgttctcttcttttttaaggctgcatgttatttcattgtgtgtgtacatatttatataaaccacattttctttcttcattcatccagtgaatggacacttggattgcttccaaattgtggctgttgtaaataatgctgaaatgaatatgggaatgcagatatctccttgaaataccagtttcagttcctttgcatatatacctagaagtgtgattgtcagagcatataagtccatttttagttttttgaggtagtgccctactattttccattaataggtgtaccattttgcatttctgccagcagtacacgagggttccaatttctttgacttcttcagatttttgtgaggacatgggttctaggttaaaagatctggaagtcttctcgtaattagaaatcaaagtcatctagaaagtataatttgtttttttacctctgggaaagacagtttaattttttcttggttttgtctaacttttatgtcaactagcaatttatgaagatgtactttagacccagtatggggaaagctaactaattatgttttggaacaaccacttgttctcagccttccatttagaaacaggattcttttttttttttttttttttgagacagtgtctcactctgtcgcctagactagagtgcagtggcgcaatctcagctcactacaacctctgcctcctgggttcagttcaagcaattcttgtgcctcagcctcctgagtagctgggattacaggcatgtgccaccatgcccagctaattttgtatttttagtagagatggggtttcactatgttggccaggctggttttgaactcctgacctcaggtcatctgcccgccttggcctcccaaagtgctgggattacaggtgtgagctaccacacctggccgagaaacaggattctaagtgtggactggggaagtgcatcattcatgagatgggaggtagtggggagatgggacgagcagtgtagtgtactctgccttgtgccctggagtggtgattgctggtgactgtttccaggcgttccagcagcccccagcgtgctttgctggtctagttgtgccttgggcttcccagctgagatgaacccttttgagaaggaagccacttcatagaaggggtcaggagcagagaaacagcagaaggggcacaagccgctcattccctgtcccctctcggacttcctgccaggattccagatgttcccacaggagggtagggagcaggtgcggagctgacctgcccttagtgatggggccagtcttgaccttggcttatagtcagagtcccctatatttcagctgcagagggcagtaacacctccttttttggagtccttcaaggctactattcatctgggttacatatgggacttcacatttggctgagtgaaatatttttattttataaacttcatttttttgtttttatttttctgagagagggtcttgtgctgtcaccctggctggaatgcagtggcgtgaacttggctcactgcagccttgacctcccagctttaagcaatcctcctgagtagctggaccacaggcacataccaccatgcctggctaattgtttaattttttgtagagatggggttttgccatgctgcccaggcttatatactatacactttaaaaattaagctctagaaaaaatatgatcttagtcttcagtgtggtgcaaggaaagtatcagaaaatgtctttcacttcttgttggcacattatatggttgaaaccaaacatgctttttgttttacaggaaacttcggctgttctcaggaaattctaagcatcgctgccatgatgcagatccagaatatctttgtggtccccccaaaccagaagtctcacgcagtaagtcagctctgtccccaggctgtctgtaccagtctcttttgctttgagctttcgttgtcaaaactgtactcaggaactgctgaagacagagctgtacaaatgtgatctgctcatgttttgagtgtttattccgtgcttgatgttgtgtcaggtgttttgcaggcatcattccactttatcttcattataagcctgggaagtagatattattatcatattttatttatttatttatttattgagaggaagtctcgctctgttgctcaggctggaatgcagtggcgtgatctcagcccactgcaactgcactctgcctcccaggttcaagtgatgctcctgcctcccatgtagctaggattacaagcgtgctccaccacgcccggctaatttttgtatttttagtagagatggggtttcaccatattggccaggccggtctcgaactcctgacctcaggtgatccgcccttgacctcccaaagtgctggtattacaagcgtgagccaccgtgcccggcctattatcatattttaaagatggaggcatagagaggttaggtaactcattcacagttgcacagccagaattgttggctctggattcacagtccagagccccacaccttaaccattgaactaccaacttctagtttctgtcagggaaattgtcattcagactgctctgctagaaaccttggtgggcacattagtgacataagaagtcaggtgccagggtatagcaggctgattctgggcaccacacgacatcatggtcatgttgcaggtgggccattataagctagagagatccaatccccacctaaggtgcaggcatcagcaatgactaattgagtgaacactggaaagacggaaggacaagttttgatactgaagagatagatactcagaagtaaggtgtgttgatagaggtaggtcagagatgagttcaaagtcagttcctgtttgaaagtcagagaattagcagccttatgcatggaggggctgaatttgtatgtgtaatgaggaggagagagactttcttagggattgttgggatcctccttgtcagttgtataactatagattacaaagtttttctgcctctgtgcccagatgcttatgtctgtttttgtttagttttgtttttaattaacctggaggaggagagagacaagaacactaacattttatcaaatttctttgccagataccttgtaataaattatcttaatccacagcaatcttgataggtttagtttcctgattttacagataaggaaatcaaggctgagagaggttaagtaaccaagctgagttctttcaagatatggcagagctagaatgctgcaaactaggtctttctgaatccataacccacacgctattcaccatgcaatattacttccagtgcaaaagtcaatttctttctttctttctttttttcttttttgagacagggtctcgccctgttgccttggttggagcgcagtggtgcaaacatggctcctgggctcaagcgatccttccacctcagcctagtagctggggcttagaggcatacaccaccatgccctgctgatttttttttttagcttttgtagacatggggtttacctatgttgcccaggctggtctcgaacttctgggttcaggcaatcctcccaccttagcctcaccaaatgctgggattataggtgtgagccaccacacccagcaaagagtgaaattctgaatgttgcttcattctttccagattcgagtgcaccgtaaatttgctgtggaggagggcgaccacctcactatgctcaatatatatgaagcatttatcaaagtaagcacaactactgctcgaagtgccgcctcaacacaccaccctctggaggtgatctaggagggaggatcccagaagttcagttcgtaaaggaatgtccaagagagcccttgattttcctgttagatttattgccagtacttctaactggtgggtcgggctttctgcctgagtttgtggtgaggtattgctgagaagaacacaggaatcattcattgctttcccttgcttggagatatggtacactagtggcaggccagtggcccagcctcacgtcatctcacatccactgtgcagtagacagaaaggcaacatttgaataggaagttctgttacattttctgccaggtgaatgaggctgagagcaacttgtagtcctgggttgaatcttcaaagctgtcccagctgccatgagaagacatttagttgagatctgtgcatattcacatatcccacccatatttagctataagtgatgttaattttttattgttaatattctttaaaactaagcaaataatacagcttaaagttctcatgaaaaattgttaataaaggtgatgaaaatgatgaaaaaagtaaccttacataaaagaaagggtataatacttcagatttttaatactcatttcttaaatactcttttagaagtgaagaaatactaaatttttgtttaccagtgatttgaggaagattattcagttggtgaaaagttttcagaaaaaagaaattcactctttttgagacttacggcttaaatcagttaaaattcatttgtacaggcacaatgtatcatctgcagtctgaagctttctctaccactagaaagtgggtataggtctacattgtattattctatggttgccttcttggaatatcttctattaattacattttcttttttaaagcactttaacttacaatagaatttcagaggtacatttccacagcaataatttactctaagacataatgatcatacttatgaatgcagaaaaaattaaatactgttgatagaaaaatcatgctttggggacaaataatagtaatttgtaaattatttctacattggcaagtgtcatattgttggcttctagtataataaagtgatacattcaagcatgccaaagaagaaaagttgatttacaaagaaccacgtggagaaatggttctttctgatagttcacatctcatgaaggtatgtaagattgaaaccgtttctgcgtgtcattaagttctcatttgccctttagtgtaaagagtgaggttgcagagcagtcagatgtgtgcaaggttgttaacatctgttttgagagatggggcaaaaaagggccagttcccatctttagatcttatgccgttgaacagcacatgggggaagagagaagaatgatctttacaacatagccttagtcgagaacatatctgttttctaactccctctctctgggttgttctgtagcacaataaggactctaaatggtgtcaggaacatttcctgaattacaagggtcttgtcagagctgcgactgtaagagaacaattgaaaaagcttcttgtcaagtttcaagtgcccaggaagtctagtgaaggtgagaagaaaccgtcccagctggtgacctcccttgcttcattctgttgagttgtcttcctaaagttctcatgctgggctggtgcgaggcagtgtggcgtgctctgtaccaacactgggttttatattttgagttgcctgcatctgtgaaaagctgaaggtcaagttgcgtattttttccaaggaggtctatttttctttctgatgggcattcttactaaaggaatttcatagcccatgacaatacttaagaatcactaacagtcacatcagtgcacatcatgtcattgattttcccatgtaggctttgcaagaaaaattactttttgatcagtgatattagtagctattacataaaaattaaattttatattcaaagacaagtattattaaagcaagtgctggatatttagcctaggcagccactaaaggtaagacagaaaagtactatgtaagacgtagtctctggcctctagcagtgacagtgactactattaatcagggacacagtaggttacgctgtggcaggggttctccaaatattctcttgctcaatctcgcactctgtgaggtgtcggtaatgttatcctcattttacaattagtcgtaagatcctagggagaaggtagattaaattcaggaccacgcaactggtaaggaggagagccagatctgtatgtggctcagaagtctacgcttttaaggaagtgacacacccgcctcagcagtcagcctgaaagcctagtgtgccaggtactcagccacatcctcagcaccattagtacttggtaacatttcctgagtgcttataagtggctagacagtgcactgagtgttccatgtgtttattaatttaatgctcacaacaacgctgtgaaacgtgtgctcttttccccatcttataggtgagaaaagcgtggctaagaggtaaaatgtaacttgctgaagttacacagtgagggtatgatggagtcagaacctgagcccaggcggttccatttaagtcttcttttgtctttatactaagagcaagtgattaaacaatgacggagtcttggcttttactctaagggaacagtgtaatgaagggagagattcatatggatagacaaagtactaagattatcagtcctcttcgaagttaaagtagtagatactttagtaatcatagaagacgtgctggcagatgtggaaggaatgccgggaagaaggaatccagagagggctagcttgggaagtctttcagcttccttgaggtgtggtgggagtccggtcaagctttggggtctggttgaattagaaaatggtggcaaagagcactctagggaaggaggactggagacaagtgcttggagtgaggagtatatgagacgctcagagaatatttgatgggtgaatacactcacgagagagggaagagttgaaacctgggccattgagccatgttggagtcattgatagaaacaggatgcttacaaggagcacctagttggagagcagctcgtcaaacgcctgtcacccagcaggtagatgacagccttacttcagcaattggtgttcttcacctgtgtttcattatcagacccctgcccaggagaaaagttaaatttaaattctacccagcctgagaaattaaatactaaggaataagattttgtagggtaggattgagctttggagggctaccggccattgtagtgtctaagatgctcccctccccctgcctccaagaaccagtttccacccctttggaagtgatatcacccctgtttagagtgcatattttacatggaaatttcttatggacaataggagagaagagactggatatcggattagatcatatttagacatgtagatttgagattttatcagctcagtgcttaggaaaaatacagaaaatcatggagactaaataaattacatgcaaatttaaaacatctaagggttaaaaaatagaaagcaattagtgaaagatactttcagcagtcatgagataaatgataaagattaaaaactttattatagaatgattttatttaatatatttaggaaaaaacagttttcaggttgataaatgggctaaggattagaacaaaaaattcacaaaagaagaaatatgccgatagtaatcaaataaatgtaatataaaagaaggtaacagaaggtaacactttttgccaaaacattgctagtaagaatgcagtgaaactgccatttttatatattgttgatggctttggaaatagtaccacctttatggaacttacttaccaacatgctttattccattggatctaagataccatcatgtgtaagaaacatcgttattttatgtgtcaccaaagaaaaaaaatgctgccagttatcattgtaaaatgctgtcctaatttcagtgaattaaagttagaaaaagagcgagtcttaaaattgatgagatgtgatatgtcattaaccataaaaataacattagccttttgcacaacaatttggaatgtatcctatggacatcatctaatagtggggaagctttattcatggaagatgttagctgtagcaatagaaacaccagttaaaatggaacatttgaaaaatttgaagaattacttcaattttcaaacactagctcataaccacagaagtaacgttgtatactatctccagtttgtgttttatagaaagaacattgttgccatatgacactcttttacaaaggagttctgaggtcactgaccagcctgcagagcagcactcttaggttctggtgcccagccatggtccagtcatctgtggcttaggggaggttggaggggtcccaggttcaaggagcagaccagcattgttgtcagcagcagttgtggggagtgggacctccttagatggtgctggggcaggcatccagcattgggaagggtagggctggagccatttcaggagagggtttccaggtgtcttgaagcagcctggggtggtgctgggagtggatcctgtgcattagagcacacggagcctagggcaggcaagggtttcacccgcctctctgttggctgcctatgtaggtgacccggatctggttctgaggtgcattgtctccggcttcttcgccaatgcagcgaggtttcattctactggagcttataggtaacatgatacttggtgaagtcatttgttaaaggaacaatcttacaaatgacccaaaccccacagaaagctgtgcagagatagtaattgcataattatttgtaatttctaccatgtctccttccaaaactgagttgaggttagcgacatagctttaagcaaaatatcttgactttctaaaaatgattctcacatattcagctcatctatatgttgtatgttttagaaggatgacaattatacatcttgaggctggtaatatttcaattctaatgacagaataatatgacctgaagaaactattaaaaataatgtttctcagagaagttattttacaattggctagtttattatgtctttagagatctgcacgactgaagtcccctcccaccctggtatagtgtggccacgtctggtgtctttggaggtagccaggtgtttctcatgtgctggatgtgcctcctgctacataacctgattcttccagttccattttctaggcataggaaatcactcattgatgccttcctaatggtctttactatattcaaatgcagtgaaaactaagcatagcttaggcatactgtagcctgtcagtatcatgattctccaaactaatcattccagtgctttgaattgttacttttattctgtcttttctgtctttggctcattttagtttcataacctcagtgtagcctcctaaaagtgtagctatcatcattttctgttctttaataagagaacactccaaagaatttctccccagctcttctatgtattattttgtcattaattttttttcccagagaaaatattactgccctgttatcttgaggtcagccaagatatcccttgtcctgggctcctgttaatgagtccagagttgcactgagccttttttaattttgacagccagatctgctccatctagtatcctagtagccgactgttggaactgcaggatagcactttacaatgatctctagtatgttctctttgttactccaggcatgttgtagcctgtcagtattgtgattcatttgcccattgtatgagctcacctccccaccctgagttgtctgtatttgaggcaacttgtccatgtggaggcgacccccacggtggcccgagatcttccctaaggagtgctgccagcttgtcatcttgattgctcctactctcctggagagttagcaattttgactagcgtttggaaaattcttttatcagtgtccttagcaacaatgtgggctacctaagaggttccaggctaatcattcctttgagacaacatttagtgttgatcagctcaccaccccctggtaggacagcccaggaccccaggacgctggctttattacaatgccgacgaggcattccgtcacagcacttgaagcacttcccccaagaaacagatcattctactgagttggaattggaagtactatttcagagaaattaatagtccagtattgagcttttttttttttttttgagatggagtttcgctcttgttgcccatgctagagtgcaatggggtgatcttggctcatcgcaacctttgcctcccagtttcaagcgattctcctgcctcagcctccggagtagctgggattacaggcatgtgacaccacacccaactaattttgtatttttagtagagacagggtttctccatgttggccaggctggtcttgaactcccgacctcaagtgatctgctcgccttggcctcccaaagtgctgggattacaggcatgagccaccatgcctggctgtgagctttcttttttcattatcgttacgtccccctatagtcattatctttagtatttaactttgctttttagattatagaagaaatcacatgtattatttccattccaaaggaaattgttttgaaagagcacctgcagaagatacacataaacataggcagagcattttattcctaaatgttttttctaagtgtccgcgtgttgcttttctcctcttcgctttttccacgtgatttattcttgacttctggggtggcagccaggagagggatcaagaaaggttgcaagagaagatggagataattgttttgcttgtgacgagttcagtctgcatgcttttttggtaatattaaaaatatctgtgggaaagtcttgctataagtatttaaaatgtgcttcagacaaaattcttctatgttccaaggaccatccgtgatgaccatgagctgcacatacaccctgcgtcagtcctctatgcagagaagccgcctcgctggtaagctcatcctgctgcttagcctgtgcctgctttgaacagggccatgttcttgtttttctcctgtacatgtttcttgacatcgcctctagaattgctgctctgggccgggcgtggtggctcacgcctgtaatcccagcactttgggaggccaatgtaggcaggtcacctgaggtcaggagttcaagaccagcctggccaacatggtgaaacctcatctctactaaaaatacaaaaattagccaggcgtgatgggcacgtctgtaatctgagctactcgggaggctgaggcaggagaattgcttgaacctgggaggcagaggttgcagtgagctgagatcacaccactgcactctagcctgggtgacagagtgagattccatgtcaaaaaaaaaaaagagaatttctgctctggcaaagagcttcttaagcaaacagtgatatttgtctactcactcatccactcagcaaacgttcattttcaaccactgactggatgcttagccctgcatgaggcacagctatgcagagatgaattgggatcccagctcacggttcttttttttttttttttttgagacagagtttcgctctgtcgcccaggctggagtgcagtgacggcgctatcttggctcactgcaacctctgcctcccaggtccacgtgattctcctgcctcagccacctgagtagctgagactatagatgtgtgcaatcacgcctggctaatttttgtatttttagtggagatggggtttcactgtgttggccaggctggtctccaactcctgacctcaggtgatccacccacctcggcctcccaaagctctgggattacaggcatgagccactgtacccggccccagcccacagttttgacatagggacagacacagagtcaactaccttaggggaagggctttactagcagcatggatgaagtgctgggctcagcacatcatgtgccagtgagagtcagggcaggcttcatggaggagataacattcattctgaacctggaaacaagagtgttcagtcagaaaggacccggagggtattctaggtagagaagtagcaggggcagagccatggaacataaaggaacctcatgcgtttgggaagtggggaatcattggtatgggtggcccatgcaatggtgctgctctgtaacactgcctaggaagaaagaggtaagcacagaagtctagagtaggcctttagacatctttataacatttcaatggttaagtttatgtttgtccaatttaataataaaaattgggggcttatatttttcttgtttacaatttcatttttctagaattcatttatattgtattttaccaataaaaagtactgattaaaagtactgatcaaccatggattggattttgtttttttgagacagtgtctcactctgtgtttttgagacagtgtctcaatctgttgcccagtggtgtgatcttggctcacttcaatctccaccttcggggttcaagtgattctcctgcctcagcctcctgagtagctgggattacaggtgcatgcaaccatgcccagctaatttttgtatttttagtagagacggggttttgccgtgttggccaggctggtctcaaactcctgacctcaggtgatctgcccacctcagcctcccaaagtgctgggattacaggcgtgagccactgtgcctggcccagattggaaattttaaagacgacaacaacttgtccttctccaattggaagatggagaagccctgggaaaaagggtggggtgtgtgtgaagagagggagagaagatagcggtagatttgaaggcaagaaagtctgtggtcaaacactttgtaccctagaattgcagctttcaaaatgtggtctccagcccagcatcagtatcacctggaaacttgtacgaaatgcagcttctcaggccatgccaagtcccattcaatcagaaactggactagggcctaggactccattttaacaagccctccagatgtttcttttgggcagtaaagtttgagttctgtttccctagaccaaggaatcggatttatcctgtagccactgcagacctagaagttgcttaggttgaaagcaccttggtcggttctgggtttagaaatgttacccagtgaccacactaatgtggtcaggatacgcacactcgtgtgcaggataatttgaagagtgcccacgcctgtcatctcagcacttttgagaggctgaggccagaggattgcttgaggtcaggagttcaataccagcctgggtgccatagccagacctcaactctcaaaaaaaaaatgagccaggcatggtggcacgtggctgtagtactagctactcaggagactgagacaggaggatcgcttgagcccaggagattcaggcttcagtgagccatgattgcaccactgcactctagcctgggtgacagagcgagaccctgcctttaaaaaatttttttttttaaatcaagagagatgcaaaacctcaattttagatcctttttttgctgacttttgggtggttaaatttgggagttgcttaaaggagaaaggcttttctttttcttgcttcattcctaaggagctctgaagggcaaagaaaggttggggaaatagagccagcctgaagccatgccataccattcaggtggcaaagaaagtgccccccagtcacggcctctttgcagggggggcccttctttttcctttgatcagctgagattcacttactggtttttgaggggtggggaaccacagtatggctggtatgtttataacatgggaagccctgaattaacactttggatgtttcagaaactgatatctactcatatgcacacctaaaatcaggggactggatgttatgctcttggctcttcggttgtctattacctgagccttagaaacattttttcccttaaataaaggtataatttatttacagtgcaagatgagttttgacaaatgtgtatacccatgtaacctggacccacataaattatacaatattgttatcattttagaaaattcctttgtgtctctttacagtcagttcccagcctctttcagaatcaggcaagtctttgcctccatttctgcattttctaataaagtcattaggctcagttcagagttctgtaaatgcagatgaaggatccagaaaggtccttcgcggataactgagatgttccagaagtcattgaggatttagagtctcatctgaaaaatggacacaccattacccagcacttaggtcttgaggctgtggtgagcaacataaatgcatgtgtttagcacagtgtctggcacatagagtagaacctgttaaaggttaaaggaaacagcatgtctacctgtggttcctgactgtcatcacaagagggggaaattagctcatgtttctttctcatttcagggtcatctataacgaagttatacagacctccaagtactacatgagagatgtgactgccattgaatcggcctggctgttggagctggctccacacttttatcaacaaggaacggtaggaatgaactgagtctgtgccccagccacctgttcacagcctctccatgtttttaaatgtactttttttctccaatttaatgccctatgtgtgttccccctaggggtgcatagggtggaaaggccattaccatatccccaaaacattctgggaaagcactctagcgtttaattcatagtgaagtgcaattaaaaataaatccccctaatctcataagaaaaaaaaggtatcgctttctcgctttctttctccttttgctcttccaaactatttttttttttttttttgagacagtctcactctgccgcccaggctggagtgcagtggcacgatcatggctcactgcaagctccgtttcccggattcaagcaattctcctgccttagcccccatgtagctgggattacaggtgtgtgccaccacgtctggctcatttttttctttttcttttttcttttttttttttttgtatttttaatagagacaacggtttcaccatgttggccaggctggttacaaactcctggcctcaagtgatccacccacctcagcctcccaaagtgctgggattacaggtatgagccagcaggcctggcctgagctaattaaaaaaaatttttttagggatggggtttcactatgttgcccaggctagtctcgaataactgggctcaagtggtgctcctgccttggtctcccaaattgctgggattacaggtgtgagccaccatgccaccagttcgttttttatttttatttatttatttttgggacagagtcttgccctgtcatcctggctggaatgcagtggcacaatctcagctcactgcaacctctgcttcccaggttcaagtgatactcctgcctcagcctctctaatagctgggattacaggcgtgcgccaccatgcccggctaatttttgtatttttagtagagacagggttttgccatattggccaggctggtcttgaactcctgacctctggtgatccgcccgccttggtctcccaaagtgttgggattacaggtgtgagccaccacgcccagctccttttttaaaagggttacagccctgtgctgtttgtggcctgaaaatacttgctttacatattttgcccaagtttactgttgtttacagcagaagagaaagtctgaaacctttttctccattagggccagaattggactacacaatgtttccaaagcgatatttgaattgattgccacattgaaaaattgggagatttcatattaaacatgaatttctggtttctcttgaaagacatgtttagtctggcaacactaggcttgcgttcctacgtggtggcatcacaggggcttaggggtggctgcctgctgttagtgacatcgccaggtgccgtagtcccatgtcacttgcttacttgcctgctgcactcttggagacatttgaatttgtgaccctgtaaatggaaggatctcctcatctctcctgctccagcaaagtcaagggacattgccctctcaaaattttataatatttaatttttatgtaatcaaacaaaaaccatttcacacctttatagttcttcacacatcccaattcagatatttcagctggaaagcagatcagcctgcagggactgataaaaatgcagtgtgtgttgtctttgctgaattaggttgataagaataaacctggtgaaagaaaggcttttccttcaaaacctctcaggtggaaagcagcagacttcaggagtcaagagaagggatcagaaaggtaaactagaggttgaaagaggaatggtgcagtggtcaaaatgcctgttaaagtaagaagatgcagacagccagagaaggataagcctgaaattgtcttggattcatttagactcttggaaacagaattagcccagaagctgagtcattttcccttctcagctcaaaattccagtttctttaggtcaaacccacaaagttaaagagcaaatagcttcagaaatttgaagaaaataacaagcccaaatttcttcatttgtctcttctctccaaatggcttttttatttttaagctcatcacctccactgtcatcggagtatttttagagaggctgggacagacctttagaaatcacctagtgcggccgagcacggtggctcacgcctgtaatcccagcactttgggaggctgaggtgggtggaacacatgaggacaggagttcgagaccagcctggccaacatggtgaaaccccgtctctactaaaaatacaaaaattagccgggcatggtggcatgtgcctgtaatcccagctacttgggaggctgaggcaggagaatcacttgaacctaggaggtggaggctgcagtgagccgagatcacaccactgcactccagcctaggcgacagagcaagactgtccccccaaaaaaaaaaaaaaaaaaaaaaaaaagaaatcacctaatacaacaacctcattgtataacgatggtccccaaaccacagagaaacttgtgttgtttcttaactgtatagtccaagggcacttctactattaacttgtccaaagcagattgatttctcaaagaacctccagatctacaggggttgcccatgtatggtagatgttcctttactgaacacagtgcagcacctcacaaccttccacagcccacagatcattcacggctctgttcctggcacctttggagactttccatcaccactgtttttcggaatgttgctctcaccctgtgtggaggcctgaaatggttcagagtcagctttgtttatattcaacattcttcccagaaaaaagcaccaaaaatggccccacaggcacaatggcgtcatctcccatccccaagctaaggccgtggatatctaacattagctgtaggggttatatcaggtgacgtgtagagagagaattcagagaaattcagcaagacctacagctagacaggggaagaacggggtgacctattcagagatttgccttctggcttttaaattatttttccttattctcagagatatcttcattattagggaaaacccttttaacgaggcctttgcaagagcctgtagtagtcctccctcaggtgtaagcagatggaaagtctgagttcttgtagctcatttatacccgggtcctgttcgctctgttgtctctcacgtcatacctggtggtgcgctgtgtcttcgttcacgccctccattttttcagggcctgcagttctctctgggggcgatgcggcttgatgttgtggggccatgtggctgtgctaagtagtgggcacaccagctccggagcagtcagggtgggcattctcatgtgaggctcccactgtgtgttagttggcacggcttagggatctcttggttattgatgattagtaatgggctgtcgggtatatcccagttgatgagtggagggaggtctttcattaaaagcttgtatttacacactctgcctcaaaggcatatttaaggatttctgccacttttggctttgctttagaatgtaaaaaatacttcattttccaatcctattatctgatgcctatgattagaatattgtgcttcgtgttattcataatggtagaaagtgacatttctggggaaaaaaaaaagtgtcactaggaggtgtcctttctgttttcccagcaagcttgtaccctccatgtgggcagaggccatatctttatctccatccttgagcatgggtacctggtgtgttgagacgcttggtaaattgacttccttggtcctaaagagaggataatttttcttgactattgtcaggaacttcttggagatttgagatcacttccagactgagcccagtctcctgagcacagttgtctggctgcggtgctgtcctctaggctggggcagagggagagtcgtgtctcaaaaagaaaacctttccttgacagcttccgcagagccctgtataaccagcttcagccgctgtggcttgggcctcgggttgctggcggctgaattcaggtcggcttcttcattggccacttgggctttttccttccaggctgtttcatgaacagctcagcatttactgggaaggtgtggaccagatggaagatttgatgtggtcattcatatggggattatgttgcagtctggtttctttgtctaatcaaccccaactgtagtgtcttctcttctgttgcagcacctgtctctgaaagccaaaagggccaaggtccaggacccgtgagaggagcccacagctacagctgcagggactgctggcgtcctctcctccatgctgctgcccctggtcccaggtggggtgagctggcaccagctcctgtggaatgtttggttgctctgaagtgggctgcggcctgttcattagtcctttcttcccgctgcccacagcatttgcatccttgctgggatcctggaggactttgtgcatgggcaggcatccttctgtgctgcagcgggcagagtgggagttggctcactcagcacgctcactaacccagcatgccacttccagcaggcatgcagtcctggcccagctctatgggaaacaaggaggaaagttagccactgaaggccaaaacaccatgtggggtggacagagggtttgctgggctggctttgctttccctgctggggccacagctgtgttaaccaatgaggtctgctgccaggtgtgaacaagcatgtctctacgaatgaacgaaacattggggatctctgccgaaaccaccaaagggcatgtctgatgggcacagggtctcccaaacccagtggcttctgtctgtcctcagcccttgtccctgtttatctgcagccaggagacttgcaagggattggtgattgacagagaggactcgtgcgctgttttgtgttagcagaggatttgtgtttcacaggtaggcttagcgtcctctcagagtgtagtgccaggtcctggtgccacgctagctgagcactcaggagagttcatcagctcagatcccacagggcctcctctttagcaggaattcacaacagtttggatgccctaaacttctgtagctcaggaacatcactggtgtatttgtttttttgtttgtttgcttgggttcttgcaagagcgcgtggggacagttcttccagcaggcactggttttgttgccccagggctgctttgctgtgatgatgattgcatttcaacacatgccagatgcagattttttcccccttactgtttcaatgacctttattttaaaaacacatagcttgaaaatttatttttatactgatattagtttggatgtgccacttttggcaccaaacgtgtatgtcatttttatttccattttataaacatgtaaataatagtgataacttgttaataatagtaaacctttatacctaaagtaaatgtcttccctcccacacctggttttcgtgtctgtatgttaagatgttctaatgaattgttcgaagtgagggcctgacattagctaagaaacttaatgctgtggcatacagcagctttgggatctcagggacacaggaagccccctaaagcaagatgatgtgactgaatgacctcaagacctgattagagtaaactgtgggacatttaaaagaagtcccaaagaggtgctaattcttgccagtttccagttgggatcttcctgtagagaggtcagaaacattatttttcaagtttggctttaggactggggctgatcctaaaaagcttatatggcggtggaaggggaaaggtacaggtttcacaccctcgggttggagaccagagtccactgggagcccggacaatctggagggagcacccagaggcaagcccgtccctgcatgctgcctctacccctgggcgcctgatcctgagcacatgcttcccctctgtccctccacctctcagaaggcagccctccccaggcgacaccccccagtgttgtgtcctgtgttatgtcacagtctgtgatgggtgggacaggtccttgctgtccgaagcaactacaaaatcctgggcccatggggaggcccctttacagtagggttggttaaggctgggaccacacaactcaccagggagtggggcccggcctgggcgagagagatgagagcttttgactttgtctgttgcaggtctgtgtccctgttcccattgtcagcccacagatgtgacagcagggcctagtacctcacagactgtcccccagtacttccacagaattagtcccctcgggctccacacaggtcttcagatactgctagtaaaattccccacagcattgctgtgtcttccctttggagcaagtgagagggcagagagaagctggcgctggaaagcatggaggcggtggtgccctgtaggcccagagatggcagctttctgtgttggtggcttgcagagaccctgccagttttctgccatagctggcttccccgggggttggacattgtcgtcacagggagcccctggttcagccagtgcgctgctcagtccagccagcaaatgttgagccctcaggccatgtgcatggcacagggatgaggcggagacacttgacaacaagtaaccagatgagtggaccaggatggagctgggcgcacgagaaggacagggtggcaggagatggcagaggtccagtaggggttgttaaggccagggctgtatccacagagacttccccacgacaagatgctttcctggtgaaaggacagaccgctctcatgttcttccctggccatccccacattgctgagcatttcatgtgggccatgaacttggagagctgcctagtgccccagctccatgctcccatctccactgttttgtcctggtgtcagcacagcctactgccagtgctgctccagcttcatgggctgggccctgccattcagtgctgggttgtccccagcaccccagccctgccctcagctctgttttccagggcccggcgctgacagtgtggctgacatttctcctagcctgagcaagaatgtctgccgctgaccagacagagggttgggtggctgggggagggaggcgcaggccaaggggcctaaatctggaaaaccgcaagactccgtcctggagccacaagactggatgtctggcagtgaggcctgggaagctgtaagttgtaaaagccccatctcgggtggttctgatgaagtggtgggcttgggaatcctggggacaggagttgaagatgtgaagacatgcagcccaatggacagatagcccccagcggggagatcagagcttcgagatcagagcgtcaggtctgagtgaaagctgataaattgtttcttcacaagtgtgcttagaccccagcccaattccccttacgtgtttccccagaacacagatctgtggggttgggattcttccccaggcaggttgtggcagcaggcatcaatgtcagctcactatgaattttcctgagtcttgcaaaaatgaggaatgtgtagtaatgagcattttataaagcttaagtttattctctataaaagaccatcctttagtgttttttattttttatttttattttttgagtcagagtcttgctctgtcacccaggctagagtgcagtggcatgatctcggctcactgcaacctccgcttcccgggttcaagcgattctcctgcctcagtctcccaagtagctgggattacaggcacctgccaccacacccagctaatttttgtattttcagtggagacagggtttcattgtgttggccaggctggtctcaaactcctgacctcaagtgatctgcctgctttggcctcccaaagtgctgggattacaggcatgagccaccttgcccggccatcctttagtcttttcttggtgctaagatgcttttaggaaacaatggtgatagtagatggtggttttattttttaatgttttctttggaaaaataaaatgtcaacagtcgttcatctatcacccaattaaaaaccaattcaaaatgatgaaacaaaaactgatgtaatcctcaagtctgggaactactgggttgtggctgagtgggccgggcagggcatctggcagcatcagcaccaagatcatcattctgggaagtggatctgaactgccaagcacccacctgggtttcaagtgaactttggcgccgctggaggacatttctatcccctggaagaattcgagttggcaagtctcagccccatatccctttttcacctcaagataagatcaggtattttccactctccaatgattcatctgaattttctcctcagccttctaatttgtgatgaaacaggatgatggaactctggatttcttgtcagtttaatctgtttttttttttctttttttctgagtcattggaactggaaatagccaatcaaataattgcacaaacagctggctactgtggatgaccaggtggaatttgcgtggcagacggtctggagagggcttgtccctgggtcctcacagtcattgctccctccagcaagcaaggatgacacgttgacgtctctggtgaatcctggcagtgttcccttttgcactcttgggtggcattggacttgctggaacagggcgtctccttgcctgcttaagtgcggccaaagagattcccagcgcagcgttcccccaggccctctggcacacatggccaccgctcccacttgtgggttctcctgaaggcaatgagcaggctagggaggctgggaggttcacaagggaggggtggtgcaggcacaggatttaataccccaggatctccatagccaggtgaacgaccagcacaggctactgcccatggcttcttgaccatggcctcatcagtggctccaagtatgaacgtcctagccaggttctttgctggcctcagcctgatgggcggacccatataggacccaaaggtcgcctgagttcctttctgcgtccccaccactgccatcagcctctacatcgccctggaccccaggagagcaggagctggctgataaggccttaccagctcaccctcaggctgtttattttagcctcgttctctggttgcttttcttccccgcattttaggcttgttctgttttcaagtgcggtcttcagtttgcttggtgtctgctgtccctgtgttttccctttgctgttgtttttttgtttttcctcatgggtatgcctcacccctttaatctccacctctctgacctctgcattattttcctttttactgcgaagttttaaaaagaatgcagtcgtgtttatttttaatgctcttcaaaagtattttttcctcgacatttatgttaacgtcttggtcttttttgtactctgcttgtttgtctaactattattttggacatttgttgtcgtggttctataaatattttcttctgtgatcttcttttgtttctttttgttttgttttgatacagagtctcgctctgtcacccaggctggagtgcagtggtgcaatatgggctcactgctgcctcggcctcctgggctcaagtgatcctcccatctcagcctccccggtagctagtaaagacggggtttcttaatgttgcacaggctggtctcgaactcctgagctctagtgatccacctacctcggcctcccaaagtgctgggattacaggtgtgagccactgtgtctggccttttctgtgattttcatcttctactttagtgtattagtttaaaactcaacagttgacttcccattttattttacttcctttgccccccttctcttcatttctttttttttttttttttttgagacagagtctcgctctgttgcccaggctggagtgcagtggcatgatctgggctcactgcaagctccgcctcccgggttcacgccattctcctgcctcagcctcctgagtagctgggactacaggcacccgccaccgtgcctgcctaatgttttgtattttttagtagagatggggtttcaccgtggtcttgatctcctgacctcgtgatccgcccgccttggcctcccaaagtgctgggattacaggcgtgagccaccgcacccggcctcttcatttcttattatgcttaatttgctttagtggttggcaaaaggcctacctgtaggtgtgggagctgggggaaggtattccaaacaaaggattaaatgtcaggaatgtacaaggagctcctataaatcaccagtgaaaagacaactccagcagaaaaaaatgggcacagggaatggaaggcaatgtataggggcagacccaacactccaccaaaccactgaagagatattcaaagttagtcatcaggaaaacacaagctaaagcaacaattagacatcactctgcaccaatgagattagcaacacagtggaaaggtggcggatggagatgcggcggcctctgtgcgcagctggtacggcagtcctggagagccacctgggactactcatgtgtgttcctgccccacagcccagaaactctgcttctgggggtgtgttcccaacaaaattctcacccgggtccttaggagacacatgtaaggatgcttactggtgtgatggatggggtggggactaatgtccatccctgggaggtgtgcagggacaatgtattggatgacactgtggatcagtacagagcaggttcatagaacacagacctgagaaatagctgagtggaagaattaagaaactgctgtaatcccagcactttgggaggccgaggtgggcaaatcacaaggtcaagagattgagaccatcctggccaacatggtgaaaccctgtctctactaaaagtacaaaaactagctggatgtggtggtgtgcacctgtagtcccagctacgcgggaggctgaggcaggagaatcacttgaacctgggaggctgaggttgcagtgagccaagatcgtgccactgcactccagcctggcgacagggcgagagtctgtctcaaaaaaaaaaaaaaaaaaagaaagaaaaaaaaaaagaaactgatgtgatagtcctgttcacggagactaaaactacatgcacacaaaaccaatacgattgcaaaaatatgtacaaacaagatgtgcatcgcaagtgttgcctgtgggggtgggggtaggacacaaggattggcaataaaataaaatgtaaaatgaagtaagatggggataaggagcctcaagtgttcatctggaggagatgtggattttaggacacatagcccttcttgtctaaggttttagacctgctcaccagtggccccgggaggcaggaggttgtggagttggcttcagaagcctgcctcccacctccaagctcatattctggcaggaaccacttctaccctggatggagtgagtcggccaacaacatgagacattttgatgctttttttccctatcacagcgcatttttactcagatacatgatctccttgggacacccttttaactcgtgtttattctacatgccccatggtacagttaattttcatcggcaatctgaaagccagcaacagccgcagagcttgtctaatcaccaaggagtcaaagacatgcagccccgcggcccctttcagtagaggtgaaggaactcactggaaaagccctccccagtttatgattaaataggctactaaaatggagggtagcttataggatttatctgggcagagcgccttcatacttccagggcaggaaccagtaggacagacagtgtcatttaagtccttcctgctgatcagtatccttaggttggaatttatgctctcagcccatagggactcttgttccctccacttcggcacttggcactctgcttctgagcctttggccttcaggaggcgaaagagaactggatacaccaaggctttgaagatcctgatgagcttttgccatccgaggagcatgtagacttgagctgtgtttgctacacccagatgtggctccctcctctctcttgggcttactgatcatttagaaccagtttaattagcactggtgtctgcttttccaaagattgcctggtaggaggcagaaatctgggccaggttagtgaggcagcatgcaaactggaagagaccaccagggaacttgtacaatgtaagtcttactccaagctttccattgcttggagaagggtgttctaaatcacccttggtcttcccgacttcagttgcagactcagaaggagggcagattctggggcgatttcttgacccagtggtgatggggtcgtgggaactcagcttctagggagacagggtaggtttcctgtccccagattaataaaccaaggtcacttctcctgaactgtgatgatgcctggccctgttcttagtgggcatagatggagttaactttttttttttttttttttttttagaggcggggtttcactatgttacccaggctgatctcgaactcctggactcaagcgatcttcccatctcagcctcccaaagtgctgggattataggcatgagagttagatttttcacatgggatttttgccaattgattagtctgttgccccagccaggattaggacaaaagggctttgcatccccacagcctctcttgattgatcttgttcatgcacagatggaattcggacaccctttgggtatgtgaataacccttacaggccacaggacccagattagtgacaccacaactgggcatcatctgagtagggaggacaggagcactgagctccaagtcagaagatccgaattaaaaaatgaccacctttaatgaggtataattcacatgtaataagtgcactcatttaattggatagtcaatacgttttgacaaatcagtacaccacagtgaccaccaaaatcaaatatagaacattttcacccaaaaagtttctcatgatcttttgtagtcaacagccaccccgactttgccccccagcctcaggcatcactattctgctttctgtcactatgggctaactttgccttttctagaatttcatacacatgggatcatttaggatatactcttttgggtctggaggagacctggtttaagccccacacccaaaattagataactttgtgacccttggcaagacataattttgtcttcaactcagtttccttaccagtgcaatggggtggtaataacttaaaaccagcaagccttccttccttccttccctctccctccctccctccctcctgtccttccatgtgcacaggtgccacagtgagctccattgtaaaattccagaaaggagctgggtcaggggttgctcaggaaacaggagcctctgctccctccacgtgtgtcacagagggcacccgctgcccctccctccatgcccatcccagcctccctggtgccgtggtgtgcaggtccccgcatctccttcaaggtggactccttttatttaaacaagggagataggaagtcaccccggaaagaaccagatgcggtgatgagggcccccaccctcaagatgggcagaggccagaggtgaccaggacctaagcagaggggaggaccatgtcagggggtgggggtgcacagaggcccggagtggggcccgcctggccctggggctcgggacactggagttttcagggggagcagtgagtggaaggctcgtggagctgctggacaccagatgagtgttggcatcaggacacacacattgctcagaaccacccaggaacaatctgatggacacctttgtgcccttcacaacacaactcactgacactggacacccagaagcacttgcagataagagaccactgcacacagagcacagtccctgcttccctggagctcacgtgctaaaacatgacccacatccaggctgcagcccgtccttagccagggatgtggagggtcctgagtctggtcctgttgagtcctgagtcctccagactggccctgccaagttgccaggcatctgatgcagcagagcagcgctatgctgccctctgctggccacatggaggcagtgagtccccacactgctgtccactcctggcaatgggctcaggggaagtggactgtgtttctggtcccttgcttctgacaacctgatagagcagatatggaagggcagaggcactataagaactcttctcccagttccttgattcccccccattattccttgtgtgtcccccacttcccctcccttccctgtgtctggatttaagaaatgacagttgaggcaaatcatgttgctttttcggccatctcctgcagtgtcccctttccatggcctcatcctgtcatggccctgagctgttgcaactggttcagggaggtctctcttggccatctttcatccagtggggatggagagaccagtgccatttctggagggagcacctgagtttggaggtgaaacataggtgataccttatccaggtgacaccttccctaggccacaaaaccatagtttctagatggagctgggcatggtggctcatgcctataatcctagcactttggaaggctgaggctagaggatggcttgaggccaggagtttgagaccagcctgggcaacataggccctgtctatacaaaaaaataacaatttaaaaaattagccgagtgtggtatgtgtgcctccagccctagctactcatgaggttgaggcggaaaagtcacttgagcccaggagtttgaggctgcagtgagctgtgatcagttgtaccactgcatgtcagcctggtcaacacagcgagaccttgtctaaaaaaaaaaaaaataaaaatagatggactggtgccgtgcctttttttttccccccacagattctttgacatgcctcccatgcagaggtggggtctatgtccctctcatgaatctggccaagttggtagtggttttgacccagggttgtgtgaagtgatgtggtgtgacttctgaggctgggtcacgaaaggccatgcagctcctgcctggcttgctgggacactgccacccgagcaagccagctacctgataaccaggatgctggagaggctactcatgggctgtggttcatgatgccatctgagaagtgggtcctctggcccagctcttccagggcccagccttctgggtcactgtcagctgaggcccagacatgcaggagtacagacaagctgtccctcctgtgccctgtcccaattcctgacctggcttctggagcttggtttggagatggagcccaccttgacaatgctgtttccctgggagaatgggccccctcttggctggcttgcaggagctctgggagtctccttcccctgtgactcctaggggcttggtggctctgagctgggcagctccacattctctcaatttcattctgtctgatccatgttagttttatttactttttatgtattttttatttttctgacatagaatctcgatctgttgcccaggctggagtgcagtggggatcatggctcactgtaaccttcaactcctgggcccaagggatcgtccagcctctgcctcccagaatccatgttcgttttaatatgaaagcaacgttttatgcgacaaccaggagctctgaagggttttcacgtggatgagccacacgccgggatttggaattgcgggaagtgcccagcgagtagggtaggaggaatgttgggggtgggactggactagaagggaggctgggacgtcgtcgagaacgagattgcagggacgctgcggtgggagaagtcgaattcccaccctgttcgtcctccgcaaagagtgactgaggctcaaaaagccacagccttgcccaaaacggatgcagcgggcgcaggcacggtccacaccccgaagcttgccgatgccctcggcggcagcccgtcctgcagagccgcgttccctgcgcccaaagcaaggtcggacccccaccgggattcccggaaccgggtgtcccgcgcgtccccagcgcaggcagagacggcgagacttccgggtcggcgttgcacacggcggccggcaggcggcgctggagccccgcgtttgggcagccaggacgcccttgcgctgcttcgggtcctgcgagcgcccagggagggggtgagtgcggggaggggtcagacccgtgtcttgcccggtgcgagctcaccgcctgcccaccgggcacgtccacagcagctcagtcccggtctgagcgcatcggagtgaaaacagcccccgcacctctcgtgacggtgtccccttctctgtccacgttgcaagaagctatactgtactcaccaagtctttaaatcttgaccacttcaccaaggaaggtatgaacctctccattttacaggcccagttcaaaaagcaacgacaaaaatcaacaccagcaaacctttatggagttctaattattgacctggcctgccagggtccttcagagtggagttggggtgggtgcgggagaggggtcaaaagccagccctcaggagggggccacccgcgcagccctctctccaccatcagggctcttgcagacccaagggcctgccaggagaagcagatgggccatggtaaatctgaggggccattgggatgcccagactgtcccaggtcaccccatttctgcatttttgttcattttgttcaggtggccctgaatgttgtgccctcctcttgggaactgtaagtaatacaatcttcctttcaggcagttgactctgtgtctgtcatcttcccatacctgattacaacaaaatcatcccatgtacatttttaaacaactgtctaagattgtcgcagggctcaaatgacttaactttaagtgcttacaatgatgcctgacacatggtaaggctaatcgaggagtagctattgttacatctctttctccagcctcttccttctttgcaccaactgcctccctctgagcaattttgagggaggtttatctcgaggtgcagccaatcccagctgctagggccaagatcagccacgtgctcctttcccttggccatggctttggacactccaagctggcagtgagtgccaggtgagggggctgctaggagccggcaggggggatctcacctttgtgccacttatgtccctaatcaggggcaacctccccaaatctgcacccccaaatcccctccccagcttgactggagaaatcactctaactcccaatgatagcaactccaaatcatagcaataataatttactgagtgcttacagtgagccagacacagtgctagcatcttgtaccagcagttctcaaactttttggcttcaggaaccctttacaccctaagaatgatcaaggccctcaaagctcttgttcatgtgggttgtatctatcactaattaccattttaggagtcaaaacaaattttaataatatttatttataatttatttaaaatagcaataataaacactacatgtgagcataaataatatattcctatgacaaataactatatttcacaacacacaaaatttaaagagaaggaagtgtggctttgttttatatttttgcagatctctataatgtcagccttaatagaagacagtttgatttttatatctgcatctgcaagtttttgagataccacatgtcatgtagcccctgtaatattccactgggagttttaaaaagctttcactgagagcaaaaaacccccacaaataacatgtttgtattattgtcaacattattctgaattttatggaccatctgaaagggtctcagagaccccagaggtgcccataatacactgtggaaactgctgcctgatatacatgatgggtagcttccaatattgccccatttttacatatgaggaaactgaggcacaaggagattaaagtgacttgtccaaggtcatgcagccaggcatcaaagctagctggggagtcacttgattttggtgtccagggtcccagcactgagccctgaaagagagggtaggaactgggcacagaaaaagccggaagggcaggttgggccatgagtgggggagctgggtgtgcagtgaggggtgggggtgggaggggaccgggggatcagttagtcaccaagtggtcctggtgacagggctggagatggcagctggcggcggatgtagcctcgggctggaaaatcaataggtgatcagcggtccaggggcaagctgttcatcaggtgcggcagaggggcaggggcaggggcgggggggctgggaggaaatatcactgacccccggcaggattgatcaaacagccagacacccaaggccaaactcactaataaagtgagacattcagctcagcccggcggctgctgctgaaggtcttaaaaaaaccgcttactggggagttcttgataaactgtctttgtttcttgaggcaagtgggagggaggacagactgtggggaggcctggctcggctgccgtttggcctgggactcatggtttgccccaggtctggaccacagaaccctggtgcttgtatggcatgtgtgcttgcactacagcacatgccatttgtacagggcatgtgcagacacatatgtgcacactatgtcgcacacattcaaatgtgcctgcacatgtctttgcacgcccgtgcacatgctacaacctacatttgcttatggtatgtgtgcacacatatgcatgtgctacagcacatgtgtacaaatatgccttgcatgtgtgcatagacatgcgtgcaccgcatcacatggcatttacacatgcatatgctatggcacatatgtgggcacaaatgtgccttgcatgtgtgcgtatacgtgcatgtgccgtagcacacagaatctgcctttgaggggtgagcatgtgtgcttgggggttaaactctttctccattgtttcactgatatcaccactttctctgcctgtagtcccaaaggtgccacatttgtaatgacagtcatgattattatggggtggggagatggacggaaaagtagggactggaaaactgtatctaaaaggctaagctgtacaacagagagaggcaggtgtgaacaggaagaaagagggggaggaaaagtgaagggccggcatggtaagggctaaacatcgtttggactgggagttgagggagagaaaatggcaggattcgggggtggctgggtagctgttgggggagcaaattaaagaataaaggatatgcaaatataatttttatttttattgatttattttttttaagacagagtctcattctgttccccaggctggagtgcagtggcgtgatctcagctcactgcaacctccacctcctgggttcaagcagttttcctgtctcagcctccagggtggctgggactacagtctcatgcagccacgcccggctaatttttatatttttagtagagacagggtttcaccatattgctcaggctggtctcgaactcctttcctcagatgatctacccacctcggcctcccaaagtgctggaattacaggcatgagccatcgtgcccggctgcaaatagaattttaagaactgtgttgggtaatgacatcctttgacattctttcaggaatccaagtaaagagtagaacctttcccgatcactttctgattgttggactgtgttttgttaaatgtgctaccgtattagactgggcttgtgcatacacagaatttattttgatttaataattacatcactcacattgagaatgaaattttattggaatgcttttgcagatgagaggttttattaagagcttttccatgtgtcatatactaactcgaaggtatggatactacttttatttccattttttggatgaattcattggagctcagaggcttaatcacttgcttaagtcaggtggcttataggaggtggaactgggatttgaacccagccctctgactccagagcccaggctgccttggccattattccagagtatagtggggaatctggggggtcagacaggtagaccaatggaggaacatttgccatccctgtatcttgccccaagataggtgagtagagccctgaggagaggggcagtgcatttggcttgcacaccattcagacccttcacccaccagcagttacagcccatctagccccaagatccctcccccaagatcccctggctgggaatcatctgctctcttgattgctgaagggtgcatggatgcattggaaggggctgggaggatataccaggctctgactttatggtgtgtagaccttaaacccccaaagcctttttggttttataaaagcacagaacaaagtcattgagaatgatcaaggatcgaaaccatgggagaaatataaaactatattttcttaaaatgtggtcattgaaacacctgcattggaatcactggagatatataaaaatggaaattcctgggtgcctcccagatctactgaaccagaatctctgagtctaggggccaagggatctgcatttaaaaaaatgtcttgagtaattcttctgcacattctaatctgatcctttgtatttgctgttccctccacctggcatgctctccctgtagctctctctttggctcccactttcaatcctttagatctctgttcaaatatcctttcctcagaggggtctttcctgctatcttacctaaaataataccccttgcattctcaatactcttgctctgctttattatgttattatttttagctacatggatgctaactatatgtaaataaataatatatagtgtacaatatagataacaatacatgataaagccatttaatccatatcagccttatcaatgtgcttatttgcaccttttggtctgctccctgagaggcgaagctctcggagggcagggctggcctgccttgcttagggttgcaccctcagtgaactgtattgggtctaggagaggttgatatgggggaggggatgatgcatgcagagtgcccaaggcttagtgggtgctcaacataatgactgtatcctaagcgtggtgtatactatgaaaacaaaaagccataagcttccttgttctggtagtaattccctacccctccaccctaaggaccagtgaaactgttatgagagtgaccaagaagaaacgtcttctcttgtcctcttcaatgtctgaattctgcatccagcacattatcttcggtgtctcccccatttacttccctcgccttcttccttaaggaatatcagcaatgataatcccagcgactggccaggcacggtggctcatgcctgtcatccccgcactttgggaattgaggcgggaggatcacttgagctcagaagtttgaagctgcagtgagctatgatcgtgttgctgtgctccagcctggatgacagagcgagaccctgtctcaacaaaaaacaaaaaaactcagaaactataggtactggtagacatgctaatttcacatcttaagtagactccttaactctttctgttgcactggctctcagtcaattttggggaaatctctctgggaggggaactctcaggtccaaggctggcaaaggaccaattgagttcctcttctggaggactgggtgacacagacactcaggtcactgtgtttgccctgaaggtggatggcagatgggctccaaagatgctggggtacagatcccctctgcctttggtaagaggctggggaggtctggccctggtggagcccccaggctgggacctttggaccagagcagcttcatttgtgtacccagtgaatcttacggattttatcacattctctgtgtgccataatgtgaagaacgttgggaagcattggtgtaggtgcaggggtgaaggcagttgcattgggccatgaggccatctgtgctttgtttgctggtcttggaccagcctctgtttgtgagtatgagcttgtctgggcctctgtttcttcaatcagtagcactgtaaccaggacactacagcagatatagcccaggaaggggccaagggtcttgaaagggcagaggcagtggagtggggacgatacagggagtctgaactgggaagggccttgctaagaagaatgtgaagcctaaggtgagacaagagattattcgagagcttggagcattgatatatgagttgggtatgattgtccctatgtttcagacaaggaaaccaaggctcagagtagtggaaaagctcaccacagtcaacggcagaactaagtgggcctgagtgctttcttttcttaatgctgccccttgtagctcaaggaaatttgatgaagagtgttttgaaacttcagctggctcttgacaagtgtttgtgtgacattttggtgggagagatggagatatgtctgctggtatttgggacaattgggtacatcgcatcagtaccagtgggaatagagcagccttgacatttcaccatctgaggaatggcaggaggactgagaccattctgtcggaagaatagaaaacttagagggtgcgttgagttgaataatttgccccaaaagatatgtccactgagaacttgtgaatgtagcctttttttttttttttttttttgaaaaaggaatggccaagcacagtggctcaaacctgtaatcccagcactttgggaggccaaggcaggcagatatcctgaggtcaggagtttgagaccagcctggccaacatggtgaaaccctgtctctactaaaaatacaaaaattagccaggtttagtggtacatgcttgtaatcccagctacttgggagactgaggcaggagaattgcttgaatctgggaggtggaggttgcagtgagctgagattgtgccactgcactccagcctgggcggcagggtgaaactctgtctcaaaaaaaagaaaaaaaaaaaaagaaaagaaaaaagaacaagaaaaaaaaagataaaaggagttcttgcagatgcagttaaactaaggatcttaagatgagatcatttgggattatctgggtaagccctaaatgcagaagaggaaaagacatagacagaggagaagctgctgtggagacagaggcagagactggagaggtgcagctgcaagccggaaatgccaaagactgcgggcggctgcaggagctcagagacaggcatgggacaggttctctctcggaccctccaggaggaaccaatccggccaacacctctattttggactgccctccttctcagaactgtgtgagaaggagaaatgtctgttgtttgacatcaccaagcttgtggccatttggtacggcagccctggggaactcatactggggggtaggatgccgtcctcaaagaaatgagggttgtcatgtggaagagggaccctactcactctgtgtccctggaggaatgtgagctttcctctgagcttctaggtccttaggaaaagggctccgtacagtcagggggttcagggatggagtgggctgcactggggaggtgtgagtaccccattactgatatgccaccagggagtttcaactggcatctgttgtgtagttgaacttgaccatttgtgaggccccctccagccctgagaatctatgcactggtgcaaagaaagaggtaaatgtttagagaggtgacagaggacctagagctaatgtccaggatgctgcccaggggccttagagatggtgacaatggttggtggggatatgggtctgttggagaggaggaagaagaggaagagagcctgactgccaggcaggcaggggtatctttggggctctgggagccccagcctctggattctgccctcagtgagctttgcaggacaccctaccataccccctccctgctttcttctgatagagtcgtttccatttggatattgccttgaacatgatgttcacaatccccaaagggaagaacatccctcaataagccacacaattctcccagccaagaacttgctgttccaaattcattaaaattgctgtgatattctcttcccatttatgtgccaagagccgttgtggacagaattcataataccatggagtggtggatgaaaccgattgtgcagtcagaaagaagtgaacttattttattttatttttaataaaagtgtacctttcaggttggcaacaaatgcgagtgtgggtgtggggaaatggcacactgatgtgtttattaagggagcacaaattggtccaaccccaatggatatcaacttggaaatgatataagatgcaaaatgtgcatggtagttttgagttttttagtctctaaaattcaggtgggcggccgggcgcgatggctcacgcctgtaatcccagcactttgggaggccaaggtgggcggatcacctgaggtcaggagttcgagaccagcctggccaatatggtgaaaccctgtctctaccaaaaaaaaaaaaaaattagctggatatggtgacacagttgtagtcccagctgctcaggaggctgaggcaggagaatcgcttgaacctgagagtcggaggttgcagtgagccaagatggtgccactgcactccaggctgggtgacagagcaagactctgtctcaaaaaaaaaaaaaaaaagtgaaattcaggtgggcaagatatgtcagttttagttagtctgtgattgaatttgttttttgtctcaatacctccctctccctcccttttccaccagaaggtagaaaattaattctaggtaattcaagataaactcgccatttgagggggtcttcagcccattaagatctcttctcttacgttccttcctgggggatttttgctttaccttagtaaagaacctttccttgcttcctggggggcgaggcactgtatttgggggtgcttatgtagtgagtccttgctaggctgtgacccctcactgcaacaatggtgctggtgaaggtgtctgtggaccagcgctgagttatctgcgccatttgctccttactgtgcagcactgagagcctttccggtgtgggtcccagctcacttttctgatcttctcaggtgcacacactcattcagctcttcctccgtgctactttggagctgtgaacatataggggagtcgcctgcggctgcgtatctcccccaccatctctgctagcatggctgaagattgcagatgggagctggctggagcccaggtcacctctactttcagatctccaaactcattcaaggcactatctcccccatcccatactcagcgcctacctgagcagcataccaacccacacggcctttctctggagaccttcatccctagtctgttctcgacctcctccctccagcttagaatgtttcccttgttttgattccctttttgcaggaagaaaagctcactcaacaagcactcttctgcatcttacctcttgaacctcaaagccaggaacatccccactttcctcctctatgctcctccacatcgctccttctgccaggcgggtgcctaaattggagtgagttctgggagaaaaaaaccaatgggggccaggcatggtggctcacacctttaatcccaccactttgggagaccgaggctggtggatcacctgaggtcaggagtttgagaccaacctggccaacatggtgaaaccccatctctactaaaatacaaaaattagctaggcatggtggtgcgcgcctgtaatcccagctactcaggaggttgtggcaggagaatcgcttgaacctgggaggcggaggttgctgtgaaccgagattgtgccactgcactccagcctgggcgacaagagtgaaactccgtcttacaaacaaacaaacaaacaacccaaaaaacaatggggctcatacaacacttgtccttttgtgttcttcttatatgaaatatatagaccagtcaaattcgtggagacagtggaatagaggttaccaaggctggagggagggggaaatggagagttattgcttaacaggtacagggttttgtttggggtgatgtaaaaagtcttggagatggataatggtgatggttgcacagcagcaagcatgtatttaatgtctctgaatgaactgtacatttcatacttaaaacaaccagtgttatgttatatatacattatcataataaaaatagtaaaaaataaataaatgccagcaacagagcagaaaataaaaatcccgcatcacatcagccaatacttgacaacagctttctgactttgacccgttgttccatttaggggtcttgagtctgtggaaaccctggccggggtgtacccagctcgagtgcaggggggcgcgtagcagcagcctggcgtgtcatcgtgagacacgggagacaacctgggtatccatcaatgggggaccaagtgaataaatgatggcggagccacacaatgccgtgctgtgcagtgggatgaagaatgtgccctgctccgtgtatgtgccgacgtggaagatgcccacgatgtattgtgcagggagcagaataatgtgtgtggtagcatcttgtttgtgtaaaaaggcctatatatatggaatgggtatgaatttgctggacatttgaggtaaaggaagtgcgacctccttcttggctccctcccttttttctctctttaccagataaggatttatatttgctttccttacttctttttcctctttccacaactgtgattttctaatctacgtgtctactgtgcctgacagtcattttcatctttttttttttggagggggcccgattctcgctgtgttgcccaggctggagtgcagtggcatgatctctgttcactgcaacctctgcctcctgggttcaagcgattctcctgcctcagcctcccaagtagctgggattacagacggctgccaccatacccagctaatttttgtatttttagtagagacgaggtttcaccaagttggtcaggctggtctcgaactcctgacctcaggtgatccacccacctcggcctcccaaagccctggattacaggcatgagccacagcacccagccttcatctatttttaacatgtaaaaaattttgagagataactaatatacagaaaagtgcataaaacagagatgtctagtttaaacttataaacacccacgtatctaccacccaggcctagacattgaacagtgctaagcacccccatgtgccctccccagttaactccctcaagaggtaactgctcttcatttatagtaacaatcattgcttttaaaaactcattttattacccctgtaatcccagcactttgggaggccgaggtgggcggatcatgaggtcaggaaatcgagaccatccttactaacacggtgaaaccccgtctccactaaaaaatacaaaaattagcctggcgtggtggcaggcgcctatagtcccagctactcgggaggctgaggcaggagaatggcgtgaacccgggaggcagagcttgcagtgagctgagatcgcgccactgcatgtcagcctgggcgacagaacgagactccatctcaaaaaaaaaaaaaaaaaaattcatttcattttgaataaatttagattgatagaagagttgcaaaaataaaccagagaattcctgtatgccctttgtatactcacatacccttcactcgccttcccctaatggaaacatcttacataaccacagcatgtttatcaaaactgagattgacactggtccaacactatttaccgaactacgaacttcatggatgtcgccagtttcccatgaatgttctctttctgttccgggatccactccaggatcccatattggatttagttatcatttctccttagtttcttccatccatgactgtttcttggtctcttcttgtgttttcatgactttggcacttataaagagtgcttgtcagaaatttaagtagaaaagtaagaaaagccaggtagaatccttgcttttctttgtaattttcctctcctaagtatatatccctgaacaacatagttaggtttggcctgttttgaattttatctaagtgaactaatacacgcatattcttttgtgtcttacctttttcatttaacattatgtttttgggggaaccattcatgtttttgtgtgcagctgaagttcatttttcttgctgaatattattccgttgtatggctgtaataataataatgcaatggctataattctggattgtttctaggttttggctattgcaaacaatgctggctgaagcattgtttctttttattttactttaagttctaggatacatgtgctgaacgtgcaggtttgttacataggtatacatgtgccatggtggtttgctgcacctgtcaaactgtcatctaggttttaagccccgcatgcattaggtatttgtcctaagcattcttttttttgagacagggtctcactcttgtcacccaggctggagtgcagtggccccatcttggctcactgtaatccctgcctcccagattcaagtgattctcctagttcagcctcatgagtagctgagactacaggtgggtgtcaacatgcctggctaatttttttgttttgttttgttttgttttcagtagagatggggtttcaccttgttggccaggctggtctcaaactcctgacctcaggggatccgcctgccttggcctcccaaagtgctgagattataggcatgtgccaccacgctcggcagatggccgaagcattcttattacatatctcctgaaatagttgggcccacatttctctaggagaggaaaccaggagataaatatccaggagaggaaactttggctgaagaatttccatgtcttcagctggactagatactgccagactttcttccaaagtggttttaccaatttaaacagccccacctgcagcgtcaagttctcagtgtgccctatcattattttttcccctagtccttagtaacagacatcattattttttgaaatcaaaataaatcagtcaagattctggcaggaaagagatgtacacaaaatgcttataacaatgctagggttctatttaagagcatttaataaagagattatttatacaagagtggccaggatgaaaggaaccaataagaaatgctgagacacccaggcactagggcagcaggaagctgttgctgcctctggggctgaagggacaggagggagaagaggggaaagcggaggtccctgcctgggctgtaagcacacatcagtgtttctcaacccgtccttccttcctttctttctttcctttctttctttctttctctctttctttctctttctttctttctttctttctttctttctttctttctttctttctttctttccttccttccttccttccctctttctttctttctctcttttctttctctctctctctcctttctttctttcttttctttctttctttctttctttctttctttctttctttctttctttctttctttctttctttctctttctctcttctttcttttttgagacggagtctcactctgcagtaaagtggcacgatcttggctcactgcagcctctgcttcccaggttcaagcgattcttgtgcctcagctccagagtagctgggattacaggcacctgccaccacatctggctaatttttgtatttttagtacagatggggtttcaccatgttggctaggctggtcttgaactcctaacctctagtgatccacccacctcagccttccaaagtgctgggattacaggtgtgagccaccatgcccggcctcaacctgtttttcatcatgacaccctgttgcatgttgaattgtgtcaccatccaacatatgttcaagtccaatatctgtgaatgggaccttatttggaaatagggtctttgcagatgtaatcaagttaagatgagatctgtcttagctcaggctgctagagcaaagtatcatagactggtctcgaactcctgacctcaagtgatcctcccgcctcagcttcccaaagtgctaggattacaggcatgagccaccatgcctggccctgtgctgtggctctttggagggtcacaaattattgcaatatataaggttatgtctccccaggaaccagtggtcaccctcttgggggcgtgattgctcttgttgaggctgcaggagccagagggaagagccaaactgaggggaggcagagaagggaccagagaacagacccccttccctgtctttccacccactcctgggtggcctcctgctggctggacttagccaagagccaaggctgagggggttcaggggtgctgccttctgagatcagccccggggagcagggcagggctaagaggggcagagaatgggtgcaggttggggcgcccatgaagaacaactcagttcacagccccagctgctcccagcgtctgccagtccttctgggggctgtccttcctctgctagaaaagtaggagacccccccaaggccaacatggcccagaaaaatgggaggagaggctgattttccatccagatggcctctccaggtgatcctgaaccacatgacctatctgaagctgggcagctgcacttcctctgtgcccagccaggacgaggggctcttcacgaggctctgatgttgtggcagtcaatacaggcctcccccagcaccccatagccctcctgggtgccatggaggagtgcagttcagcatccctggcttgcagctcccccacctccccacctggcctccccaccccctcctctttaacaaggcttggaacccttcccctcccagactcttcaggtctatttcctcagggaatcgaggtttctataaagaaaagcataaaacgagatgaacatcagcatcttagggatgatcacagacagcagagtatgggagattagtttgggttctgggccaggttgcctgggtttggatcctggatttgctactcactggctatggaaccctgggtaggttacctaacctctctgtgcctcagctctctctctgaaaagtggggatatgacaatatctgtcttacagagttattctgagcattaaatgagctaatggatagaaagtgcttagaacagtgccaggcatatagtaagtgctatgtaagagttagatctattattactttgctaggtgtgtctctattttgaatgtgccatagaaagttctagagttggctggccaggcatggtggctgatgcctgtaatcccagcactttgggaggccgaggcaggtggatcacctgaagtcaggagttcgagaccagcctggccaacatggtaaaacactatctctactaaaaatagaaaaaattagccgggcgtggtcgtgtgtgcctatagttccagccactcgggaggctgaggcaggagaatcacttggacttgggaggtggaggttgcagtgagccaagatcatgccattgcactccagcctggagtgccaagagcggaactccgtatcggggggggaaaaaaaaagaaagttctagagatggctaatggtgccacctcacgggagtagagctgggcctacaggagaaaaactttcactttttaaaaatacttactttatgttattgaaaaaaaatttttttgagacagggccttgctctgtgggagtgcagtctcagactggagtgcagtgggggaatcatagctcactgcaacttcaaacgcctaggctcaagcagtcctcctgcctcagcctcccacatagctgggcctatagatatgaaccacctatagacatgagccaccccaccacacccagctaatttttattgatttatttttggtagagacagggtcttgctatgtttcccaggctggccttgaactcttggtctcaagtgatcctcccaccttggcctcccaaagctctgggattacagtcatgagccatagtgtctggccttatttaaaatttttaaaacaagcaattgtaatagtatttaggaataacatatttgctctagaaattttaactttttttttttttgagatggagtctcgctctgtttctcaggctggagtgcagtggcgagatttccgcttactgcaacctctgcctcctgggttcaagcgattctcctgcctcagcctcccaagtagctgggattacaggcacctgccaccacacctggctgatttttgtatttttagtagagacggggtttcaccatgttggtcaggctggtcttgaactcctgacctcaggtgatctgcctatctcggcctcccaaagtgctgggattacaggcgtgagccaccgcacccagcctcagaaattttaactttttaaggtaaaatataagtttttgcaaaaatatgataagctttgcaccatttagtgtggaatataagacatgacagattgtcgtcagtctccctttcactgcatgtgagcttccagagaaaaatttatgggtgttcctgggattggggttggacttgcctaattgcctagattgggagttcggtaaacttctcctgctggacgtggaggaggggctgagccttgggctgcattctctgcacccacctctagtaggcctcccaggaccacccaccgcccagcacctgccctggttgccagggaaacagccctttatcgagtggagccatccccaactcagcccagtgatttgtccttgtctaattattattactctttgcattttccttttggatgagtgatgggggagggtcggggggggtgggagggtgcaggagcagaggagcagtgatttgtggggctggcagcttatctttgagaggaggacatttatctttctggaagcagaaaaccgcccaatggagacaaattcagcagttcccgagtggttctgtttgtggattcacacactgatctggagttaccgacctggaattgcatgtgcacgtgggtttggggtgtgggaatgtgcgcacgtagcaagcagacctctcagagtggctctgtccagagccacagtcctgtgagcgtgtctgtggttattgtgtgctcactgtgtacagctcctaaaatggtatgtgcacacgtctgcatgtgtctgaatgtgtgtgcacactttgactagactaggcaacctaggtgtgcctgcttgcatgcactcatgtgataacatgtggctgtgtgtgcacattgtagacaaagcaaggaaaagctgggtgggtacagattgaatatgtagctatcaaatgtgtttgtcttcatggggctctgtgtgtagggcctgagcacatgtgtagccaacttctgagcaggcctgcatgtgaacattgtacacattgttatgagaaccaaaaaatagaccgtaaaatcagggtgctgacctaagccagagacacctgagatgaaggcatagggtttggatagtatggaagatatgcacactgcacattttagtagctggggtagattgcaaaaacatccccactcatttgtccctgcccgaatccttgccctttcaatgtgactttgcagttcctcctaatagaagataaagtctattcccctaccgtcttgacctggactggacttgaaacttgctttgggcaatagaatgaagtggaagggacaatgagtcagttctgagcctaggcctcaagacagctggcagcttccactagctctcttagaactgtgcccagctgcacatgaacaaggctcagctaggctgctggaggatgagggaccattagagactagggggagaacagccccagttatcctggctgcagccatcctacaccatcttagagccaactgacttgcaaatacatgagagagtccggccaagaccagcagagctgcccttcctaacctttagttgaccacagacacatacgtgagccctgctgactcacagacatgtgagcaattacagttgtttttaagtctcgtgagtattggggtgatttgttatgcagcattattgttgcagtgcataactcattactaactaaatactcagcatacacacagatgatgtacacacacagcaaaagcatataccattgacatacacataggattgttggctctgtgtactaaaagtattagttagttatctgttgctgttacaaattactccaaaatttaggagcttaacacacaaacatttattacctcatagtttctgtgtctcaggaatcagggcatggcttagctgaatgtctttggctcaaggtctttcatgaggttactgtcttattattggggctgcagtctcatctgaagactcaactgagggagtatccacttccattttcactcacaggttgttgtcaggattctgttccttgatggtgattggttggggcagggtctccctcaattccttgccatgtggggttttccacatggcaagcttacaacattgcagagtgagacagagagagagagagacagagagagagagagagagacagagagaagcaatggtttttttgtaaccttattgcagaagtgacatcccatcatttttgccatatttgttagaaaaagtcacgacatccagcccacactcaaggaaaaaggagaggggattacatgaagtgtgaaaggagtggggggatcactggggactgtctcagaggctgcctaccacacagggtgtacaaataaataggctcacattcagctggactagctgtacaagatcagcctttttttcatggcttttgctcagccaaagacactgagtgtcagagaaagtgggttttgcaggttctaaagacccaggtattctattctcttggtcctgtcattggagctaaggctattttgcctagaaaggaagctctctctgctgtgggatgggggaggaacacttcactccagaccttccaaccaggattccagacattcacatcctgaagcttgaggagggacaggaatcctcaggttctcagagaggaggagcctttacttagggtgtggctggaggtggagatgcttgagaccctctagaggggcagatgctgagagctttctcctttttgggcatctgacctggagtaatgtggtctccctgtgggatctgattttccttccaagccctttctcctctgtggtctcagggctgggctgtctatgaacatcgcagacccagcctacacttccccgagatgggcaagcccaacctcttcctccttagagctcacctgccctttccactcccttcccaacctgcaatttcaggtccctttgtcccctccccacacccagagctggatattgatgacctgggaccctgtacactgcagcagcactgggcaatgcgcagctgtgtgtgtgtgtgcacatgtgtgcgtgtgtgtgagggtggtgggactgaggtggggggggtggatttcagtccccatatgaagcctgctgcagatcaaaataggcagatgaagtcaggagtggtggctcacgcctgtaatcccagcacttatggaggcacaggtgggaagatcgcttgagcccagtagttcgagacctgcctgtgcaacacagcaagatcccgtttttgttaaaaaaaaaaaaaaaagaagggtagatgtcctgccctgtgaaccagcctcatgttgaaaccttctgttaggagagtggagggcaatgtgtcctcccagagtctatgtggggctccagcccaaagctgggacccactgccctgcaggtattcacccctctccctgcttagagctgcttactgcactgcccagggggccagactgtccacccccaggacaaacttgggctaagggtgaagtcacgtttcccagctcagagctcttgaactggagagtttttgagccccttgtgtagggtcccagtccctctgctttgaacaaacgtgtgcgtgagggtcttgacatggtccagggagggatgatggagtttggactcggggggaggcggtggggatggagagaagtgtgggtgggtttaagagacatttaagcagtcgggctgacaagctcagaggatgtagatatggcggctgggtgaggagatggtgcaggagggagggggaggaggaagaatgacacacagcatgttttctgtaaagttcactggggataatgagtgcctctggcatttgagtaacaaatacagcagctttagtctcctgtccgggattggctctgaggcactaatgatacctaatgatatctgcatgcagaacttccagaagggcaggtagaaacttagctacaagaggtcgctttctgggaaaagaggcagagtgtattccctgaaggctgtgtttccgtaggaagttggaagttgggcatcctgagactctgcaaggacagtccatgtccacccctcccctccaagcccctacccactcaaggtcatccctcaggactggttcctccgtgccttttctccttacccctaccctttgcttcaatccagccctgtttctgtttttgttctctgagctctggactctgtatttgtcaggactttattgacttgtgtaatgagacacttagagatacatccgctttcaggaagcgctggatccaggagattggccagtggtgtcaggtgtcagctgtgctttgtctttcaatgctcctttccttttcatgttctttgaaaagttttttatgaaaaaatttttttttgacacgaggtctcaccctgtcacccatgctggagtgcagtcatgcgatcatagctcactgaggcctccaactcctgggtttaagggatcctctcacctcagcctaccaagtctctgggattacagactgagccactgctcctggctctgtgttcttgagtctcagtctacacagctgcagcaaccctagattttcactttcatgctgaacaacctcagagcaaagaagacctttattttcaggacagttccagcaaaagcctcaggactgactcactggtatgaaccagtcactggcccagcaggacgtggcaatttgcctggctgggcatgtatgggtgctcactctgagggttggcccagcccagctcaaaccacacagcctgaacgtgggagaggggtggtcctcagaatgaaattggggtactaaaagcagagcaaagaggaatggaggccaggcagagaggacccatggagactgacctcagaccctaccttgtctctgtctccttcctggcatctttgacttccagtattgggaactcactcactcatccaaccccaggtttggctctgacactgctttggtcacctggggtaggaaattttgctctggactcaccaaaccttgttcttttcctaaccactgaagaggaagcagtgtataagggtcctccagagaagcaggaccaataggatgtacatgtacacgtggaaacagattgattctaggggcatgactcctgcgatgatggaggctgacaagtcccaaggtctgcagggtgagttggcaagctggagatcccagagagctggtactggagctcctgcctgaatgctgggagagacccaggaagagctgatgtttccattctaggaagagcgcaggaaaataggtcaatgtcccagttggaaagaggttaggtaggaggaaagattcacttttacagcagggagggtcagccttttttcttctattcagcccttctactgactagtgaggcccacccatattatatgtggtgggggacagtctactttactctgtccatttaaatgttaatctcatccccaaacaccctcacagacacacccagaataatgtttgaacaaatatctgggcactccatggcccactcaagttggcacataaaattaaccatcgcaagcaccaagtaggtcatctctgaccctctctaaggccgggtcagagagctggtcagaggactgggctgagttggaactctgacagggcatcctctctgtgccccgaatgacctttttgcctaccttggagcaggttgtgtatttcatctgcctgtacctcattccaaaatattatcttccttggttaccatcagggcgggggacccaggcgaggtctgttgccaagttccctccataggctccaactctgtcaggacggggtccactctattatctccacactgtcctgtgccccgggaagcctgactcctgggggccggggcttctgggctccaggcggggtgggtcctaggagcccccttgggatcggagaaatgggggagagctgccaggggtcggttcccctgctcctgccacaggtgtgtccctcttccctggaggcggccctccctgcggctcccccggcacaggctcaatgacactgcccttcttcctctcaccctcaggtacagggacatggctgctcctgctggtcctggttccagggggctcccctcccctgttggggctctcgaccgtgcccacacctctgacagtcccctcattttatctctgcagaatcccagcaggctgtgttgagagtagtgttcctgtgggagctacccagggggagcgggggccagctcggccctgagaggctgtgttggggggaccgtcctaccctgtgggcactaccaagtctatctaaggctttgtgtccagagaaggctcagagcagtcaacagggttatcctaagcgaatcctaccctccatcattggtatgatgaatttgggcagttaactgagcctgggtcactttcttttatcgcctctcattcattgtgtgacccatagaaagtcaagtcaggtgagctttctaagcctcaattgcctcatctgtaaaatgggtatactaagacctcccccaaggccactctccatagcttatttcatcctgcacagtggactttgtctttggggagaattaagtttggccccaatttcattcattcatttgttcatacattcagggactgccccctggacttcacagcatgctagaggctgggttggacccctacccttcaggtcagaagcaacttctctcccttctctccctttctccttcataaagattttttttttaaaaagttgactttatcgaggtataatttacataaaatttgtatatttcaggtttatagatcaaccatctttgacaaatgtatacacctgtgtaatctgcaccccgaccaagacatagaccatttccatgagtctggaaagttccctggagttttgttgcagtcacctgccacccacccccctcaccatcaagccacgtctgatccagtttccatcactatctctcagttgaaattttcatttgctttcattttgcctgttgtaccctttccctttcccttccctttctttttttctttttttttgagatggggtattgctctgttgcccaggctggagtgaagtggtgtgatcacagctcactgcagccttgacctcccagactcaagcaaccctcccacgtcagcctccagagtaacagggactacaggtgtgcaccactactggctaatttctaaattttttataaagatgaggtcttgctatgttgcccaggcctgggctcaagtgagcctcccacctcagtctcccaaggtgctgggattatagatatgagccaccacacccagccgtgttttacacaaggagagcacatgtctccttggtaaaacaatattcattttcctataacctatctttttcaaccattgccagtaatggccagataaaatacatgaacacaaacacagacgcgtgcacatacgtgtacctatgtacacacacaatcctctcacatatgcacattcacacttacacacatacatgcattacacaaacttacatatatgcatacaaatataggttaaggaaactttttcaaggctcaaaaagatctaggccatggtgagacagaacacagttgtgtttttactgaaacccctcgtgatagtgcacacatgaacacacatgcacacaagccccaaagctgagaatcatttgccatcacttcctgctcccctgtcagagtcagcgcaagaggagaaaaatcggaattctttccctgtctcaaaagtaaaagggacaaattagtttcttgtcagtgcactgcaataaatacattgtcatttttatcccccagtgaatcatagtctccatttctcccgtaactattatacagtctgctggcactatatcattttttggtaattttattttcaccaattgttttatgaaatttttgagttttatggacactaaaacaaatctagcctgcgagtgttatagccctttaaatcatcggcaggaaatctcaaggttcctccagactgtggtggaaggaggctttagggaagaaagatcgcccctagcttataaactgagcaaaaacccagagataagtttgtaaaagggacatagatcatggcgggtgaaaactggggtgtaaaacatctccctgctcagctcctataagaataaaaatggacttttatttagcagaaacactaaagtagttggggagaaggaacacatggtcctaatctcctctttcttagccacaagagcctgtatttccctgtgggtcagtgtgagcctaactccagcagctcatagccaggagggtaaccaggttagggaccatctcagggaagccaagaatccccgtgatgttggcacaaaacacaaccctctatatgaatgtcaaggtcatatctctgatgtcagtggaaaaagggataaaactgactctaaagcacatgggaaaagaaaaaccaacaatccaatccaacaagaggagaagagctaaattgatgtgaaagaaggtttgccttaccaggtattaaaatgcattataaagctacaataataaaagcagcatgttactggcatacgactagacagacaaatcaatggaatgaaatagtcctaaataaaactcagtccatgaaaaatgaaagatcacatatcaatagaagagggatggattattcagtaagtgctatctgtaaatgtggtaatttggaaaacagtcaatttagatatttatctcattcaagagtccaaaaaataaaaactagacagatgaaacatttgaaactaaaaaattaaacaataaaatgctggaagaaagtattaaaaaagtatttgatttccagatgaggaggcttttatccatgactttgggtagaaccgctaagaaaaaagaccaacagatttagcttgcaatatgtttacatgcctgcatttcaagacatatcccccacctagaggccaaaagaggctgggcatggtggctcatgcctgtaatctcggcactttgggaggccaaggcaggaggattgcttgagcccaggagtctaatatcagcctgggcaatgtggcaagactctgtctctacaaaaaataataagaaaaaattagccggacatggtggcataagcttgtgattctagctgggagggtaaggtaggaggatcgcttgaacctaggagattgaggctgcagtgggccgtgtttgcaccactgcactccatcctgggcaacagagcgagaccctgtcacaaaaaaaaaaaaaaaaaaatgctgaaagataagctgaccaaatctttttgacatacatgacagcaaaagggaaatctcttgataaagaaaatcactaggacttaatggaatgggcagaggatacaaccctacaattcattgaagaaaaaacaaatatctcctaagcgtaggaaaacatttcccaccatactagctgtgatggttcattttatatgtcagcttgtgcccagacatgtggccaaacattattctgggtgtgtctacttctggatgagattgacatttgaatttgggtagaccaagtaaagcagattccccttcctcatgaaggtgggtctcatccaatcagttgaaggcttgaatagaacaaaaaggctggccctcctgcgaatagaggagctcctcctgcctgactatcttcaagctgggacatcaggttttttttcccctgggtttggactcaaatggaaacattggctcttcctgggtctcaagcctgctggcatttggactagaacaacaccattggctctcctgagtatctagcttgcccaactgcagattttggaacttagcttctaaaatcgcacatgccagttccctctactgaatctctttgcatatcaatatcatctctatctatccatctctcctcttggtgctgtttctttcgagaactgtgactaatgcgctgggcatcaaggatatacaaattaaaatcccactgatatgctagtttttctcatgcctcttgattttttgagaattctctgggattctcctgatcagaatctagacaaagcttatccaatgtgtggcctgtgggctgcatgcagcccaagacagctttaaatgtggctcaatgaaaattcataaactttcttaaaacattatgagtttttttgctatatatatatatatatatatgttcatcagctattgttagtattagtgtatttatgtgtggctcaagacagttctttttttttgagatggagtctcactctgtcacccaggccggaatgcaatggctcaatctcagctcactgcaacctccgcctcccgggttcaagcgattctcctgcctcagcctcccgagtagctgggattacaggcgcgcaccatcatacctggctaatttttgtagttttttctttttttagtagagacagggtttcaccatattggccaggctggtcttgaactcctgacctcgggtgatctgcccgcctcagtctcccaaagtgctgggattacagccgtgagccactgctcagcctcaagactgttcttattcttccaatgtggcccaggaaagccaaaagattggctatccctgatctggacattcttaagtgtctcccaacttaaaaaatgatc

SEQ ID NO: 24171 - DNA, 96618 bp, Homo Sapiens
gatcatttcaactgatgctgaaaaagcatttgataaagttcaacatcccttcatgattaaaaaaaaaaaccctcaaaaaactggatatagaaaaaccatacctcagtggggcacagcggctcacacctgtaatcccagcactctgggaggccaggcaggtggattatgaggtcaggcattcgagactagcctggccaacatagtgaaacctcgtctctactaaaaatacaaaaaattagccaagcgtggtggtgagcgcctgtaatcccagctactcgggaggctagggcaggagaatcacttgaacctgggaggtgaaggttgcggtgagccaagatcgtgccattgcacttcagcctgggtgacagtgcaacactctgtctcaaaaacaaacaaacaaagaaaaaacataactcaacataataaaaggcatatatgacagatccacagctagtatcatactgaatggggaaaagctgaaagcccttcttccaaaatctggaatatgaaaaggatgaccactttcaccactgttattcaacatggagtactggaagtcctagctagagcaattagacaggtgaaagaaataaagggaatccaaaatggaaaggaagaagtcaaattatcctttttttgcagatgatacgatcttatatttggaaaaacttagacttcataaaaaactatttgaactgataaacaaattaaataacgtttcaagatacaaaaccgacataaaaaatcagtagcatttctatatgtcaacagtgaataaactggaaaagaaattttaaaagtaattccatttacaatagccatacataaaattaaatacctaggaattaactacagaagcaaaagatcactataatgaaaaccatgacatactgatgaaggaaattgaagtggacatcaaaaattggaaagatattccttgttcagggattggaagaatcaatattgttaaaatggccatactacccaaagcaatctacagattcaatgcaatccctattaaaataccaatgacaatcttcacagaaatagaaaaaaaaatcctaaaatttataatatatggacttcaaaaggcccagaatagccaaagctatcctaagcaaaaaaaaagatcaaaactagaggaaccatattacctgacttcaaattatactacagagctatagtgaccaaaacagcatggtactggcataaaaaagaaacacatagacaggtggaacagaacagggaaaccagaaacaaatccacacacctacagtgaactcatttttgacaaaggtgccaggaacatacattgggaaaaaaaaatatcttcaataaatggtgctgggaaaactggatatccacacgcagaagaatgaaactagactaccatctctcaccatataaaaaatcaaatcaaaatgaattaaagactttaagacctcaaactatgaaactgctacaaagagacattgggggaaaatctccagaacattgttctgggcaaaaatttattgagtaataccccacaagcacaggcaaccaaagaaaaaatggacaaataggattacatcaagttaaaaagattctgcacagcaaaggaaacaatcaaccaagttaagagacaacccacagaaagaatggggaaaaatatttgcaaactacccatctggcaagggattaataatcagaatatataaggagttcacctccataggagaaaaatctaataatcctgtcaaaaaatgggcaaaagatttgaatagacatttctcaaaagaagacatacaaatgtcaaaacaggcacatgaattagtgcccaacatcactgatcatcagagaaatgcaaattgaaactacaatgagaaatcacctcactacagttaaaatggcttttatccaaaagacaggcaatgctggcgaggaggtggggtaaagggaaaccctcatacatggttggtaggaacgtaaattagaacaaccactatggagaacagtttggagattcctcagaaaactaaaaattgagctaccatatgatccagcaattccactgctgaatatacacccaaaagaaaggaaatcaaaatatcaaagagattatctgcactcccatgtttgttgcagcactgtttgcaatagtcgaaaatgtggtacatatacacaacagaatactattcagccataaaaacaatgagaccctgtcatttgcaacaacatagatgaaactggagatcattatgttaagtgaaataagccaggcacagaaagataaacatcacatgttctcacttatttgtgggatctgaaaatcaaagcaattgaacgcatggagatagaaagtagaaggacggttaccagaggccgggaagaagagtatggtggcagagggtggggtgggtaggaggtgggaatggttaataagtaaacacacacacacacacacacacaaaattagaaagaataaataagacttactattggatagtacaacagggtgactatactcaataataatttactcgtacatttaaaaataactatgagtataattggattgtttgtaacataaaggataaatgcgtaagggggatggataccacattctccataatgtgagtattatgcattgcctgcctgtatcaaaacatctcatgtaacccataaatatatacacctactatgtacccacaaaaattaaaaattaaaaaaaaatgttaagcagccatgggtgattacttctctttttttttccatattaaaatcttgctcatgcctatatccccaacactttggaagactgacgtgggaggatcacttcatataggagtttgagactcgcctgggaaatatggtgagaggccctgtctctacaaaaagaatgggaaaaaaaatagccatgcatgttggcatgtgcctatagtcccagctactgggagtggacagggggagggagggttactgaggctggaggatcacttaagtccaggaagttgaggctgcagtgagccctgatggcaccactacactccagcctgggcaacagagcagagaccctgtctcaatcaattaatcagtcagtcaataaaatcttaaaatgacttccctataaatgagtgcaaactctgacttaatgcttacacttatgttttggcagggaacttcctactttaagttttaatggccttcctccctaatttcttgctttaattacaaatgttcaattgcaccaccatttacctctgcagttctgtcagtaaatacataaattattttgtttcagtatgtaaagtataaattaaattataatctatgccaatttatttcctttgtataaggaaaaggaaggtcaacttctactatcacaagtgccaaaatggctatctccacgacaatgttctgcatataggtgatctcactttcatattaaaagataatcaaaacattcatcattccattctcttcagctaacccccactctggcaacccctcacgtgctcatcattaacactgtcatcccccacctgtttgtcctctaaacttttaatttgagacagttttttctctaccttctaccctcccagctctcactcatttattcccactacacttccttttcagcctcaaggatgcctacccctcctactgcttcttcttatcgtccttcttctgccttcacttccttccctttccacctgatacttttgctcagtccacaaacaaatgtagcttggaagtgcagggttaacatccccagaggtaatcattaataaatgggaaacagaagccagtcaataattgcttctacttcttatctttaatatggacaattctaggaagtattatatattattctcaggtgatcccagtgaaattgagctcttgatgctctaacacctacctcaaaaacagaaccttaataatgacttactctcttcctgatccctcacttatgctacctgcaagaacatcccaaataagctatctgcacacaagtcctatctcaggctctgctttcagtaaaatcccagttaacacatgagaatttatgctgaatgtatacttatatataatataaaaccccaggctagggaaacaaaatgaaatatgggacttccaagtatattcctcttaactattcattatcccaaaggtcaacagatctcctgtgtctgcattcttttttaaagtgcataaacttgtcagccaacattcatccttactgagcaagaaaaagcagctaaacactagctctgagtgactgcaaatttggctaaagtggatactgtatgcaaatacagtgcttcattgcgacccttagctgtttgggagaagaaaccttccctcaaaatgcacctgccatattcagtagaacctgccaagttatagtctgcaactttcagagatgttgtggacttctgaactgctttcttcagctccttctgactccagatccctgagcctgtaagctaagctgtgagctactaactcagcttcaaaatcactacattagtctggaagagttaatgcacctcaaagtacttaattttctcctagggagtcatgtgcttgctagtaggaaatggatgactaagcaatcattatcaacctcatgggataattctagcccagggaagcaaataagccacagaagaacaacatgcaccacacaaagcttcctcactgtgaaataagagaggcaagcagcactttatataatactggaagataaattatgacataagtgttcactctgttattagtgtcatatgttttcctgaacatggtaagatttcttttctggatttcatggtaaatacttgacagttataagtctttaatagattccactacagttacttgtcttggcataccgttatatttgtgtttctatgcattagcaaaaatatggtatctgccaaactataattgcaaacactttgagtcaaaacaatgcttccaggttaattaaaatataaatcaatacatcaatcaacatacatttattgaatatactctgtaaagaaggtgcaatcctgagcataataaagtgtagaaatgaatgtaagacaccattcctgtcctcacaggtctcagaaaactaccattttattacttttagcattagatacgtttacaataaagaattatgttaatagagcctaggagttccaattgctagttgagaatcacctcaagaaaaatagaaaatttgtagaaataattattaaattttaaaaatctaagccttttagacttttcaaaataaaaatttaagtatgctgccttcacagtgaatttaatgtgataagattttcattcaaatgacattatttctatttaatgttttaatacagttatgcatgaaatcaaattccaacttcttaaaaaatgtggagtttttttggatcatttgatcatttcctataaaccatgtattccggtctctatattactgagagtgatgttagattcttggtctactgttgaagataccaaacacatgcaccatttgaatgtgttcttgaactaagtcctaaaacaaagtgaagcagtgtgtttttgtagagctcaggtctaggtgctgccaggtggggtagtgccactcctccagaaggccctggtccttgtgaggcccaacagatgtcatattctttgtttatattcaattcggcattgcccttccggctgggggacacccaccaaatggagataactctaaaaacagaaatgcagaagaaatagaaattaagagacataagtccacagtttcagacctaaggtttattccattgtaatcttctctaaaaagtacaaaatttaggtttttcaagttgggaaatgtttgcatcaatgaacttcacaatatccaacatcaactttagccttccattcaggcagaagaaaaagaatacaattccttattctaataacaatctctttagttgtacacacctgaaggctataggcctgccacccttcgctttatctggctaaagaggttaccacaaataaggctctttctacaattctggctcaaaaactgtgacacttcatttagaatcgctgagtgagatctccatactgcaggttacaggtgtttaaagaatgatgtggagttggtgatgtgagccacttatagcgtattcatgatcgtgactttccataaagatatattttttttgagaggagtctcactccatcgcccccataaagatactttgtaggctccaaatattctgacttttttcgcccgagttagaaataagatatgaaactgtgtagggtcaaggggaggtcagcgtattgtaaataatacaaagagatatttgaggtttaggggattaaaaaagaaaaggaacattttctgtcaaccatgagggctgagggaagatgaggagtgaggaaagatgaggtggatccaatttagaatcagtctattttcaagtttgaatgaaatagggcacaaaatgggctctttagcaaggagattctttggagagttgaaagaataagttgcagggttccacgaacccactgaaattgcatccacaactttgtgtgtatgaagaagtatgcacttttctacaaaggggatccatgcattttgtgagatttcctaaggttctatgaaccccaaaagtaaaatgaaaaaaaaaaaaaaacaaccatacaaagaaataaaaacccattgtgttagcaaaaatgtgcttgcttttgcaagagaattaaagttgacttttccttaatgctcaaaatggaacagccctcactgctagcatcaggacactgctgcctgaccacagatccttaaactttgtagtatttcctttttgtttgattcataatggaagagaattaacactacattatttaaggccttttgaggtaaaataaaacattgggctgttgcaaaattaaaattggagattctagcatttgattttttctactatgttaagtaaattccttcaggggagttggtttccaagtccactgatttcccctgcacctgacaacagagtgttcaggacatgctttgacaacccatccctgccttctcctagaagagcctggtgatttgacggccatttcctgtactttctggtcacctgattttataatttattgaaacaagttcaatagttaaataaagttaattgatgtttctcattctagaataagaattgtgagataaaatgctctttgagatcatgggaattcactcagacttgtactttttataacctgagagaacatttctttaaaaagtgttctcagtggtgtcaaaacataaataggacatatataaaatagtataagaaattaaatacagataatagaattcttaggagaaaatgctaggaaaaatcctgtcttaaggaattggtcaaaattactaatctccatggttttaaccaatgccatccttttcacctgaaaaggcattctggtgtcctcttgctggtgagaaaatctttggatgttgagtttaaccttgagcaaaattgtgacattcaactcagtggatcaggaactagtatttgatgtccataaagcctgaccctgatgttcattttgtcaacaatatagcaggtagctgagaccctttgtgagagttgttttgagttccctttcattgtaagattctgagagctcttcatcaccgataagttactcgtcctcaaaatagaagtgcaaaagaaatcaagtgaaatgctgaaatgtgcatatttgtgagtaataaaatactttctgtgtcacttacgcacttacataattcctattgaaatgtcacctaagagttttatttatctctccatacattagccttattatatcaagagtaaatcaaagcacaaaacgctatgtgaatagctctgagattgcaatccttaatttctgagcttcagccccaatttaaatagcaccctttacccaaagttttcacatgatttccaaacatttggatttaaattgaacttccttttatttcttacaacagaggtcctcaaagtgtggcacccagacaagcagcagcagcagcggcatcacctggagcttgttagaaatgcaaattctgggccaggtgctgtggctcatgcctgtaatcccagcactttgggagaccagcgtggccaacatggcaaaacaacatctctactaaaaatacaaaaaattagccaggcatggtggtgtgcgcctgcaggcccagttaccagggaggctgaggcatgagaaccacttgaacccaggaggcggaggctgcagtgagctgagattgtgccactgaactcagctcacagtgtttggagactctgtctcaaaaacaaataaaaaacaaccccccaaccaaaaaaaaaaaaaaaaaaaaaggaaagaaatgcaattctgtagcccctcccctgttcctactggatcagaaattctagcgataaatagcacctttatacagtctgttctaacaagccctactagtgatgctgatgctcacaccaattcgagagccactgatctatgagaatagatctacagaaaacttaaatgactgaatattcaatagtttgaggtaggaataaaaccatgaccttttcatttctgttcactgtttttactgctaggttagtttttttccatgctgttccttttcagatggaccaagggttatgacttgcattaaaaacaatagttcacatttggatcacagacattcctttctagaaaaataagggcaaagtgggcgccatgtttatttaactcagagaaaagtgttcaaattggtaagtgcaatgaagagctcctaacactggaagtggtggaaagactgctattaagtcccagtcaggtagtaattgggtacatagattagatcctgaattaaggagaccgagtatcttctcagtctggttcaatctaaggcacctgttaagatcaggcctaagtgaggaaatgtcagctcatctctagtaatcaaaattgggggaagtgggggtggttatgtcatatttataagtagtcatgatactcaaaattctgaaaacacttacctgtttgggtaatgggtccagaagactacagtcatatttataaagtattaaaataatacacatctgaacctctaacagagcaaaccacctggaagaaacgaataaaattgttacttgattgtgaaagatgtataaatatctgccaacagagaatatctagaaagcatacatatttcagagtaaacatgctcttctttacaatatactcttttcctatttaaaggacagagtaagaacttaactctttcttaataccacctactccatagggtagcgggatgattaaattgctttaaaatgtatataaagtgctgagccagtgggagctctcaataaatgacagtcccaagtctctctctttaggactgtgctttccagtatcatagccattagatacaagtggctatttcaatttaaatacatttaataaataagtttaagattaagcaaaatggaaaatttcagttcctcggttgcactggccatatttcaagtgctcaaaagctgcatgtggttacaggctactatactggacagtgtatatttaagatatttccatgatcacagaaggctctattggacagtcctacctaagtctagatcctgttgcccactggaaattactgcctgaatgttctacaggaacatcaaattccccaggacctctaaatccacttttccttttgcactccttgtctaagagtgcccaagcattttgatcacacactcttgataataaaatatttcagcatgccctacaatatattgatactcatttattttaaattatgcacatatactacactgtttagagactattttctaagacacatacaaatagaaactaaaaaactgaaaaaagtataaatagaattctgttatttttccctgtgtcccattgggttgttttgaactctctgcaggatagggaaaccttttaggaagcatagcccttaatgaatacaattagtccaacgggacagaacattgtcatagactaaatcctctccatcaccctccatatccaattaggcaccaagtcctttttttatggttctcctaaatagctcttaattctcctccttaaccccttatctccagtccctccatgactccctcagtgtagttcttcatcatttatttcctggattactgaatcaatttaccttccacatggcttccagtttcacttccctctactctgtcctttaccctaccactggagtaaactttctaaaacacatatcttcactatctcctcattacacacacacgcagacacagacacacacacacacacacacacacgcaatctttcaaacaccacagcagaatacagccagcccttgaagatctgccccttacctatctctgcagtctcctctcccccagagctcccccttgacaccatgtggctctagccacgttatattacttgacattctctgaatgatgatgctctgtgccacaagcctttccctttctgaggctcaatctcctctggaagcatttcctgataactgtcctccaggctgtagtgcccttcctctccaccacatggttccctggtcacatcttagccacagctgctactgcaccacattgtgattgcttgttagccagggctctcccagaggaggatttgtattatgaggccttagcacagtgcacagcacactattagtacctaataatgttaactgaataaatgaatagtgatggaaagtgatgccttccatagagaagattcaatttcctgccctttccacctgtctctgtatttctgtggcactttacatatcccttaactaatgcctttatcctacaatcctactatatcttactatattacagctagaatttgcatgtctgtcttcccttatagactacagccttcacaaaaagcaggaactatgtcttatctttaaatcatcaatgtttgttgattgaatgagtgaatgtatacatatcaatgatctcatattcatatcaaataattagatttttctgcactactgttcttgaaacatcttgactgtattttatttcaaatgaaatctggagcactccaggtgtggctataatccatctgaatatcacatcaattattcagtaatatttatgatgcaaatttaaccctacttacttgcaaatgctaaagataatttattctaaaagggtatccatgtctatgaaataggacatggctaatatttactgatttggatcaaagtcagcaatgtttctaagaaaaaacaactttgctaactcacataaaggttcagaatgtctcacaactaaggttttgtcaaacttttcacaaattggaatttccattcctggccatgataaagtaacaaaagttggtgttatcttcctgccttaaataactcaaaaacggggcaaactccagtgtaggacaaagatctccagaggaagtaaagaatgagacgaaacccatgattgcttcggtttcctgcttctggcagtcttcaggccacagtgcaaggacagaaaaaactcacaggtctgagagtattattaattcagcagacagagatccaagttcaggcaagctaaagagactaaaatttgtagagaagagtatcagaaaagaaggagtttcacagaaagagagcgcacaagagtattccagggatctagataggagtctacttgagtatttggcagagtactgatctctgcatgtgtgagagaaaactactgagacggaaaaagaaccacaaaagggaaatcaaagcacaagaagctgaataaggccaagagctcacacaagacatggaggctgtgttcacacaagaaaaagtctcaccattgtacagcacatggaccattagctagagctcttaaatgggtattgccttagtagtgggattagattattttacattaaatggcgctctggatttaccttactgaagcttaaaaacaagttttgcaaagttgtttttctaagcaactaactgcatgtcataatgaggtctaaactaaaagaatacaacacaacccagtatccatggcacttaacatttacgtcttgccatctattcaaaagttaacaggcttagaaaaaacaaaacagaaaaatgacctcaatccaagagaaagcccattgaaaaaatataggcccagaaatgacagatattaaaaatagttattatactccacaggttcataaaggtagaaaagaacagcatgatgaggagagaaagataagatattttaaaaataattgtgcttctagcaatgaaaaatacaatatcttaaatgaaaaataaactggatgggattaacagatggtaaaatgctgccaaagaaaagataatggaatttaattaacataacaaagaaaaatatctaaaatgaagtacacagaataaaagcctataaaaataaataggttattaacttataaaataacgaagtctaacatacatgttattagagatatagatgaccaagcagggaaaatattttgagaagtaatagtgaaacattttcaaatttttttgaaaactataatttacagatcaagacccccaagcagaagaaatataaagaaaatcatgccgactgggtgcagtggttcatgcctgtaatctcagcactttggaaggctgaggcaggtagatgacctgaggccaggagtttgagaccagcttggccaacatagccaaacctcgtctctaataaaaatacaaaaatattagctgggcacggtggtgtgtgcctgtaatcccagctacttgggaggctgaggcaagagaatagcttgaaccagggaggaggaggttgcacggagccaagattgtgccactacactccagcctgggcaacagagcagaactctgtctttaaaaaaaaaaaaaagcaaggcacagtggctcacacttgtaatcccagtattttgggaggccgaggagggcagatcatgaagtcaggagttcaagaccagcctggccaagatggtgaaatcccatctctactaaaaatacaaaaattagccaggtgtggtggtgggtgcctgtaatcccagctactgcggaggctgaggcagagaattgcttgaactccggaggcagagtttgcaatgagctgagatcgcaccactgcattccagcctgggagacagcaagactccatctcaaaaaaaaaaaaaaaaaaaaagaaaaaaagaaaaagaaaatcatgctaatgtgaatcataatcaaattgcaattaataaataaacccagggattaaaaaaattaagtagccagaaaacaaagacaccataaagaacaacaaacattaaaagttaacatagacttttcactggaaacaatgcaagccaaaggacttacaatgtgtttaaagaatagaaagaaaaataataagcagtcaaggtataaagaaagggagctaatactgtttgtattcatctgttctcacactgtgaaaagaacttatctaagacttgggaatttatgaaaaaaaaagaggtttaattgactcacagttctgcaggcttaacaggaagcatgactgggaagcctcaggaaacttgcaatcatggcagaaggtgaaggggaagcaagctccttcttcacatggtggccggagagagaaagcgagcaaagggggaagtgccacacacttttacaccatcatatctcgtgagaactcattcactatcacgaacatcaagggggaagttcacccccatgattcaatcacctcctaccaggcccctcctcctccaaatgtggagattataattcaacatgagatttgggtggggacacagaggcaaactatatcactgttctttctaataatgcactaattttaccatgagagagatcagcctaagtaatctgggggtaaatatttaattttctccgtaaggatttagattatagcatgcattaggaaaaaaggtgattgtcggccgggcacggtggctcatgcctataatcccagcactttgggaggccgaggtgggtggattactaggtcatgagattgagaccagcctgaccaacatggtgaaaccccgtctctactaaaaatagaaaaattagctgggcgtggtggcacgcacctgtaatcccagctactcaggaggctgaggcaggagaattgcttgaacctgggaagcagggggtgcagtgagccgagatcgcgccactgcgctccaacctggtgacagagcaagactccatctcaaaaaaaaaaaaaaaaaaaaggtgatggtctttgggaattgtgtaaaagagagaaagagactgatgttgaaatgacaatcaaccattcattcagtagaaaatttaaaagaattaatatttgggcaggtcttaaggaacatagtgtgcctgtgcccgcaatgaacagttttgaggaactcaagtcccaaggacaaccatggacagtcctgctaaagcccctcatgttactctatactcagactgagaaatgacctagggaggaagggtggtgatatatcttggagaaaaatcagcttctcagaggagggatgagactaaaaggagggcagctgctctgtgactattttgcaaaagagacaaacacattgccatgtaaaggcatataaggttaggaaaaaggaaccttctgtgaagtgctcaatttaagtacttttctctaggactataggaaaataaacattttatgtacaattttaatatttccctacctatgctgtaatttgcttaccctaaaaattccataagaactgacacatttacactatcttgtgtgatagtgcagtggaaagtaaagaggtgatataatggcaggaagcatgagtagcctcactttcatccctctgctggagatgatctgaaaaaagcagcatctcattttcagtgctgtgggtggtagcacgtggaggagctgggagctcagcaaagactgcagaacaccaagggtcaaatttaaatggataactaggttgtgaatgtaacacacctgtcttttctctcttctcctttgaaaaaaagtgacttttatgggaacagtaaagcgacacttagattatacactaagagttctaacaataaaataagacccccattcattcattcattcattcgatgtttattgtgtccttatgtgctttatatacttctaagcactgaagtcaccccagtaaacaaaaacaatattcatgttctcataaagcttaaattctagtagaatgcattctagaataataaataagaacaggaaagaaagttgatggaggtgtgggctaaaatattttagagaaggaaggtctctctgatgaggtgacattttatcagaccctagaataaaataagagggtgagccataaaaggtgcaaaaatccagagttagaagaatgagaaatgatgagaaggctagtattgagatgggaagctactggacagttttgagaagtatgacaagctctgaaaggatccttcagttgctacactgagaataaaatatagggtgagatgaatggaagcgaaaagagtgataagaaagccactacaattttccagacaatagaaagtggtgacttagaacaggatggtagaaatagttgtaagccatagttagagtctggatatattctgtaggatggactgatggtttacattatacatgtgaagaatataaaggaatcaaggatgactccaaagttttcgacttgaggaaatgcaaggatacagctgttgtttacctcagaaatggggaagattgaaggaagaggaggttgagggaattgtaatctggagctcagttttggacttaagtacagctctctatagaccagtgccttttagatatccaaagaagatgttgaatggaagctaagtaatgagccccatgattaggaaggattcattcagggtcagagatagaagatttataaatataagagtcatcattatttagacaattatttaaagccatggggcagtatgagatcacttacagagtgagttaaataaacttgattaaaaaaaatctacggaaggagccctggggtaatccaaaatttggaagtcaggaaattgaggaagatgagcaaaggagatgggaaagaagcaggccaaaaggtagaataataaaggaaggtggtgtgtctgcaaccccataaataaagtgtttcatggaaggtgtgagccagcctatcaaatggaaagaaggcaaaaagcaccaatatgtgaaattagacatcaagctcccacttacataaagtaaccacttcttttcagtacttagctctcttcctacaagtaaattaaatgagctcactttttcaaataactaagttggcatttcatgtttggtagaatattaggaagtagtgacttcctagcattcaatatttacttggcagctctagaaaaaatgctggctaattttgtatttgtgaattatagaacagttttgtaggttccttgctttattcaaataaatcctatctccttatcattgttttaagcccttctctaatataagcttgctattgaccagtgcagtgatttccaacttctctgagttcagcatcctgggataaaaggcccctgccactcttcctctcaagtccctagaggcactgcaacaagcgaaaaagacagtcaacaatttgagggtgcagtatgggagctgcgcaagtgaagaaggtacacttggcagagagaaaatccattccaagggacagacttagaagaaaaatagtatctagggacctgcaagttgttgactccatgcagaaggtgaggtgatgagagatgaagctggacagtgcaggaggagccggttcaaggggggtttgaatgtgccatgtgacagtgttgggactttaataacgaaagtgcccctcaatagattgtgctgattgaacaattatatctaggtgtggaaacggggtttctcgaagctttattacaacatataggaggtattcaataaatacttcctggatccctaaaataatttgctaagcaaatgagaaatgcaaacaagatcaacgttcataagttaagagcacaatattaaacattttagaaataccgtgcatattttgattagaaataattagaaatagtggttaccaaaggctggggttaggggagttggggaaatgttattcaagggacacatttcagttagacaggaggaataagttcaatatactgattgtatatcatggtggctacagttaataacaatatgaaagttgctaagagagtagtttgtttgtttgtttgttttttgagacagtctcactctgttgcccaagctggagtgcagtggtacgatcttggctcactgcaacctccgcctcctgggttcaagtgattctcctccctcagcctcctgagtagctgggattacaggcacctgccaccacaactggctaacttttgtatttttagtacagatggtgtttcaccatgttggccaggctggtcttgaactcctgacctcaggtgatccacccaccttggcctcccaaagtgctgggattataggcatgagccactgtgtccagactaagagagtagattttaagtgttctcacctcaaaaaaaaaagtatgtgacataatgcctatcttaaacagcttaacttggccattttacaacatgtacatattcaaagcatcatatagtacatcataatttttacttgtcatttaaagtaaatacattttaaaggccaggcatggtggctcatgcctataatcccagtgctttgggaggctgaagcaggtggatcacttgagctcaggagttggagaccagtctggacaacatggtgaaacctcctctccattaaaaaataaataaaataaacaaataaataaataaatttttaaaagtttgaagctgaaaaatatgttagaaaaaatctgtagagaaagtagaatgaggaacagaatgaataataaaaaatttcaaaaaaagattagaaataatatttaccaatgtattaaaacaattttctgttacaatctataaggcagaatttccctaattaattttagtctatgtgatgttcttaaaaatgataaaactacatttcccttaaagataaatactcaggcttttggccaattcataatgtacattttgaatttgtgtggcttaatatttttcttttctactttttagtgttagtttagttattaaattaataactagctattaagatagtattgatatttatattacattaagattttgatatcttaaaggaaaagttgaattttcttcaaatccaaatatttggatattctaatagaattacctcaattcaccactaaagtttttttctttacagtggcaaaaaaaaaaaaaaatactgttttttaaagcctttactatgtcactgaattttgttcaatgtgtaaaataccagaaactgacatatacatacctaggacatagaaagctttttatgtcaaagaaaacgggccttgtaaattcgtatttttacagaagctcttcagaagcaagctaagctatgttcaggtaagtaatgttttcttaatacttctaatgtcaaaacagtgaaaataatgaggcacattgtttatgacagatttatcttttacacttacaagaacaacattacacatctactaataaagctcattaaaatagaaacatgttgaaaattttttaaatacttggtacttgcgtattttctgcatttgtatttaaatacttcattaaggaatgctacacaggcattgagaacaccaagaccgacacaacacaatgctagcaatgcacatggagagatggaagaggtcacaataatatatagatgaaggtagaaacaagggaaacaaaatttggagtctggagagcactctacaacctggcatgattaacactgactttatatggaggtgaaacttgagctacaccatgagggcaaaagaacctttaaataagtagacttgttgagtgagagcattccagagccagcagaaaacatgggcaaggggaggagtggacactctgtagtaaggaacagcaagtagacgctctggggaggacattctcagatgtttagaaaggtaaggctggtgtcagattatggagggcccggagttctaggctaatgagtttggtcagcaggtagtggcaccagaatctcaatgagagagtgacaatcagattattatttaaggaaaactcatctgtatgtagtgagtaagatggattgaaataagagataatacagtcagggagaagggttaggcaatgataatagtcatctgatgctgaggtgaaggagacctagtttgttttttattttgtattttttttattttattctattttattctattttattctattctattttattctattttattctattttattctattttattctattttattttattttattttattttaagacagagtctccctctgttgcccaggctgaagtgcagtggtgtgatctcggctcactgcaatctctgcctcaggggttcaagctattctctcctgcctcagcctcccaagtagctgggattataggcacccaccattacacccaagtaatttttttgtatttttagtagagacgaggtttcaccatattggtcaggctggtcgcaaactcctaacctcaagtgatccgcccatctcaacctcccaaaatgctgggattacaggtgtgagccactggacctggctgaggagacctagttttaaaggagtggagaatgtacacagaaggccagaaggaaggaggagtaaaggataactccaaaaacccaggtgtctaagagagcagtgatagaaggagagagagtactgaaggaatgctagtattggggaaaattgatgattttaattttagatgtcttgattttgagactgaatacctctgtcacttttaaagagaacacctctctcttttttcctcctagaagtcattgtaggtaatgccagcatgtgctggaaagctatcactgttgccaggagcaagaggtctgaagtatattcctagttgccaccagctgcagcttatgaaaatagaatgatcttgccccggaattcagagaaggtagcatacagacatagtgtcataggcatcattcattgaagcgcagctatcaagttaaagcggaagtatggcaacctcatccctctgagaaatcttttaggaaaataaaatcaatatggtagcaggaggcaaaataatctagcacctgtgattctcaaattttagtgcatcagaatcatctggagggcttgttaaaacagattgctgggccccacccccaaagtttctgagtcgggagatctgggacagggcccaggaacttgcatttattacaagtttcctggtaatcttaatactggtggtctggggaccacattttgagaatactgatctagaggaacttgtcaaggaaaatgatgaaaaaaaaatatgttagaagatgcagtttgccaaaccttttaattttagcacacaacattaaaattataaagaatatctccattatacatgcaacattatgtctggggtaccaaacttttgattgggaatactggtgaaagcataatctggtagagtgggaaggtagatgttttatattaaatatagaaaaaaaagaacaaaatgggaagagaagaaagggataagggtaagctgaatgagaaggaaaagaagaaaacataaaaaaaagaagaaaatgggaaataaataaaataaaaaaaggagatgagaaagtgtaaacacatcaaacgaatctggtgtagacgtttatgtaacaatgttgtgagttgcttttcatttgccatggacccccaggatgaaggtcatgtaaccagggcatgcccagataaccaactgtgcaaccacagagggattaagtgcttggaccaaggagcagggactgaattaagcagcatacaccacattgcaggatccaggatccaatcagatagagcactgtcatcacccatggcaggatccagtcagatcatgcttcccgacatcacctcattgttaagatccaatcagatcacacatcattaccctatgcttatgaaacctaccccagcctccagcttggggagacagatttgagcatttcctcctgtatccttgccagttgacttgaaataaaagttttcttttctcaaaagccagtgccatggtattggcctctatgcacatctgacagcaaactcactgatgctcagtcacaagagcagatgggacagcaagaatgaagaactggagaacctcagcccttctcgatttgacatactgttttctgtttcattaggaagattataagtggctgttactaggagtgcatgctctggagctattgttttcctgactgcagccaggattgttctaatggtgatcctatggttactcctcctagaaataaaatttccatacaaatgagctatgagctaatagtttggctatctctttttaaacattctgtattggtccatttttatactgctataaaggactgcccaagactggacaatctataaaggaaagaggctcaattgactcatagttcagcatggctagggaagcctcaggacacttacaatcatggtagaaggtgaaggggaaggaaggcaccttcttcacaaggcggcaggaaggagaagtgtgagcaaagggggaatagtcctttataaaaaccatcagatctcgtgagaactcactcactatcatgagaacagcatgggggaaaccactcctgtgattcaattatatccacctggtctctcccttgacacatggggattatggggattatacagattacaattcacaatgagatttgggtggggacacaaagcctaactatatcagcttcttattaaggaaaaggggcaaaggaatagtactgacttaattaagtttaagtacttgcaaaatagaaatgatcttatggcttattttatttatagctcattgagataagattgacctcaaaatataaataaataagaattatatatatatttaaagcacaaaatgagatgattatatatatatatatacacacacatacatatatgcacacatatatacatgtacccatatatacacatacacacacattgtgaaatgattaccacagtcaacctaattaacatatccgtcacctcatgtggttacccttttgtgtgtttgggagaagtgggggggtgagaaaatttaagatctgttctcttagcaactgtcaattgtacaatacattattattaattatagtgaccatactgtacattaggtctccagaacttattaatcttgtaactgaaagcttgtactctctgcctgatatctccaatcccccaacccctggtaaccaccattctactcactgtttcaatgagttcaaatttttagattacacatatagatgactttatgtaggatttgtctttctgtgtgtagctgatttcacttagtataatgtcttccaggttgactcaagttgttgcaaatggcaagatttccttttgtaaggctgaaaaatattccatatatatatatataacttttttatccatttatcaatcaacactttggttgttttaatattttggctattgtgattaatgctgcaatgagcctaggagggcaaatacttcttttgagatactgattttgtttcctttggatatatatccagaagtggaattgctggatcatatggcaattttttttaaatgcttgaagaactgccataccgttttccatagcagctgttccattttacattcccaccaataatgcacaaaggttccaatttctccacatcctcaccaacacttgttattttctttgtttacggtagtcattctaatggatatgccaactcaaaaatatatagagatgaatctctaagcaagaggttttgtttggaatatataaggaatagaactgcaattcagggcacacacacagactagggtggcctctgttatgctcacagaacaaagaaatggttaaggtttactggggcaagggaaggttaaacaaattgttttgagagaaagttcactggtgctggcagcatcttacaagagctagtgagctctgataggtgagtttcagcagttgccaggtgggacttgcagtcttgaaattatggttaggtccatgcagatctggattgagcttataagacatttttttttaaaaaaaaaacaggtgtatgtaaccttagtgtttttctcatggcttcttgactcattttagttgggtatgacataaatgacttcattttgtataatcaactttcacaggtataaggtggtatttcaatggagttttgatttgcatttccctaatgattagtgatgttgagcatcttttcatgtgcttactgtccatttgtgtatgttctctggagaaatgtctatttaagttctttgctcatttctgaattgggttattttgttgttgagttttagaagttctctatgcataatggaaactaatacccttatcagatatgtaatttgcaaatattttatcccattctgtgtgttgcctttttgttttgttgatactgtcttttgatgcacaaaatttttaaattttcataaagtccaattttgtctatttttcatttgttgtttgtgcctttggtgtcatatccaaaaattaatgccaaatccaatgtcataaagcttgtgctctgtttttcttctaagatttttatagttttaagtatttattttattttgagttaattttggtgtatggtattaggttataagagtccaacttcattcttttgcatgtaaatatttagttgtcccagcgccattcattgaaaagactgctcctttcccatggaatggtcttagtatcttggtcaaaaatcatttgaccacatattccagggtctatttctgggctctctattctattgtattggtctacatgtctatctttatgtcaacagcacactgttttaattactgcagctttgtagtaagttttgcaatcagaaaatgagagtcctccattttgttcttctctttcaagattgttttggctacttggggtccttgaaattttatataaatttcagaataggcttttctatttctgccaaaaaaaaaataacatcattgcgattacattgaatctgcagacttctttgggtagcactggcatctttaacattattagtcttccaatccagaaacatgggatatgtatctatttatctatgtccttaatttctatcagcaatgttttatagttttcagtgtataactctttcaccttcttggtttagctaattcctaattgttttattcatttttatgctattataaatgggattgctttcatagtttccttgtcagattgttcagttagtatataaaaatgcaatggattttttgtgtgttcatactgtatcctgctactttgttgagttatttattagttctaacagtgttttgggggcagtggattgtacatataagatcatatcatctgtgaagagtcataattttacttcttcctttccaatttggatttcttttatttctttttttgcctaattgctctggctacaacttccagtactatgtcaaatacaagtagcagaagtggcatccttgtcttgttcctggtcatagagaaaagtttctaatctttaaccattgagtatgatgttagctgtgggcttgtcatatatggcctttattatgttgaagtactttccttctatactcgatttgttgacagttttttatcatgaaaagatgataaattttttcaaatgctctttctgcatccattgatataatcatataatttttgcttttccttttgttaatgtggtatatgacattcttcatttgcataggttggaccacccttgcatccaagggataaatactacttgatcatggtgtatgatccttttaatttgctgttgaatacaggtgctagtatttttttttgtagaagctttgcatttatgttcatcaggaatatggacctgtagttttcttttcttgtagtttccttgtctgacttttgtgtcagggtaatgctttgtaaaatgggtttggaagtgttctctcttcaattttttctaagagttggaaaagaatttgtattaattctttaaatgttcagtaaaattcagaagggaaacagttcatgggcttttctttgataggagacttttaatttgtgattcaatctccttacttgttggtctgttaagattttctatttctttataattcagtcttggtaggttttatgtttctggaaattaatctagtttttctaggttatctaactggttttatttaaatgcacatagtaatctcttatgatcctatgtgttatctgttgtcctccttcacttctgatttatttgtcttctgtctcttttcatcagtctaccagaagatatatcatttttcaagacttaattttttaactgaaaaacctttttgttgactttttaaattgtttttctagtctctatttcatttatttctgctttgagctttatttccatatgtctgccaactttgtgcttcatttgttcttctttatctagttccttgaggtgtaaatttacattgtttatttgaggtctttctttattcttaatgtaggtgtttatcactatatacttcccccttagaactgtgtttgatgcattctgtaagctttggtatgttgttgtgttcgttcatttgtgttgctatgaaggaatacttgagactagggaatttataaagaaaagaggcttatttggctcatggttctgcaggctgtacatgaagcatagtgccagtatctgcttctggtgagggcctcaggaggcttacagtcatggaagaaggtgaaggggagccagcatgcaacacagggagagagaatgcaagagagaaatgggagaggttccaaactctttttaacaatcagatattgcagtagttcattgccatagaaaggccccaagccattcatgggggatttcccctcactatcaaaacacctcccaatagggccacctccaatactgaagatcacatttcaacatgagattttgagaggacacacatccataccatatcagatatgtttccatttttacttgtctcaaaatgtaaacaaagtattatgtcttctttggcccattgtcattcagtagtatgttgtttaatttccatatgtttgtgaatgttccagttttcctcctgttattgatttctagtttcataacactgtggtaagaaagggcacttgatatgccttcaactttcttaaattttttatggtctactatatgacctatcttgaagactgtcatagcactagacataggtgcttgagaagaatgtatatgctgctgctgttggatgaaatgttctgtatatgtctgttaggtccatttggtctaaaatgtagttcaagtcccatgtttccttattgattttctgcttggatgatctctctattgttgaaagtggggtatttaagtcccttactattattgcattgatatttatttatcccttcagttctgttaatatttgctttgtatattcaggtgctctgatgttgggtacacatatatttacaattgttttaccctcttgatgaatttatccctttatcattatataatgaccttctttgtcttattttacagtttctgaattaacgtctagtttgtctaatcagagctaactctgctgtcttttggtttacatttacatggaatatctttttccatccccttcactttcagcctatatgtgtcctcaagggagcattttataggcaatatatagctgggtattgtttttgtttgctttttttttttaccaattcagttattatgtgacttttgactacataattcaatccatttacatgcaaagtaattaattataggtaagaactcactattgccattttgtaaaaattttctgttttgtagttccttagttcttttgttcctctcttgctatcttcctttctgatatgattcgtttttgtagtggtatactttaattcatttctctttatctcttgtgtgtctactatagcttttagctttgtggtcactatgagtcttacagaaaacatacttatagcaatatattttaacctaataaaaccagtactacactgtactgcatacctatccaagggtgcactcaatttaacttcatttgcctatggaaactctacattttacttctctcctacccccacatgcattatatgtttttgatgtcacaatttactgctttttatattatctatctcttaacaaaatattgtagctatagttatttttaatacttttgtgtttaatatttttttcgggagttaaaaacatatttatataacaccattattggattataatattctgattttgactatatatttaccatgaccagtgggttttatactttcatgcatttttatgttattaatttgtgtcctttcatttaagcttgaagaagtacctttagcatttcttataaggcaggtatagtagtgatgaactccttcagctctgtttgtctggaaatatctttatctcaccttcatttttgaaggacagctttgccagatatatcattggttttcagaatgttttttctttcagtagtttgaatatatcatcccattcttttctggcctgtgaagtttctcctgaaaagtccaaaatagttttataaaggttctcttgtatgtgacaagtcacttttctcttgctgcttttaaatttctttgtctttgacttttggcaatttgattataaggtgtcatggtgaagttctctttgggtcgaacatgtttggagacatttgagtttcacaggtgtaaatgtccatatctctctcagggttcgggaaaatttgagccataatttatttaaataaggtttcttcccctttctcaatcctccttctgagacttttatgatgcatacattggtttcattattagtgtcccttaagtcccataggtttactttactcttttcaatttttttctccttagtctggataatttcaaaagacctatcttcaatctcagagattctttcttctgcttggttgagtctgctgttgaagttccctattgcattttttcagttgattcactgtatttttcagctccaggatttatgtttgctttcttttgatctttcaatctctttgcttcacttccagttttattcatatattgttgttatgattgatattattgagttctcttgtatcttgctgagcttctctaaaataattatttttaattccttgtttaggaagcttacagatctctaactctttagggtttcgcattggaaaattatagtggtcctttggtgatgtcatttttcctttgtgtatgtgtttatgaccttgcaatgatatctgtgcatttgaggtagcagtcatctcttcaagactgatgggctggatttgtggggaaatactttcatttgtgggtgagtgctatgctaagtgaacaggatgtggtggcatagtctgtgcagttccatcagctgtaatcaatatttgacaggactgtgggggtcctcagtggccaaggttgtagatgtatttgaaggcagcagtagtgatgaaagttttagagggccttagtgtcaaagattgctgtggtcctcctgctattctttttcctggggccgcctatgacactgtggggagtcctagccaaagggatcctcttggtgctgagtctgtcacaagggcatgctggtaaccacagtagcactggttccagggcacaggcatttttgtggcagtggtggtcccagtattcagcacataggtgatcagagcaacatcagagccagagtcctgggctcaggagtgtatagaacatctatggcacctggagaacagggccataattctatagcagtgggtgtcatcagtgtctgagacaggcatttgacagtcttaactgatataaccaaagtaaatgaagctaagccctttaaaaaagcacaggttatttagaaagcaattaacttacatgattaggaagtgctaatacaagatttcatggagttcaataattcttgaaagaaaactcttgcttttaagggaattacattactgaggatacttttggttgcaaggaacagaaaacacacatcagactgatttctatattgaaggaaatgcattgctttatgtatatgaaaaacctgtggctcatgctggcttcaggaagagatcattccagcagctcagtgatgttgccatggagtcagtttccttctactgctctgttttatgttatcagcttcagcataatattgtctgcttttctagtctcaaaatagctgcaccagtttctggggtcaaatgtgtctttatgaagatcctggaaggaatgattatttttgacccagaggtctcaatagaaaccctagtagttaattttcctgcttaaaacatctgccaatacctaaactaatcactatcgtaaaggagagagggggcagggacatcatgtgctgattgtcttagggaagtgttccatctctacagagctgggagtggaatcagtgcttcagaatccccatggatatccaagtgaaaattaaaactattagaaagcgaggagaaggaattaggtgatgaggagataataacctatggacaatattgtaaaatagcagttttaattctagtccccttttcttaggaatgaaatttcttttgaacattagagatacctaacttattaaagagcagtcattcagttaagatgagatgagaaagtccatgggagaaaaaagggatatccaaccctaagtggcctttctttctctccatagatacatatcctgcccaggtattctgtgcacaggatgggggctggagatctattttgtaaataaaggaaaagggtgtcatcctgaaatttttgctcagaaataaacacagtttgttttagaatcactttggtctaagtatcaaaaatcactgttaatttttttagggagccaagatggccaactagatacagccaggaagaaattctcccactgaaagagactagactatcaaggagaccagcatactctgaacaagtctttggaaagaaggcatggagagtggacacaaaaaggacacagaccataggctgaaagtagagaaagttgggaacactgcagggggttgccgagcaccaggactcatttctgggcccaagagcctcctaaagaaagggtaagtgaaataggcatggagtggctcaccttcaccaggggcttctgagatcctagctatgggagatcccacaactcccatgacatttgagctgctagtgataattgcctggagagttggtggaaacagaattccagcctggaaagagcccagagggtttgacatgggaatgtctatagtggagcatggccatggacactcatcccacaaggctcaccatactcctttaggtgactttagcctttgttagctgctggacctggagagagtggggttgtcttgtccatgcagtctgatttgagcacaccccagtctgctggcctctctcagggtccctgcctggctgcaaccacatgcagcccagcctcaattgcccagccaaagtgcttgtcaatggccaccacgagttgtttcactggcagatgctgcatacccattggagcacttttgcatcttgccagtgtgcacccacctgcagccttcccacattgatgtgcactcactcatagcatccccctgtccccacctcactggaatacatgcacacaggggcccaccactgccctgccagagcacttttgccagaagctccagtcaagtgttgttgccaacagactggaaacacctcaaacgctccagcacagcccgtgctttaatctcaaggggccccagaacaaagctgtgggcctgctcccagccctcctgggttagaacacccagtccaggagtgatgagctgagccttgggcctctgaaaatatccagatatgaagccagtcaactaaatccaacttataccacagccaaatcctcaagggcattgtattagtccattctcacgttgatataaagaaatacctgagactgtaatttatgaagaaaaaaggtttaattggctcatggttcagctggctgttcaggaaacatagtggcttctgattctgatggggtggatatggccgaacttcaggaagcttccaatcatgatggaaggcaaagggggagcaagcttcttacgtggcaggaacaggagcaagaaagagatgggggatgtgctacacacttttaaacaaccagatctcacaacaactcagtcagtattatgaggacagagccaagagggatggtactaaatcattcgtggaaaacatctccattatccaatcacctcccaccaggacccgcctccaaaacgaaggattccaattcaatatgagatttgggtggggatgtagatccaaaccatatcaggtatcaaagaatataagaagcaaaaagtcccatccaaaagattaaaagaacatcagctcacacagatgagaaggaaccagtgcaagaattctggcaactctgaaagccagagcattttttaacctccaaactaccacattagctccccagctatagttctcaaccagcctgaaatatctgaaatgacagatatagaattcagaatctggatggcaaggaagctcatcaagatataggagaaggttgaaacccaatccaaggaaaacagtgaaatggtccaagagttgaaagatgtgatagccattttaacaaagaaccaaactgaatttctggaaatgagaaattcgccacaggaatttcagaatgcaactggaagcactgataacagagtaaaccaagttgaggaaagaatctcagggcttgaagacagctccttcaaatcaacgcaggcagacaacaataaagaaaaaataatttataaaaatgaacaaagtcttttagaaatatgggattatgttaagaaaccaaacctacaacttattggcattcctgaaaaagatggagagagaacaagcaacttggaaaacatatttcaggatattgtccacaaagatttcctcaacttcactagagaggttgacatgctcataagattctccaaagtcaatgcaaaagaaaaaatcttagagccagcaatggagaaggggcagatcatgtataaaggaattgccatcaggctaacaatgaaactttcagcagaaaccttacatgccatgagagattgggggtgtatatttagcatccttaaagcagagaaattctaaccaaggacttcatagccaacaaaactaagattcataagcaaaggagaaataaaatccttttcagacaagaaaatgtgaacagaattcattaccactagacctgccttacaagaggtccttaagggactaccaaacagaaatcaaagatcattatctgccgccacaaaaacacacttaagtacatagcccactgacactataaagcaactacacaatcaagtctacttaagaaccagtgaacaacacggtgacaagatcaaatcttcacatactgatattaaccttgaatataaacaggctaagaacctcatttaaaaggcacagagtggcaagctggataaagaaacaagacccaactgtattctgtcttcaagaggcccatttcacatgcaatgacacccaaagactcaaggtaaggggatagagaaagatctatcaagcaaacagaaaataaaaaaagagtaggggttgttattcttacttcaaacagaagagactttaaaccaacaatgctcaaaaaggacaaagaagggtgttacctaatgataaagggttaaattcaacaagaagagttaactttcctaaatatgcatgaatctaatgctgaagcacccagattcataaaaaaaaattcttagaggcttatattgatacttacataccacacaataatagtgggagactttaacaacacactgacagtgtcagacaagtcatcaaagcagaaaatctaacaaatatattcagaacctaaattcaacacttgaccaaatggaccaaacagacatctacagaatactctacccaacaacagaatatacattatcctcatatgcacatggcacatactctaagattgaccacatgctgggtcataaaagcaatactcaacaaattcaaaaaaccaaaaccataccaaccacactctcagaccacagtgcaataaaaatagaaattaataccaagaacatctctcaaaaccataaaattagatagaaattaattgctctgctcctgaatgactttaaagaatgaaattaaggcagaaataaaaacaaatacttggaaatgaatgaaaacaaatatacaatataccagaatctctgagacacagctaaatcagtggtaagaggaaagtttacagcaccaaatgcctacaacaagaagttagaaagatctcaaattaacaatctaatatcacctatgggaactagaaaaccaagcacaaaccaaccccaaagctaacagaagaaaataaatgaccaaaactggagttgaccaaaactgagatgcaaaaatcgagacgcaaaaatccatacaaaagattaagaaaaccaaaactttgttttttgaaagaataactaagattcatagaccaccagctagatagattaataaagaaaaaaaaagagaaaagatccaaataaacacaatcagaaatgacaaaggggatattacaaccaatcccacagaaataatttaaaaaaccctcagagagtattatgaacacatctatgcacacaaacttggaaacctagaataaatgaataagttcctggaaacatgcagctttcgaagattttaccaggaagaaactgaaatcctgaacagaccaataatgagttctgaaatggaatcaaaactcgttattatattataatctaacaaccaaaaaagccctggaatagaaggatgcacagctgaattctaccagatacataaagaagagctggtaccaatcttgaaattattggtactgaaattattcaaaaaagtcaaggaggaaggactcctccctaactcattctatgaggacagcatcactctgataccaaaatctggcagagacaatgaaaaaagaaaacttcaagccaatattgctgaataacatacatgcaacaattctcaacaaaatactagcaaattgatttcagccatataccaaaaagctaatccaccatactttgtatcccaggaataaagtctactttagagtaaataaaacttactttgtttactttatttaccttggatacaagattggttcaatataaacaaatcaatcaatgtgattcatctcataaactaaactaaaaacaaaaaatacatgatcatctcaatagatgcagaaaaggccttcgataaaattccacattccttcatgttaaaaaccctcaacaaactaggcataggaggaacatacctcaaaataatgagagccatctacaataaactcataactgacatcatgctgaatgggcaaaaatcggaacccttccccttgaaaaccgaaagaagacaagaatgcccaactctcatactccaattcaacctagtactagaagtccaagccagagtaatcaggcaagagaaagaaataaaaggcatccaaataggaagagaataaatcaaactatctctcttcacaaacgatatgattctatacctagaaaaccctactgtctgtcccaaatctcctaaaactgataaataacttcagtaaagtttcagaatacaaaatcaatgtgtaaaaatcagtggtatttctatacaccaacaacacccaagctgagagccaaatcaagaatgcactcccattcacaacagccacccacataaaatacctaggaacacagctaaccagggaggtaaaatatatttaaaataagaattaaaaaacaccaaggaaagaaatcagatatgacacaaacaaatggagaaagtgttccatgctcatagataggaagaatcaatattgttaaaacggtcatactgcacaaggaatttaaatattcaatgctattcctatcaaactaccaaagtcattttccacagaattggaaaaaactattctaaaatccatatggaaccaaaaaagagcccaaattaccaaaataatcctaagcaaaaggacaaagctagacacatcacattacctgacttaaaactatactacaaggccacagtaacccaaacagcatgatactggtacaaaaacagacatatggaccaatggaacaaattagagaatccaggaataaagctgcacacttaaaaacatcagatcggataagtaagcaataaaaacaagcaatggggaaaagataccctgttcaataaatggtgctgggataaactagctagccatatgcagaagactgaaactggaccccttcctttcactgtatacaaaaatcaactcaagatgaattgaagacttaaatgtaagacctaaaactttaatggctgtaaaagaaaatcaaggaactaccattctggacataggccttgccaaggatttcatgataaagtctccaaaagccattgcaataaaaacaaaaatagacaggtgggacctaattaaactgaaaagcttctgcacagtaagagaaactgtcaacggagtaaacagacaatctacagaatgggagaaaatatttggcatatgcatctcacaaaggtctaatatccagaatctgtaaggaacttaaatcagcaagcaaaacacaaccccatttaaaaaaaatgggcaaataatatgaacagacatttctcaaaaaaagaaatacacatgggaaacaagtatataaaaaactgttcaacattaccaatcgttagagaaatgcaaatgaaaaccacaatgagataacgtctcacatcattcagaacggttatcattaaaaagtcaaaaaataacagacgttggtgaggttgaggagaaaagggaatgcttatacattgctgatgagaatgtaaaatagttcggtcactataaaaagcagttcggagatttctcaaagaacttagaactaccattcaacccagcaatcccattatacccaaaggaatataaatgattataccaaaaatacacattcattcataggttcattgcaacactattcacaatagcaaagacatgaaatcaacctagatgcccactaacagtggactggatttaaaataatgtggggccaggtgcagtggctcatgcctgtaatctcagcactttaggaggccaaggtgggagaattgcttgagctcaggagttcaagactagcctatgaaacatagtgagaccttgtctctactaaaattttttttaaaattagctgggcactatggcatgtgcctgtaggcccagtgactcaggaggctgaggcaggaggatgcttgagcacaggaggttgaagctacagtgagctatgatcacgccagtgcactttagcctgggcaacagggcctgtctcagaaaaaaaaaaaaaaagagagagacagagaaaagaaaaagaaagtatggtacatagtaacaccatgaaatcctgtgcagctataaaaagaatgaaatcctgtcctttgcagcaacatggatacagctgaagatcattatcctaaatgaattaatacaggaacagaaaaccaaatacagcatgttctcacttacaagtgggagctaaacattaaatacacatggacacaaagagggaattgttgtgggtggagcatgggaggggggtgaggcactgtgcttactacctggttgacaaatcatttgtatatcaaactcctgagacactcaatctacccatgcaacaaacttgcacatgtaccccccttgaacccaaaataaaagttgaaaaagaaaaaaagaccactcttgaattgctgtttctgttcttctgttcttgacatacttatgtcttagcttcataatgaagtatcaaaatgaaatggccaggaaaataatgactgcaattttgccaatggtttctatgctcctttgagtgactcattgctcctttgcaaagcagtgagaagagagaagcatggctaaaaatcaataaggattctgataacctggctcagagtctcagaattagccacattcacctttcccaccctcattcctaaccctcttttatatactctccaggatatgtgcacactcttgtgaaaatgttaggaaacaattatacaagtaaatacaattcctttaattatatttaacaactagagttgaggggatgcatttgtttatggaacaaattcctcagaataaattggatttttaacttgtcactaaatttatggggatttaaatttgctcactccttaaaagcaatcagctatttctaagtataaaagggagaaagctactaataacacttctcaaatacaagagtgtgcagatactttactatataaggcacagcttttaaaatggcattatctttaacataaatatatagaaaaagatgtgctcagagcatcataagtcccaaatatatcatcgccttgctatcactaacatataggtatattatattcctataagcacttaattttttttcttcccttgaagtttgatactgctgcatcttaggaagctgacctttcttttatgttgtttactgattattctaatctagtccaaaagccttttctaatcccccttcctccaaattcttatggcagttgttacatatctgagtcttctggcatttgtcatgtgccatcttaagctgttaagtagggcttttttttttcatatggctatgtctcatttccccaaccacattataaccaattcagaaatgttatgagtctttgactcttcccagtttttaacaaggtgacttgggtgggaatataacatcctaaaggaaaggggcttcatctgatttgttttccatgataactcccagaaccctaacctgacacatagcacacactcagtaaatagttatcaaataaaagaataattgtattaatactagatgctcaagagatgtttggttaaaaacagtactactaaattactattagatggacctctgattttaattaattttccaatagatgtgagattttcattaggaactcaagacaagcccatgactttgtggcctaggactccctagaatacatgaaagacccaaacatacacaaaaagtaaaaatcacactttctattcctgaggaatccatgcttcattttaacttctcaagtattgcagccttcctcttattacactctcttcttatccaagcatgcctttataagcagattaatcttgccaaagatcagggctgttgttttacactggagtttaagccatatcaatttgcacaatgacacagcaaatcaggcatcctcttgcaggaattagaaccaaggaaaatcaagcttgttggttttggtgtgtgttccaggggacaggtatagcaagcacatccctaagatcatcaactctcagaggtgctcactcaaagaagttttcctccacactgaaaaccctccgtcttattcctccatttaaatcgtatagtttaatgtgagactgtctgctataatgagactcttcactttgcaagctacaatttctgaagaagtctggtggttcatgctgctctttcctgtttgtttttctgaaacaaaacaaaacagaaataaatcaccagacttctccagtagtagaattactagaaagattttcttccatgtgctacaaggaagtgcctcgcagtgggatcctgctccaaacctactttcagaacccccacgaatacgaagaggaaccacagttcttccattctgatttttggttgttatcccatggcagcaccgagtacatactgacttaaatcagcagaaccttctgtgtttgcttgtgagaggggttctcataccacctcagtggcttgaactccaagaagtgacagctgcaaggccataagagtgtgtgttcatgatgaactttgatcatcagccatattacaggcaactttctctgactcactgagtatttggtgcatgagaaaataaattggcgcctggaacacaaatcaagaacgagtgcaattttctggggattacaactaaggatttgtgggattaaatttctagtgcaaaaaaaatctaccttggtatacattgtccaaatgaagtcatttgctttcctgaacaatttgctattttatttctctttagaaacaaaacatttcatgcattggctgtttaaaataagtaataagtaataagacaaaattaaggacattttaaaacagaaacagtagaaaactaaacttgatgaggtttcttaaataggtcacatgtattcaacatttatatttaactggtagattttggttaagtgatatatatattttgacacactctactttcaaaggaaaacttcagatcttgctcccagactctctctcattcctgatttctgtatttccaccacctctaccagacacctggatttaaagccacagtccacctcaaagccttcctctcacctgacccccgcttctaatcatcttccaaatctggtagattctaccactccctgtctcacacatagaatattagcataaccatataacctaagtcatgcttcacatgaatccactctgcccaaaaccttttagttctttattagtgccatgtgagctgcatacaaactcatacatcaggtattaaggggccttttcaattgggccagtgtacattttcagccttacttctcaccactgtaatctggtcccagtaacagtaaaaccataaggccttaagccacatgcctctgtgcttagtaaccctttgctcattctgttgtctcaagctaaaaggtctcccgccactttccccaggaaatcttctgagagcatcttgaccagacatatcctttctcttgaagctcagtgtgacgctttggcatctctcgaccagaaatccttgcagttatttattaattgaatgtccactttgcccctactaagttgtttctcatgtgggttgaaacatgtcttactcatgctcaaagcccctatggtagccagagcactgccttgcacagagtaagagctcagcgtgctctaaaaatacgtagtttctgtctaaagaagatactattgattgagttacagcatcatggttccctttattataccaattactttcaaactcaaaaaaatgtctgttagcctcaaatgtcatcatggaaggtagtaatagcgcctcttggaaacaatagtcaacaggtaatccttgaccattggcccatactacacacttcattgcaagacatttcagtcattggtttaaaatactgctagctccaggtcaaggatgattacaataaattatttagttgctattggtatagatagatagatagatagatagatagatagatagatagacagacagatagctagatatagtgatataaagaaacctgaaaaaagtagcatctattgtttttagaagaactattcttaggacattgacatttggtatgtgacaaaaacaaaaaatttgttattggcttaagaactgcttctctaaagtgaaaataatatgagaggcaggatgagcatgatgggtttttgttgctaatgttgttgtgtgttatatgatgtccctaaagtaactgatactcaattataatgttcagctttggagttttatggtgggtatgtcagtatatggtgggtattcagctccaaacaatggaaccctcaactaaaagtgacttaaaaagtaaggacacttattatctaacataacaggaagtagacaagctcctcaaatctgatgaattcagcgacaaaataatattactgagattccagggattcaggctcctactatatttctgctctgccatctacagactgcaccatcatacagcttattcctcttgaacttgctgctagtaacatctgaggctgcatgcttccttgttcatatccaatgggacaggatgaacggggcctcatcctgaagaagtctctcctttcactctgtttggccagtttagctcaacttcctacctcaggacaagcagctcatcaaaacaccaggcacccatttgcttaggcttagatttctagaataatgcctaaaatgaggatagaatttccatgattggctatgactgattaatactattttaggggaagcgtaaattaccaaaatcatactaatactctaaacacatgaagaacggaaggatggaatggatactgcggagcaattaataactgcaaatatggactggcattattgttcaaataatgaagaggactgacttcaagaaactacaattttttaaatataaaaatttaatggatttctacatttattgagtgagattttgtcataaacaggtactgacatttcccctacagaatcatccccaatgaagaaatgtgacatatttaatgtagattgtaaattctatgaagtcagggaccatgttggtcttcctcagtgctctctgaagcttagaagagggcctggcacagatgagatgttcaaaaaccttttctgcttgaacaaataaagataacaataactttcattaaacaatggacacttgcattagaacagggtatcacactgaggaggagggctgggtgccagattaatttaactataaaaggtatcaaaagaaagttttcacaagccaaactaacaccatagacaaaaaccacctagtaagtgcctgctatgctccaagccaaagattttctagaaccctagcaaatatccatgacaatgtcatagtgaaagaaatataattctatctttgtttttaaagaaggtagcactcaaaccacttccaattatgtttgtgtgaaagctgacaatttgaaccataaacgctgctttgatgtggcatctggcaagtgtaatgttctcttctcataaggtcttctatcagaagccactttagatattcccagagagacactgcacaggaccacagataaaccagacaaaatgtgttcttctggatttccctatagtttaaatatatatataaagagattaagccaaagttgttcccctctgagccatcatctttctgcagactttctggataaatgtggcccagctgtctcactgaccttgcaggacactggaacttcccgcttccaaatgccatgaagcagtccaagaaagagtgcttctctaaatttgcctttttccaacgttcctgtgggaagaaaacatttttttttccaaatcagccttatataaataagcttaactttatttctctaggctaaaaatgaccttgtacagctaatccttgcatataaagttgcagggttgttggtaattttttccaccctgttattaatattagacacaattgtgtttctggaacatgaacttataaataaaaaggtttttaaaaaattctgttaagtggtaaatgtaaatgataaggtaaatcaaccacagaattgacctaagaagaggaagaatatttataataaggtctcaggctccgtcataaaattgctcttggtaataaatttagtagtaagacactgacatccctgcctgttagaaaaagcttgggatgcagaatgaatgcatctggatgccatttttgacagttttacctaaaggcagagaacagactaaatgacctcttaacattctgttcggccctgtaactttccagttctaagaaacagcagatcacggttttaatttgctttatttgtatttttttgtactccttggaaaccaatgacagaagcaattgcctgaagaacatgaaataagtcttctatcaaaaacaggcttattcacttgaacatgcccttctggtttcatgtaaaatgtattttaaagttagagaagtttactacaaaaacttttctaactgatttgtaaatgttgcactatctatattgcaaatctgttctgtactttgtagtcaactttgttcttagttacgagagaaatatggctgcttaattatatagtcctaattaatttctgaatttacccttctgaaataaaaagaaattaaaatgaaagaataatatatactgaaagagataacttacaggtttgaacaattcaggctcaggaaaatactttggatttctatgcagccaaaatggagacaacatcaacaagtcaccagaaggaatgatgtaattctataacagaaaaatcagctgcaaatcatttttttgaaatatactttaaagagaatttgggccactaaaaatgatgctacaattatattgtggtgaagatataccttttataattgaatgtgagaaaatctaatttttaatatctatataattatataatatctaattataaataatataaaatctaataatatagtatctatataattctgatttccatatacatatatttggttacatagaggaaattatataattctgattcacatgtacatatattcagttatatggaaggaaatattagctaaatgtcaaaattttagaaactagtataagtcccttctaatgtaccttttgatgtttgatattagggtttgtggccagagttcttgaaggcagaaactacagtggaggctcaggttatgaaacagaaaaattggactctgagacagggacaatggccatggtagcactgagaagaggggcagaggatgtcctgttcttgtggatactaatgacagtgttagagcaggggcagtggacttttctttcctcagtccagcaccggttattaggaaagaaacaaatgaaaaacgactggttaggaagacacaggaaaaggcaagtgttgtgtatttgtttggttgggtttgtgtttggggtcacagtgcttgtggaaatgaggataaacaatgtgtttcctcaggtagtctacattatccttcctgattcatatgacaacagattttcatgatctataaactatacaaagaactaaaacccatttcacaaaatctccctatcatcaccatgttcaggaatcacaggacaaagagatctcccaagttttataattgctagatagctaccaactttactaaggtagagatattttattaggtaattcccactgcccatcatcataagccacatctatttaaccgtgtataattttgaaatgtcctcaagatatttgaaaaacttttactttaggtttacttatccaaagcataaacaccttacaattaaaaacatgtcttctgctgggtgtggtggctcatgcctgtaatcctagcactttgggaggccttggtcggaggatcctttgagctcaggagtttgagaccagcctaggcaacataggaagaccttgtctctacaaaaaaatgaaaaatattagctggggatgatggtgcacctgtagtctcagctacttgggtggttgagacaggaggattgcttgagcccaggaggttgagggtacagtgagctatgattgtgccactgtactctagcctgggagacagagtgacattctgtctcgaagaaaaataaaaatatgtcttttactggtagctatgagtggagtatgggtagggatgtcatcatttttttaacccaggagaacccctgttggctctagtggcagctgagtattgcttgagatttggcaatttcagaactgggagagctggagagactcaaatccaagactgggaagacagtgaagcttttgcaggtaccttctatcattttaaaatagagagacctgtgagatcccaatcctgtctgttttacttccattggaactgaggctagagaggtcattactgactctggaatcagccacagagggccgtgatgtgtatttgagagcagggttgggggcagcacagggatgggccttcagtcaggacaaccacagcccttccccttcccaccgcaaagtcctcttaagttgctgttgacctgtgatcatgacttggaggctgctgactgttgtagcctataaagcaggttagcaaagggaggagaacttcatacaggtcctcagtaacagaattaccactagcaacagggaggagacaagaaagaggtgcctgttgcagcagcagcaactgccagactgataaatagcatgaaggaatgaatgctggagctggttctgtcaagaaaccctctgagcaagcagacatcatcacgcccagcctaaacagtccctatctttacttacatgacagatgaagtgaaagatcaagagggaggcaaaacagttgcagaatgagaacacagatcactagcaaagggaagctacaacttctgtgtgttgcaagaactgcatctctcaggtagacagaattgagcctggccagcccacctcacctggatggtgtgaagccaaaacaagcttcatctgataatctagaagtggggctttctttaaaaaaggaagagaaggcaggactctgtgttgtaattcaagaaaggtgctcagagctaagtgggtgccaggaatacataatcttaaagagaaaggaggagtccagaggcaacacatctatagcaggaggtctaaagcacacagccttttctcctagctttcaaccagaggcttggttggtgtttgtgccgaaaaaaaataaaaacaaaataagtattttttaaattaaagagtatattcttttgtatgataaaaacttatctctacaaaaagtttggaaaattctgaaaagcagaaaaactagaaaagaaaatccagagttctgacacccaaagacagtcattaactagctagatttctttccagtatgtttacttagtattaataggagatattttgttgttgttaaactttaaacatagttttgatcctcctgaataaccaatttaatctttcttagttctcttaacttcataacctgttttccctttttattgtatattcatggtgaatatttcttcctccaatgactgtttaatcttccattgggtacattaaacaataattaatgtaatcattccctactttttttcctgtggtaaatagtgccaccataagcactttcttccacacagcatttttccacatagattctgttaacacagatgttcagatgacacaggacatgcatattttaaggctataaatgcatgttattcaactgtttcctcaaattttgtagcaaaatatatttctaactataatttatgagaatgtaagtttcattacccttttatctgtaatctaacatttctaatggttgttttaggtttacatttttatgtttttacatttacatttttatgtttgagagtttttccatttattttatcctataaacttttatgttctgtcctgattaacctatgtgacactcattcttattgatttgtgtcagttctttaaatattaaaattatttatagttgtgttgtatattgatgtttacattatattcacatttgagttacacttttaaaaaatgagacattaaattttgctatggtacattcaaatctgtttatcctttttgtggcttcattgattaatcttaaaatcaggcagtcctcttctttttataaaataaatatagttaatgttttagaaaactatgtatcatgttagcatgtaagaggtttttgttattttaaatgaatcaccaaattaatattttaacaatttctcagtttaaatttaaaatatagctaatattgatagatttaaaatagacatagacaaaaactctttgggatcttcaataattctgaagagtgtgatgggatcatgaaaccaaaaagtttgagaacttctacttaagaagtttaaaaaaaacccacttttagtcagtcatcccaagccacatattaatttcttccctttacattgatttattaaaagagtcacttatcctacattaaattattatgtataaggaagctaattctttgttatctttccagttatttctattgatctgaacatctggtctgacaccgggatcataacattttaattcttttggctttataacaggttttaaaggataattaatatttctcaattactcatcttttccaatactcttttttgttactcttttctggatattcttgaagataaacttttctactaaacatataaaaccttgaaaagagaacacaggtagaagtttcagagttttagaaaggtagcataataaagagaaagaaagaatgcagtaaatccaagaaagtagagagtgttcgtccatttcaattcattccatttccaggaaagggcacagaggcaaaagcaaacaaagagagcctgttcgaactaccttagggaagggtggtgggagaatacttctagtatgcataaaaaggaacattgaccagttgcccaacagaggagaaaatatgagcctctgtcattactcaacatagataagcccatgtgaaatgtgttttaaaatacaaatttctgggaacatatcgttaaacttcagttcagcaaaaacattccacctgtttttgaaaacatatgaatcttgaaagaaccaaattgtatgaatttatactaaggaaataattagtaatgtatacaaggatttagctaaaaggatgttcatcttcacactgtttatagaagtgaaaaattggaagccacatacatatgcaagaacagggactagtttaaaaatgtatactatatccatatattagatgactttgctaccaattcaaaattgtgtagatgtgttttattaaaacagaaaacttttcagctgagcgtggtcgtttatgcctgtaatcccagcactttgggaggccaaggcgggcagatcacctgaggtcaggagttccagaccagtctggccaacatggtgaaatcctggctttactaaaaatacaaaaatcaactgggcatgatggcacactcctgtaatctcagctacttgggaggctgaggcaggagaattgcttgaacctgggaggtggtggttgcagtgagccaagatcatgtcactgcactccagcatgggcaacagagatgcaaataattaccacattaacataaccacaaagtaaaacaatctaaattctgaagagtcaaaaactactaaatatttatgctttcaagaaaatggactattatgtgaccactgaaataaatgtgaaaactctctagatgcataaaaagtgaagaattagtgttaaaaaaattttaatgacagatttacactatgctgaaactttggtttctatattaatgtcatacaaagagaatattagatagttgcggtagtacatttaagaggttgtgcagatggggtattgtgcatgcaagagtatacatctgtgtgcatgtgtttgagcatgggtatctcttctggcaaagttgtcaaaataagtaaaattacttttgaaagaatatgggaggttaatagccccaacaaaagttacaactccctttataacataatcctgactaatacatgaggttaaaagaccgtggaagagctacttgtaggttgtagtgagctgagattgtgtcactgcactccagccttggtgacagagaccctgtctcaaaaaaattaaaataaaataaaaataaataaaagtatgaactgttgaaatcccacaaaaactaaatactctaatttacataaggtcagttaaataaatcatgtctcctttggaagcaaaagtttcaacttttacaaaatttggatttttatctgtgttctattacaaaatttccttggtttgaatccaagcactctcaagctgcatataaaaaagcaaacaatagtagaggactgattaaatgtgatccatttggataatgcaggccctaagtcaaatcatttcaaaaaaaataatttgttatgccatattgattcacaaatatttaactaataagtctgccatgtgcacataccctttcatggtgcacttgagaatttcctcctactttgtccatagaaaatcctctcaccttcactcagctgctgcctcctaatataaattgagattatccaatatattcctgttatctgttcccatatctgtaatctgtggcctaaaattgtcttccagctatgcaaaataactttcttcacatcctgaattccttagctcattggtgctaagaaattcatgttggttgaatcagtagacaagagaccattcaattcacctgcctgatttaaataggattatattgattctgattcagaatcagatggccagaatgattattaaagggttattatgttttacttaaagtacttgccataagataaatatctatattaatgaaacattgctacacaactcttattaataacctgttctagggtcattttgtgctcaatggaattcaagaaattacataatatatgctatcaaaattctaatgacatttttacagaaatagaaaaaacatatgaaactacaaaagacccttgaacaaagaaaaaacctgaatcatcacactatttgacttcaaaatatattataaagctacagtaatcaaaacagcatggtactggcataaaaccaggcacatagatcaatagaacagaatagacagccccagaataaatacacacatttacagtcaattgaatgtcaacaaaggttccaagaacatacaatagaaaatggacagtttcttcaataaatgatgttgggaaaactggacatccacatttataagaatgaaattagacctgtatttcactccatatacaaaaatcaactgtaatagattaaagacttgaaagtaagacctgaaactgtaaactaccagaagaaaacatatgggaaaagaccccatgacagtgatctgggcaacaattttttgagaatatgaatccaaaagcacaggtaaccaaagcaaaaatagaaaaatgggattacattaaactaaaaagcttatgtatagccaaagaaacagtcaacagaatgaagagacaacctaatgggggaaaatttttgcaggccatacatctgacaagaggttaatatccaaaatatacaagaaacttaaacaactcactagtaaaaaacaaaaacaaaaaaaatgatttttaaaaattggcaaggaatctgaatagacatttctcaaaagaaggcatacaaatggccaacaggtataaaaaaatgctcaacattactaatcatcaagaaaatataaattaaaaacacaaggatctatcaccttgctcctgtagaatggctatatcataaagatgaaagataattgtggaagaggatgtagagaaaagggaacacttgcacactatcggtgggaatgtaaattagtatagccatatggtaaacagtatgaaggttcctcaaaaaattaaaaatagaactactatatgatctagcaatcccactactgggtacatatctaaaggaaatgaaatcagtatgttgaagacatatctgcactcccatgtttataaaatgtatatatacataatggaatactatttaacctttaaaaagaaggaaatgctctcatttgtgacaacatgaatgaaactagaaaacattttgttaagtgaaacaagccaggaagaatgacaaaccacatataagtgtattttcacttatatgttgaatctaaaaaaagtgagctcagaaatagagtagaatggtagttaccggggattgaagggtaaagaaggggtggaggaggacctggagagatattagtcaaaggatacaaaacttcagttagacaggaggagtaagttcaagaggtctattgtataacatggtgactattcctagtaatgacatattgttttcctgaaaattaccaagagaatagatttttagtcttcttacacagaaaactgataagcaagtgaagtgatgcatattttaattagtttgatttagccattccataatgtatacatatttcaaaaccacatgttgtacaagacaaatatataaaatatttatttgtcaagtaaaaataaatcaagatatgtcaacctgaaaaatatatgtgggcaaaatgtgtactttttttgtagaaggttgattcatttaaaaccaaaccaaagcttaccaaaatttccacaggcttcaccacttttctagtaatgacaccaggagcttttaaacgaatggtttccaaaacacaccatttaattagaaggagattctccaggtcatcctcagacactttaatcttatctttgcctgtaaaaaaatttttaatgagaaataaatagactacagaggtcagaaagtgatttcacgtaagctcatcagcagaggttagatgttgcctctgacagcaagtaaagtgttcctattactattacctattacaggtttagtcattaattgcctctttttctttatcacttttctcttgacaaggtaaaatgtatgacacaaaaaactaagccaatgttgattactgtaatgtgatggattggtatccaacttaggttcccacagtcttatagctatcaaatagctaagacagtccttgtcagaaaggttttactcatctttttcttgtctaaattctcattccacttatgtaaaaagcaataaaagactgacatcaaaagcacaaagaaaaagatacgagaagccatccggcctttttcttctgcctttacccttttgaattgcttttttttttccccctaaatcattcatttcaaaaaaacaactggaaaaggggcaatggggcacaagtatctgagctggaagaatgaagatgccctctaaacacaggtgcatcaaactttcttaacgtgatgtgcatactttatttgatctttagactgaaagcacctgaaaaaggagggggtggggtggacgaagggcatcaaccatcaacctttgtaccatctaaagtaatggcaggaactttcagtcaaattagacagtttagttaacaatatttcaagtaaaatgtttgcattttgaaaattacttgaaacaactgcgctttcaatttgtttttgacagtatttgcttaagaaaagtcaacaacaatattgtcagtttaattaagtcaacgcatttctctttttcacatttgctttcagaccatcttgggaatgagtgggtaagagtagaactagggtctccagccatgtctctctttgactctggatgaggcgtgttcaaaagcaagcccattttgcaggaaaaggtttattgggtgctgcctgggaaaccttttctgtcagtatagatagaattcctaaggagtcagaagcaaacacctttggttagtggagtctaggaacctatgaactccattcaatctgacagattcttaagtaccacgtagggaccaggagctgagacaggctgtaccagtattacaataactaaggcgcagctcttgcttgcaatacacttagtctactaggaggtaagagacaagcacacagttgactagtacaacatgtaggcaaagaaactattttctaagatgtaaaatattctaaggtagttaaaagcagatagggttcacagctaaggtagtttaaagcagatagggttcacatccaactagatgaaaaagaaaatattttatgaatatatttctctaaaactacaaatatgattagtttcttgcatagagtcaaccccagtatatatatattaaattagcaaatggtccaacttcaacatagggaggtgaatgggtggatattttaggcaaagaggaagaacaaaagtaagactgcagacaacatgagtacatttagaaaatggcaatgggtccagtttgcccagaaggtgagacatatgtgatggaacagtgagagatccactaaggccatactacagacgatcctaaatgccattctggaacatccggaggctagagaaattggaaacttcctgtcttaggctgagggagtgttaacacctcaacaatgaaacagtgatatacagcactattctgtattaaattaagaccttcggcttatttgctcagatctgagcaatctaatattaaaaggagataagcacttttatgggatttttgttgtaatctctgcaggcattgcccaacaaaactgttggttttccttttccgtaacaaagattggaaaacaataagtatgccttctgcatcttcacaacctaaatgccacagtttttccaaattgtgttctatgaaatatttgcaagatgtcaaacgtatgaaggaggaaaaaggttcatgggcaaccaaatacgaaaaatgctacatgttattggtgattcactggacacattagtgtattacaggctttgagaaatcctgcaataaaacagttatttacactgttattctcaaactttttgtaacatggaatctgtcttctaccaatatccatacaagcaaatcattagctacataaaagataactagctatataaattaggatacagattatttccaaggcaatcctccgaaaaagcaaaccaaccctatttttaatgtctgaagattactagcacatggcataaactttcgtgcacatggcataatctatgagtagttattaagaactaaaacatgatcaccaactgaaaactgtcttgatacaccatggaaagacaggggtaccatacattttacttagtttacattttccccaaactatcccaacattttctaaactaattcggaaaaataatttagaaaagccatggtcagaattctttatttgaaaagtggctgagattttgcatatgtaacagatatcattgctaaatcaaatagacaaatgtttggcattcactggagaataaagtgctaaggaaatataagaaatttaagttttggagatctttaccatcaaaaagactataagatgaaaaattaaagaaagaataagtgctttgtctagacaatgttaaaatgagaaatcctgaggttctaatttttgaattagtttatgaatgacacacaaacttagagcagtgcccggtatgtactaagtgttcagtacaaggtggtgctgatttactttttatttattattaccgttactattaatgcgaatttaataatgactctttagaaaccacaccttcctatctacttttactccatagctaataaagttattctttttcctgaaacctttattgggagaaaatttagagattggcgtgtggggttgcatatgcaacacgaattgggggccaggtctgaggaattccttccattatttgttcagtagatatctgcagagactgagaccctacaggtagtttgcaagtgctgagtatgaagatgtaggtcatgtctctggctctgaatagtctgatagagaagacagagaactaaaagtggttaatgcaataagcgctatcacattaaagtgtgcaactcgctataggagcacagcggtgacagtgaccagacgggggagggaggtgtcagagaggcttttcagaagaaaaaaatctgaagaaaaaatcagatacacaaaaataaagagcatgttcagataacaggaattcagtgtgaaatagagtctggtgtagcaagtgactaggtcaatcaactgtagatgcagatcagaacaagctgtcgcactggttcttggcggtttggtaatggatccaccctctcttccaagggtgttccactgaggttccagtctgctcataccagatgaatccagagatgacaggaggtatctttcccgctatccaacttctgaatgtaccccaagactgccaggtgtcagttctgggccctcttctcttctctacattatcctcctgggggactcaaacaaacccttttctataaaataccatcagtgggctagtgacacccacaataacattttttgccttcatcccttttgtgagctccagattattgttatccagctggcttctcattggctttgtttgcaggtctaaaaggcatctcaaagcaacactggcctacacagaactcttcacttgccccactgaaataaagcctttcttcccttggtcttgccatcgcagaaaatggtaacaatgtttgcccagctgctcaagttcaaacctaaaaatcatccatgataattctgtttgatattgtgatataataaatatatatttggtctgtggttcctaacacagatctcctaaaacctttgcaatttcttgaatgataggggagagaggagcatcttttggtattcatacataataagcccctttcttttcttttcttttcttttttcttttcttttttttgacatggagactcgctctgttacccaagttggagtgcagtggagcgatcttggctcactacaacctctgactcccaggttcaagcgattcagcctcctgagttgctgggattaccagcaagtgccactacacccagctatttttttgtatttttagtagagatggggtgttgccatgttggccaggctggtcttgaaatcctgacctctagtgatctgcccacctcagccttcaaaagtgttggtattacaggtgtgagccaccctgcccagcaaataagcccctttcgattacacctgactatgctaatgaagtgactcttggaaattaggggctagttgtcaaaggaaccaaccatgagatgagaggattggaactgccagccccattccccagcctctggggaagggaggtgggctggggattcagctagtcaccaatggagaatgaattaatcaatcatgcctttgtactgtaacttccataaaatccctcaataaaggggttcaaagagcttctgggttggtgaacacatgcatgtgccggagggtaacacacccaacttcagagaaagaagctcctatgcttgggactcttccaaaccttgccctatgtgcttcctcatctggctattcatgtgtatagtttctaatatcctttgtaatgaaccagaaatagtaagcatagtgtttccctgagttctgtgagcccttacaacaaattatcgaatctagagaggtggttgtggaaaactcccgatttgtagacaagttggacagaagtgtgaataacctggggctgtactaatttcaatgggcatctgaagttggggagagtcttgcgggactgagcccctaacctgtgggtctgtgataatgtcatgcagttagtgtcagaattgaattaagttctaggacacccagttgatatctgaagagaactggagaattgtttggtgtggaaaacccacacatttggtgtcagaagtgttgtgtgtagagaaacagttttcctttgtccttcctttccctttaactcccttaaacaatcagcaaaatttgtttttatttgcaaactaaatcctacttccatccacatcattccatctccattgctaccactcttgtccaagccgtgaatatttctcacctggtccagggtgacagccttcatcatgcttcctactcccacctggctcctctacaacccctttgtaaataagaccaagtcagtaccgtctcaggacccacgaatggcttcaataccatttagaattaaatccaacattctcactttggcaaataaagccgtatctatccctctagtcccatctcacactgaatcctagaggctatgtgacctttgtaaattatccaacctctctatgcctcagtttgcttacatataaaatggaaatacagaaagtacgtgcccacaaggttgctgtcaggattaaaagtgttaatacgtgtaaagcgcttaccactataattggcatgtggcaaaatctcaggttacctattattattattattattattattattattattatttagagacagggtttcaccatgttggccaggctagtctccaactcctgacctcaggtgatccgcccatctcagcctcccaaagtgttgggattacaggcgtgagccaccatgcccgtcctcaggttacttattattattatttcctctgccttttccaactgtttgaaaggctggatccctttcaccttttagctctcagctagaaattctcctctgcagaaaccctttcctggccaccccaactaacatctccctaatcactattatttcattttatttcccttatagttcctattaatatataaaataacccgggatcccccaaataggatgtgattacatgtgtttcagaatcttgttagatctgttcttcgatgtatatccagtatctaacacagtgtccagcatacagtaggtactctatatatttttattgaataaatgaatggatggatggatggatggatggatgaatgcatgtctaaaatggtggaaggtgaggttaattaggaagcttttaatttgtgtaacagcaatgggaggtatgtagagaagtcaaatttgaaagacgtttctgagggagaatgtaaaaatctttaagtaaaaaagagttagtaaaaacctgatatatactagagaagtggttctcaaatcttaagcatgcatcagcatcacgtggaaggcttgtgaaaacacagattgcagggatccaaaagtttctgattcaataggttggatgtggggcccaagagtttgcatttctggaaaatttccaggtgatactgatgctcttggtccaggtaccacactctaagaaccacagtgctggactgggcgtggtagctcatgcctgtattcccagcactttgggaggccgaggtgggtgggtcacctgaagtcaggagttcaagaccagcctgaccaacacagagaaaccccgtctctactaaaaatacaaaatcagctgggtgtggtggtgcacgtctcaaaaaaaaaaaaaaaaaaaaaaaagaaccacagtgctgaattaaaagaggtagaagacatccttggattttattattagatagtctaggcttaaagcagttattattgccaatttttaaattatcttttctattttataaaatgtaggtaaatacacttagtgggtaaaaattatgatttgaatcagaaatcctgactggatatattgacactgaaagccactaaatataaaatggggggggggagctttatttcttcttctgaacaataaaactaaataatgtgatgatcaattatgattgaatttttaactggccaggatttcataaatggttcaaaattatatcatttttacacctacaaaagtctggagcttacatgcagccacatatattggaccctattctccttctcccctgtatgcagccatagcatagggtatgagttggcaaattatggccaacagaccaaatccagctcactgcttgactttgtaaatgaagttttattggaaatgtgaaagaaaaataaaatctcaggaccacaaattcactatgccaaagggaaatattaagctggaactgcctttccttttgttcctaagcaaatagctacagatagaaggccagaggtctccacaggtagctactctatgtttacttatataaattgaccattttctgtgggctagatgaatatacagttgactattcctctatcacctctttcacatgtaaaatgtggattcagtgaacactgatcaaagacccaaaagaatgcaagcatttgccccttttatctaccctccttccttttttctccccttcctctttcccccactgcctgttcttcctcctttgaacatggaagtccccaaactctctttggaaaaagcaggactcacaaatgtccctgtggttttgtattcctttttcccgggcacatccttaaccttggcaaaataaacctctaaattgattgagacctgtctcagacactttttggtttactcactcgtttacacgtctatggctgttttcacactacaatagcagagtggtgaaagagaccttatgttccataaaggctatgtatttactctctgccttatatagaaaaagtttgcccctgcctaggggacatcaaggggacaagctactggtttgctcctcattgtacttcctattgcttagaagtccagattttattccagcatttgaattttacaatactataaattctatgtagtcttcgctgtacatatcatttatataaccaagtcaagtatacaatgcctagcatagtatctggataaccctgtaaaatatgcttattttacaatatgctttccctaagaggtagtctatattttacaaggaaaatttctttccctgagaggtagtctatattttataaggaaaatgtctttgtttagaatacattataatcatcttcgaattatattcacatacccagagggcacatgagagcaaatgttaaggaaatcaattccctgatactcaacttccatattcactcttttctaaaactgatctgttgaataaaagactgtggcccaattctcttttcccatctccccaatacaatcaccttttcctgactttacgatggaatatcttgcctctcagctatcccgatttttactctagtgctttttccttgaggtataaacatctcttggctgccaaacaaaagggcaattagataacacatggaacctaagggaaaagcccttgagagcaaagtaaaacaggcacaggaaagaaataccaaaagcagacatgtcttctttcacctatttgtccactagtccttgcttacaaaccatgtttgtccacctgatgatctacgaatcagaattcaaaagtgagatgagtgtcacagcaacacatattaacatgtttatttgaattgaaagaatgaaatcagaccttttctgttagaagataaattggattggatgattagtttggtaataagaactggctttgagaattaggttatatggcacccatttttcataactgagtgaactataataaacctgtaacttttgatatgtattttaaatagactaagaacatgtagaaaatataccaggaatgatatcctttgcaattacttaaacataagatagcaactattagacatcaatttaaaaatctatgaggggatacaaaattcttctagaatacaggtatccaatcttttggcttccctgcgccacattggaggagaaagaattgcattgggctacatataaaatactaacactaacaatagctgatgagcttaaaaaaaaaaaaaaggtccatgcaaaatctcataatgttttaagaaactttacaagtttgtgttgggtcaaacacaaacctcaaagccatcctgggccacatgtggcctgcggacctcaggttggacaagcttcttctagaatgtactctagaaaaagaaagcaagaaaaccactgcctagcagtatatatgagaagatgaagtcctatgttagaacccctgaatgtccatggtgagacaaagggagagtgagcagctttgcacaggaagtgaaaggcaactggggctgccagtgtgcaaggtaaggaagacaaagctggggatttccaagaagagagagggcccagcttcaatgataggtcactgataacctagtagagtgtcaaggaaaattctttggcagacaggacttttgtttctgactgcaatgtaatttttactttccttgtcccatatttttaatattttaataaaatcagctaacattaacttaacactttgggaaataaagagctggaggatgtccagtgaggcaatgcaatgcagaaaacgtggcagacacgcagaagggaaagagtttagaaattgcaaaatcagcaaatgcaggaactaggaatcaagagaaggctagaaaaaacacaagcctctacctcttgcctcctctcccatttctccctccaaagataattagaaacctgagatggggtccaaacaatttacctttattttaaaaaccaaggtggttccagcaagctagggcccttcacaaatggacattataaataaattagcagtagcttacaatttaaattctagatcttacttttcaaaaaatttgttttctctcaaaatctatttacagcatctacactggacaaatcaatcaaacaattcctctactttttttctattttattttactgcagctataggatgccgaaaagaagtatctttctacttgaccaaggataggtggcaactacggtcagtttgtgtttgaaatcagatctgtgaaaatccaagagactccacagtgacctacatattgcataattctggtcttggaaaagtttggactctagtaatggtgaagttcttgacctccttcagaaaaacatttttggataaagtactcttagtaagttaaaaagggtaaaacgttctatattaataatatagaaacagaagcttgttttgaattgaaaacatttaaaattatgacctataaatgtattagagatgtagcctacatttggaaaataaatattttgataaaatatttttagtttctcaaatgtcagtgtcatgtgagaaaaataatgtagcattcttggaccatacaaagaaaaagaaaaggaaatacactaagttttcgaatgattctttagtgtaaaagaccttttttactatgactcttagaaatagctccgtacccatactgtgcatacttcaatgcacatctgtgatttgttcttccagcattgtgactctaaaattagaaggcttcacttggaagaatgccaaggtaatcatgaaaagggctacagtctaatggagacagggaccagtacagatgacagaccaataaagaaactgagtgatttgggctaaaattcagaaaccatctgtttaactcttggcataaacatgatgaaggcaaaccttaggatgttgaaaatcaagtaaaagaaatgatgattcttgcgttcagaaatagcaaaaaaagtttataaaacattatacatagttttaggattgcatactcataatgatgtgtattataacacattacatatgttatatttgttaataattataacaaattgaaattctattactttagccattgattcactcaatgtaaatttgctccatatctgttatgtgctagcctaagcataggtgctataagagatagggaggaaataaaactaatttattgcccatctaatgtcacaaatattttggatcacttcatttattcctcatagatatctgccagctaactgagcctcagagaggttaaaatgttcaaggagacaagcttgaaagtatcagagcagccttcaaacctatgtctgtctatactgaaagccttcaaccttgctactacgccacattgcttcctcaaagacaagaagggaatgagaaacacacggccactgccttaaaggatcctggaaacaagaacacacacaaaaaatacctggatataaatatctctaagtttcatataagagaattcaagtgtctcttctcacttagggctgaaatttcaactaagcctggaaggatgggttggagtcagaaagaatgctaacttaaattccaaaattaatcacaaaaatttcttgggcttaaaaaaaaaaaaagaacatgagtcaaatagaatcactaaaggatgtccttctttgagagatggcttctctagctccttaatatttcaagccccttccccctacacacacacacacacacacacacacatgcatacatgcagacatagtaagtaaataaataaatatacatataattgtttctacagctttgaagtaatattcattaaaaatttaactaataactttggggaaataatccatgttttgccagaaaagaaggggaatggtaggcatttactaactcattcagacctttggaaacataatttcaaggagactgaaccagaaggtggggttgcaaagtggagttgaatactgaggaaacccctgtgcttctccaagaatgaaaatcagaatgaaaagatgaaaaaaatgcaaataataaaatccttccaagatttaaagagtgcaaccccaacacagttcaccacctctttcattacttttgaaagcatgaattctcagtgctgtttgctcctctgtgtcatgactaagttttccttctcagaggctgcctttccatattcctagaacagcttgtttaaaatatataaagttgaagtgtgtgcaaaagatcatagtgcacatgaaggagaatgaacttggaataaatatacatgagataatagatgaaaaacaaacaaactgattcaataaccttcagcaatgacttctatcaacatttggtcaatacatctactcttcaaattttacaatagtaatatcttcaaaaagtaaaaaccaaattataaaaaattagtgtttatactgtcacttcagaaaattattcaatagttttggaaaatatatagcatttgtatgacttctatgcaaaaataatgaagcaatgacaacaattcctgtgagaaaataagggcagaaaactgtaactgttcagatttctggcttattttctcaaccagagacctccagataagattctacaaagtcagtttttagagaacagagacaaagctaaagataaagaataaataaaactttacaatagtcagtattctagagtgggaaaaaagagacccttacatccttcccttcatttcaggaatttttaaaacttcaataaaagtaatgttcagcaattccattttttaaaattatatatctattttttaataaaatatatactcactcttacggaggtgataatatctgaagtagataataccattcacaataggttttattttatttatttatttttttttttgagacggagtctcactcttgttgcccaggctagagtgcagtggcacaatctcggctgattgcaacctccgcctcctggattcaagtaattctactgcctcagcctcccgagtagctgggactacaggcacttgccacaaacccggctaatttatgtatttttagtagagacggggtttcactatattggccaggctggtctcgaactcctgacctcaggtgatccacccacctcggcctcccaaagtgctgggattataggcgtgagccatcgtgcctggcctacaacaggctttataacagttatttatagatagcgagaatgggctggttacagatttgtgggaatttttttgtgagacgagtatttgttgacttgtctctaaatggagaaaacaataaacacttttgtacaattattcttttaattttgaaaggaaatagtgtgaaactgatctttgattaccgaatagaaaaatcaattttagggccaggcaccgtgggctcacgcctgtaatcccagcacttcgggaggccgaggtgggcggattacgaggtcagaagatcgagaccatcctggctaacactgtgaaaccccatctgtgctaaatatacaaaaaaaattagccgggcgtggtggcgggtgcctgtagttccagctactcgggaggctgaggcaagagaatggcgtgaacccgggaggcggagcttgcagtgagctgagtccgcgccactgagtccgcgccactgcactccagcctgggcgacagcgagactccgtctcaaaaaaaaaaaaaaagaaaaaaaagaaatttattgggtacctaaaatcagtagacagtaaatgtgattttcctaacatcaaaaaaattgatttatcttttttgaaaagagtagaatgggtccctggagattagttatgtcttgttgcctcagtcagagagctcacagaaacctcttgaaaatgaagaaaggaaaaacagaaggaggtccacacagggaagctccagagctgaggacacatatgtaaaatataagctattccagccttctttaacacacaaggcttgtgctatcattccaagcaacttgtaagcttactgtgctgagagacccttcaaaaattcaatataaaaatcaatactctatattacctcccaaatattgctttaacaaagaaaaatgatttactatttgggtttgttgtttcttaaaaaacttttatctcttttgtaattgcacacgtttattattatacatgttgtgtaagataaaatatctatgggaaagataataagtcaaattatagaaaattcaaggaagaggggatgacagcagatgaaagatcatgatggtagctgtgaagttaaatgtcttttcactcaccgctatccccgcaaattctttataggttctctccattgagtgcaggtttctagaatattaattctttccaaatgtagatcgtttgggaaattttgtcttgacaatgtgaaacaattttttaaaaaaactatttacccacagttttagttttgaaagagaagattataaagttgatttttattggtaaaagatacacaagggttatgtggatcaattgtttttcctgtgccaattgtgtactcttttgttatagcagttttataataagctttaataacttattaaaatctggccttaattagggtgaatctggccttactaatttacatttcacgtatacaaagagatggggtctcactttgttgcccaggctggagtgcagtggcactatcataaatcactgcagcctcgaactcttgggttcaagtgatcctcccacctcagcatcccaagtagctgggactacagatgcatgccaccacatccgactaaattttattttttaattttcatagagacaatctcactatgttgcccaggctggtctcaaactcctggtctcaagccatcctcccatctcagtctcccaaagtgccgggattacaggtgtgagccacggcacctggtcacatttctaataatttttatttataatcacagttatttttctatatagttttaaatcatttagctaactacactcccccaaaaatggaattctcattatatgtacagtaatctgaaaagtgtattttcatattaaatcttcccatccaggaaggtgatatgcctttttctttatttagattgttttaaaacatacatattttaaaaatcttgtagtttcctccatataggtcctgccccagtctgatttctttatgcaagagaaataccagttaaatgaataggaaggagagatgtaacatgagaaggaaggcttaaaaagcagcttaaagtatctgtggtgaatacagactggggaaagcaaataataagcctagagattgtccatggactctgggaatatgagcactggggcctcagggattgtagcagtagcctggcaaaccacacatgtttctactctcctcctccagccaccagcttcttccaagcatctcagtcatttctggccttcagctctagttctgacttttacaaggatggatatggccttttggcatgtgaaggatttaggataagattttattatcaaagacatattcctattgaaaaattacaagtaataaccttttggaagtagatcctgctcagctgtttcagtttgacattcataacaataggcaaagcctggaaaaggcagtgataacaatggagtgcgaaagatatgaaggactgactgcaacgtttctgagaacaggttattacatccaatggaagataaggagaattgacaggctgaccctcccaactctttcttccatcagtacgtgcacatattaaatatcccaaatcccattctatcatgtcaaaagaagttcaatgccactataccaagtcaaccatataagattctactctgaaaaataatatttggtgttattttaagaagtgcttctctcatattttaaaaaagagattatcaatttctctaactactggaggacaaaaatggagcatgcctcataatcatgattttttttcaaggaataaaggatatagtccaatacatgataaataaaagggagagaatattgcctaaagaagataacagtgggtagataataatatgtgaaataaattttgatctagaaatacccttatgtataaagccagtgtactgagtctgagtccaaatttttggtttatgttctctggagagatgtcagcctgactttaatagtttttaccttagtatttcctaaagaataaaaaaaagattatccaaatgtttgaaaaattcaccaacagaatgctctgaagaaagaattgtgtctaaatgaaaaaatgtagagaacaaataaagcagatcaacagtgctgccccagaataagatagtgaaagatttaaaatgagaggcaccagagtagaacctatctccaagcttataaatatgaacagggatatcaaataatctacagctatcagaggcatctctttcagccactgaagctaagcaatgaaaaaggagagagtgacttcacacaaaatctcttgagctagggtatcacaagacccactttgggtattaaaggtagaaaacagtggaagaaataaagcttcctgagaaatctctcctgggccaggtattagacatgcaagtctcaccctagtcattatggctaggttagtagataggaaaatcacaagttatgagttccaaaatgacatcatcctgatcttcaaggccaagggaataagaagatagccaaactgtatatttggggtagaaagaatagtttcaaatgaactttcttgcatttataaatacttttttaagtaatctatatgtggtcttcaaggttgataaatgagaagtagtttgtaagaagctcctccataatctacaatttcctgggtccattcttggattttaaaagctaggctagcaaaggtaaatgaggctatgtgagaaatttcctgcatgataagctatagcctcccgaatctctgtgttaggttcataatgtcaggctactggtgggaatggagataattttttaaaataaaataacttccttctgttcacaattccactggagcgtccttggctctgctccttgatctctttcttcattattttgggcaatgcatcgcacaaggggccaagaatctgtcacagacacaactttggccatcagccattgggccctggcaggctgcagttgggtagtgagcatgagcttaagttcactgaagggactcaggtctacaatatgccatgatggagtcctccaagaaggttgttattggttggcaagatggtgctgagacacacccaagtgaagggaagctgcatacaagttataatatgggtaaacaatgacaatatataagatttcaagaataaatacagatgcttaaatgcaataaagtaaaactaatcaactaattaaaataaagcagacaatatggagtttacctagaatatcacttttcactttactagtgtttatacttgtttgtatttatgagaagagtcagacgctttcctcaccagtgtataacgtgtagctacctaagtcaatgtcaccaggtaacagacgctggccatcccacagtgttggtatatccctagtcaggattgctgctaaatcaaaacacagtggtaccaaaaaccactgttgattggctctgagcaaggtttctctttcatccacaatcacacaattagtgagtgacaagattgaaattcatgaatccaactgctaactctctaatccaatgaaaattctgtatgtgccttttatgatgcataaatcatgacttttatgtaaaataggaatcatttctatgcaggtgcatttctattaattaatctggttccttgcaaattaacagaaaatgtttattaatttattgtttaaataaaggcaaagtaaaactgatcagcaaaaaaataaaataaaatgggtgcatgtgtatgctatcctatgttaaaaagcataggtggaaaagtcaaatgcaaaagtgaaaaaaattccagcacatttttatttgtttgtttttttttttaggaaagaatgagcctctattgatgggcagattctcacagtgggagccctgaattagaaatgaaaattactttataacacagcctacacaggagctaaacattaatgtctttgattgctttaggtcagttacccataagtgtgagtacttacgctgtcaattaatcttttacaatctggtattactttagtagttattttgaaaaaaacaaaacacaaagaagcaaaaaaaaaaaaacccaccacatctaaatatgtactctaaatatttaaataaaattatattttaattaaaatagaaaggtaaaccataatggtaggctgatgaaatcctccttaaacaaattaaaatgtaaatatttaaataaataaaatggaatctgtgatactaaatagcttaatgtcaaagtaaaaagatagataactttattcttcagctctgtggatacaataatattcaccatattgagaatacataaaactctacaggaggaagaaatgtctcagtggtgatggaagccattacatcttctcctctttatacatcctctctaaataaggtaaataaactaatggcaaacaccaccattacttttgcaccagccaaataacttgatttaccatatttagagaggacatacaaagaggagaggtgtcatggaagtatatccctagtccttccgagtttccatcacacaagaaccggctggattcatggctttcacagttctcttttcacctgactttctgcttcctacagacatttccaatgtaaaaagtccactgtacattgatcacagcataaaatctggatagatgtgtcttttcttcttcatcttaccccttataccaccacaggagagtatgctcattttctcctttggctccattcacttttcctgatagctgactttgtcacttctacttttttctccatattggacattctgatcattacactttctatattttatcagcaagatctgttagaggcaagcagcagaaactaaacctagctgatttagtaaaataataataatttattaaaagtttgttaagtagtttatgtaacttttaagagggctggacaaccaggcttgaaggatgcatagccaggaatcttgctccaaatcaggccacagaactggtctggcaagcatgacactgccactgatgtcaagtgcattgtggccactggcataggatactgaatgacgctgtgtccccagaaacttcatcctgcaatacctgcagttgcttccagggaaaattttttagtctccatttctttatttcagtaactcttgattcaaagtcttgggttggtagatctgaatggcaaagtcttattttcatggtaatatcctagtttcaaggaaggcaaggaaaacaaaaatctagcatttttctgcccactatggtaggcaagtttctgttgaaacatagggttcagattttgcgtggccaaaaatggatacgtatcaatatgtgtgtttgtaaataatatatatgagtataaaaaatatattatatcattatgaacatatatttttataaatataaatacattttataactataactatatacctttttataaacataacatatatttatatatgcacatgtctgtgtgtatatatacaaatacactccttgtctattcccaggctagtgacccctcgcttaaagactctataaaagcagactaagtacaatgatatctccccacctttctcatgatacttcaaacttgtctaatgacagttttttaaaacagtgcaataattaactagaacacctgtgtactggtgtcatattttctgaatggtagtcatattttctgaatcaaaaccaaatgctcatcctcttttttttatttaaaaatccacgcattgagagttgaatcaaattttgctttgaataatgtgacaaagaaagaaaagctttttcctgaatctcttcttccaacctaatattaaccattttttagaaatgtgctcacattctcctctggaataaaaaaaaaaaaggacaaacatcttccaacagaaatgccatcatgatggtgatctcaaagagttttgtgagcccacagtgaggccacatctgctgtctctgaccccaatcagctcttcctctagatatctgcttgtctaactcttaacatcttaaagtccttgctcaaatctcactttgccaattagggcttacactgattctatttaatactataataccaccttcccccatccctgacattcctgattttctctagcctttccctccctcccccctccctccccctccctccctcctttcctcctctttcttttcttttcttttctctctctttccctccctccatccctccctcccttctttcctttctttctttctctttcttttctttctttctttctttctttctttctttctttctttcttttttctttctttctttctttctttcttctttccctccctccctccctccctccctccctccctccctccctccctccctcccttccttccttcctttcttccttccttccttccttccttcatcttgctctgttgcccagcctggagtgcaatggagcaaacttagctcactgcaactttgaattcctggactcaggtcaatcctcccacctcagcctcctgagtagctagaaccacaggtgcatggcaccatgcccagctaacaatttttttaagagatggagcctcattatattacccaggatggtcttgaatgcatcaagcaatcccaaagctctggaattataggcatgagccatcatgcccacccatttatcaccttttaatatttttacttttagagtttacttatgtattacatttattgttaattgtctgtatcctctacaagaatgtaagcaccaagaaaaaagtaatatttactttgttcatatttccaagttcctaaagcagtccctgtcatataacgggagtgcaacaaatatttgctgaattaataaatgaatgggtgtggctggggtaaaataaacaaggatgaaagggcagagatgaggtcgttgagttagacaggaatcagatgacaaagagtctctgaggccatttgaaggctttagatttcattctgagtgagatgtgaggtcactggatgtgtgcactgaataccacaatctgacagagagagagaaaagagccagtggagaaagagaagttgaacccaccaagagattggcgatcgatcaatggaacaaaatcttagaggtaattaggggggttgggatctacatgtccaggtggccttggtcagaagaaggtataggtatgcaacaagtaaagatgattgtctacataaactacagaccatcgctctggttaaagtgccctggttaagtggcccttaatttctttgggtaattctattgtcttggcagacacatcatattgttttggaaaacaactgggttataaatatggtagtcatattttttgaatcaaaaatgaggtgaatggcttagaaaatgtttttctctaatctataagtttacttatatgtaaagttttataactatattagaattaaatcatattcagtgttataaatgttaatacatagcagaaacaaaatgcagagtgtttttagtgggtattccaaagtctaccttggttagattgtgattctgcatgcaaaagtgggtcaaacctaccatcatggccacaggtatcaggctcaggggtatgaatgttactccaggaacattttctgagtatacatatagcatacctccagagctatgctttaggaagattaaagtggaagcaacttggaacagaataaagctggaaattggattgaagcatcataattcagggattctaagtacaattttgaaacaaggagatttgctgatttgtattgtcaactttcatgccaaacaaactaggctcaactcacacccctaccacttgctagctgtatggtcttaggtaagttatctaattgggatttcacattcctcgtgcataaaatagggcaaacaataatgtttaggaaggatgatccaaggattaaataagccaacaaggaaagcacttaaaatagggcctgctacttaattagcgctgactattaactattactgtttctactactcctatcttgtagggcaatattagacataaatagtctcatgctatatttctgctgcattttgacaccaccaaaagtacagccaattcatatgaaagtaattcatttctgactataaacattcaacaaaactatcttatttcaaaaaacaacactgactaatatttggaagtagaaaaactcaaagttacaacagttactaatttcatgatgtgggaggattataaaatttcatataactgatatagttgtatcagttttggccatagctaagacttacaaagcaattacgatttgccaggtactacgctatctatctaatttacatgtgttatatccttctaataacttcacgagatgaggattattattaaccatcttcccaaagaggaaaaaggcttaaagaacttgataacttgagtaaagatacaccattaataagtgtctccacctggatttcaactcaggcagtctgaccctagtgtccacactacattatgaggttatgacaggcaattgaaataatgtgtagtaacttatcaattaaaatttaaaacaaaaagactaatttctaggaattataccccaaaatttgataacaaagcaaaaatattctttatcagatcatcaatgatttggtaatatatgtttcacccaaaattaaggaacaaaataaaaccataggcaaaaaaaatgctttacagagatcaaaaacctagagaaaagttaacattatttaccattcatacggattactgggcttgaaattactcagtgtctcaaagtactgataagatattggctgggactaggtgtattacgtatttttttttaattttctgtatataatgatttgtgtgggtgtgtaaatttttttaaaataatatttcttaaatgtataacatctttaaaagaaacagaaaaccttcctggctggggagagattgctcctctccctctcggggcaagctagttcttccagttggcacagaactcagcctggagcatacctttgacatgcaaatcaaccaatctagaactacacccttctatctggcccagataacccaagaagcaatattcctctgccttaatcatctcagggccagatatcaggccactagaaaccactctacagtttagagcccctggggattattcaaactagctaatgctaaactgttgacttgtcccttctctgcctttcctgtggaaatcctaataaaggatctagctccttttgtggctcccaactgactgaccatcatacaatagggttctgctaactcaaaattcagtgcagaaaactgtcaaaaagtctttatataaaacattcgtttcatataaaatgtcaaatgggatggttgatagagctgcaaacagaggctagaccaagatacttatctcttaaaactagccatatattcttacatttgttcattaaactcattcagtaaatagttgttgaataatttttaagttctaggcagctaggtactacaaagaccaactatgtttagtttctgttgttggagacgttgcattttggtggggtaaatacataaatacacaaataaaaaatatttttaaaagttagtgattctctaacttgtcttacttttaaggaaatatagagtaagacaagtcagagaatcaccaagggcagagttggggaaagtgactttagatggggtaagactaaaatatctatctgaagaggagacattcaagctgactgaaagattagtaagagaaagagttccaggcacaggaatcttactgaatttaccagtaggtacatgtctccaaagaaacaatgtaaatattcctttttctctcctaatatcttctggatacttccaaacctgtcttcaatttttataaaaagcacttagttcataagtttctgcaagaacatggactgttactttactcatcttcatagctctggtacttcacacaatgccttcacatggtgagcactcaaaaaataagtttgagggccaagtaaaataatggatgaattaagggttaatccacataagcctgggaggttttccaaagaaattttaaaacttatatttcagggtgatgtcagtaaaaatagcagagcaaggatctcctaaagttccctccttaaaagcaataagaaatttggtaaaaattctaagtatcaagtttttagaattctacagattaaccaaagttttgcagcaattcaagaatgtctattcaagaaaaaaacagttgaatcttgataagaacatcaagcttaacatcattttaacctgccctattctcaaacccctctttatatctccatagaagccttaaaagccagaagtctgcattcacagtgaaaatcaacaacccacagtcactagatagggcacaacaaggttggaacttcttctaaacctcagtactacagtattctcattatgcgacaagtttggcagtttcctagaagaccttacttgcaagactgtctttatttgacatgacttggagctcactcagtatgaaaagcctttcctccaggggtgttggtttaaaatatttaaagacaactgtttaactttgcaactatctgagtcagtaggtaactgttggacaaacaacaggcaaaccaacaagatgaaaatgaaaggctagggaatgagttgttcatagtggctttgcagaggtctaatgaattcccaggaatttagaagggcatccatttgcccagggctttactcatgttcaggaaagacatgagaaggccacaagctgtcatgtacacccatccttgaggctctggcacaggtagaaagcgaaagctaaggcagagttgtcaactgcttggctgagtgttgaaggcatggccaacatgcacacacagtcccttagcaaagaatggggacttctaaattactgaggtaaagaaatatctgtctagttaatacctgatcactaaataatggagcagagacttctgtggccacccatgacaaagaatgcaaacattacagaattagttaaggaaaataactaaacaatcaaacaaacaacaagaacaataaacagcaacaacaacaaaccctgaggaaagggaagaatctaatttccaaagttgttacattctattatttaaaatgtccagttttcaacaaagaattataaggcatataataagaaacatgaaataagacatgaaataagaaaatacagtgttgaatgtgtatcactttcacacaatcataaagttaaaaaatcaagagttgaaccactataagtagaagactgtctgaatagattattcacagaggaaaaaaaggaatcaacagaaagcgtccctgaagaaactgttgctggacttaataaagattttaaatcagatattttcattatgttcaaagaactaaggaaatcttttctaaagaactaaatagagaaattgtaaagattagaacaaaattaaattaaatacaaaaatcactaggaaaaataaaatcaagttaaaataaacaaaattaaaaagtgagttctttgaaaacaaaattgacaaatatgtagctacaatgacccagaaggtaaaacaggacccaaactaaaatcaggaatgaaatatttggttttccagtgcccttacagaaataaaatggattgtgtggaacactatgaaaaattttataccaacaaattagataatctagatgaaatggacatagtcctaaaaagacataaagtataaaactgactcaagaagaaatagataatctaaatagaccagtaacaagtagaaagactgaattaatcaaaaaacttctcaaaaagaaaatcttaggaccagatcacttcattggtgaattctaccatatgtttaaagaagaaataatatcaatctttcataacctctttcaaaaattagaagaggaagaaatacactctctaaagccagaattatcttgataccaaaaccagacaaagttattttaagaaaagaaaattataagtcaatattccttattaacatagattcttcaaaaaaaatacttcaaaaaatactagcaaactgaatctagcaacatataaagaaaattatacatgaggattaagcaggatttattccagaaatgcatggatgcttcaagacctgaaaatcaattaatgtaaaacattataatataaaactgtacactagacgaaaggagccagacacaaaggaccacatatcatatgtttccatttatatggactgtccacaaaaggcaaatgtgtcaggacaataagtaaattaatggtcgtcagaagctagaaatagaaggaaacagaaagtgactcctaatgggtatgggatttattttgaaggtgataaaaatgttctgggactagacagtgttgatggttgcaatcttataaatatactaaaaactactacatttcacactttgaaaggataaattttatggtatgttaattatctatgattatatatatataattttatttataagttgatgcatgttacatgcacacaaacttatagctcaagatgacaacctgagaacgcacttctaccttcctctgccccaatgtcccattaaaaaaaatgaagcccaatatgctggcacacacttgtggtcctagctactcaggaggctgtggcaggaggatcacttgagcccaggagctcgaggctgtagtgagctatgatcattccactgtactccaggtgacaaagtgagaccctgttgctaaaaagtaaattaaaaagtgtgcaattaaaaaataaaaacacagctgtaaaacaagaaaaggaagaagcagataatgaagacttaggaagataataaagacttagataataaagacttagatagaaggtgtacaggattagttagaggaagtagaataatgaaaagcaccacccaaaataattggggctaagcaagcatcttcacaaaggagccccaaaaagctttcattttaaagtaaacaaatagagaacacaagagtaggctgaaaggcagctatcaagatagttcaagaactaactgcctttagaaaagtggtatgagtctgaccctttcctttcgcaagtattcaatagtagtttttaccctgagatttgttttataagaaagttgggcaaagtgcctagaagtgagtgttgaagccacagagatacagcattggaaattcataaaagactttcccaagaaggaaatggtgatcttgcgggagacaagagcatagaacagaaaaactgctgtgctgagtcagattcctgttccatgcctgtgatgataatttgtacatgtaacttgactggatcgggggtgcccagatatttgactaaacattatttctgggtgtgtctgtgagggtattactagttgatattagcatttcaatcagtagactgagtagggcagactgccctcctatatgtgggtgggtaaatttactcagggttctccagagaaacaaaactcaacagattagatgatgcctagatgatggttaattctatatgttaacttgactggccatggggtattcagtttaaccattattctgggtgtgtctgtgagggtgtttctggatgacagatgagtatttgaattcgtgggctcagtaaagtaggcttccctccctaatgtaagtgtgcaccatccaatccactgagagcctgcatcaacagcacatcatgggactcctcagcctccatagtcaggtcagccaattttttataataaatgtcttttgagttttctctctctctttatctatgtatctatttacatcctaattggttccatttctctggagaatcctgactaatcgaatgtacttaaatgttccttccttgacagaatcctttgtatggacacatggatatcttccttgatatcagcttccaaagatctgtggactcctctcacaacatttaaattcctgagctgctactagatcttatgtatggattattgaatagcttctgtataagtatggttaaaaaaaaagtttgatgtctttcataaatagttttcaattctgcagtagtgtcttatagactgaaagcatccatataatgtagctgttgcagtggtagtactattcgaaggagcattttttgtgtcagaagagaacaatgggttttaaaaataaacaataacatagaaaaagcaaaaaggttttaatctttctccactagaactgggttcaagagttctagaatcaagccttgtagaaatttagattaatgttacacttctgttgtggcctttgggtcagagaggaccccccacgttatccccatcatcccctctctactcttttatttcctaaagccacaaatttggagtaccctaagtcaggaaaagactctagtaaggaaatgataaaggagaatatgtgacaatcaagagtgcattgcctttttccatttgtagacatgtgggcatgtgcctttctatttgttttgtagatgcaagctgcacaaaggccagttgtcttctcttatattcaccagtgtctttccagaatctaacctgttagcattgttggcattcaatgataatgatgctcaccatttctataaggtccagcatctgctgacgcatactcaaggctcagacaatattacttagatattcatggttgccaagccagtttactttttggtttaactccataagaagcaatccaaaaaaaaaaactttaaataaaatattttcagtaatcatggaagggagagggaaaaccattaactggcatcataccttttgccctaatattatattgttttcttccaagaaaaccctatcatttcttattctttttatatcaggatacataatacgacatattaagaagtttaaaaaagtcaactccccagattggtcaaattatgctgaataaacaagtagttgagtactctctattcaagcttgtatttgctttttaaaagagatgataaataaacagctgacatctgaactaaagagttcaaggcaacaatccctatttgcagctcctaaatcctcaaatttctaacaaccataagggtttttttatttctttttgtttacttgttttttgtttgttgtcttttaataatcctttggtagcaagccttacctgacctctacagtcctattagggctcttatgtaatatatggaatatacccttattacttttataaaatctgaaaaatcctgaacttgaaaactgtggacattcattcaattgaggtgaggatccaagacattagaagaacaaacaggtgtatatatatttaagtaaggaaattaggcaaatcacaatctctatagcactgatttcatcatttggaaaatgaaggagttgcacaaaaatatgcttgacagtaattaaactctaggattctacctgatcaatttatatcctgatatataacaaattatgttgaattttggattatgttgaatttttataaaattataggtatttagctttgccaataatgtgtgacaaacatgcattattagctgtgtcttcctatataataaggtttagtacctgctttgccaaacacagaagatatgccttccataatggccttgtggatatcaggatgagaaaggacgtatgcaagtgtccaaaatgcaaccttaaaaagaaaaacatatatcaaaaatatgaacttctttgaaggtgaacaaaagcatatttagtattagccatacatatattttttaaaaaggatgatgtttaaattaaccttaagagcacattagtagaaagcatattttgaaaacaactagatattattaataagagatatgtaatatatctccaagaagccagatttaaatttttattttgtcactataatttaactatataatttaaatagattaaacatctatcttcactaaaaatgagaaaagttgttatttttactaatgagtaacacaaaatattatataggcatatattaaattttcagaagcaactagttatgacacttaagaatattaatccaaaacaaaaacatttcttaagatttaatttccttagaatacaagtgaattagcacattttatattctgcaactgaaacacagtagttttaaataagcccaggaaaatgcagcaggaaaccatcccgtaaactaaattatgagagtactcaatgtcaaaaacaaagtccttttttttggctttttttggctctgaattagtaaataaaagaaaaaaaatttttgagtcctttcacacttgaatgctattgaatatagtatatttgcacattttctctcttggccactcaaacttatttcatatctttcctcgttgtggtattacaagataaaatcatactgctttacatcttaaaaattaacttcctcctcaggtaaatagttttgcttctattcttaggttacgtaataaagaaaacctgtataaaatcatccaaagaagtgtgggtttcactttcatttttttctaaatacatttattatgaaagagatttcatctaggagaattggtcctgaaatgattcatgcaatattttgactaaatttagtctgtctcttttgtgaggtaacattatgtacctttaaataataccaatactcccctctgtggtcaaaagaggaagagcaattgtccgaaaagaagtgctcaaataagccaaattcaatactgttcattatttttccctttctaactttaaattgatagtgcaaggataaatatggtactgtttacataaacgatgtgaataggggaaccaagggtcctcaatttagaggctttctttcaggagtgttatccagattaagaaagatttatcctagagattttctagttcatttttacagatgatgaaacagatgctcagagaactatcttgtcctgtctctactcaggccccctttctactattaactacagataaaagtgctaaattactgaattcaattaataactactccatactcacttcatcttacttgaagagtcagagttcatgttggggaaaaaaatagtgataagacataatgtattagtctgttttcacacttctttataaagaattccctgagactgggtaatttataaacaaaagaggttcaactgactcacagttctgcatgggtggggaggcctcaggaaacttacaatcatggcagaaggcaaatgggaagcaaggcacatcttacacggtggcagaagaagggggtggggaaaatggccaaacacttttaaagcatcagatattatgagaactcactcactatcacaaggacagcctggggaaaactgtccccattatccaatcacctcccaccaggtccctccctttacatgtggggattacaattcaagatgagatgcgggtgggtacacagagccaagccatattacttagattttcagttacgcaaaacggatgttcatagttgtatgtgcctaaatatagctttagagattcaataaaattggatactactttttaaatgacaaacataagcaatttagctaaactacaaatggctgttacttttatttatttattttttttttttttgagacagagtctcgctctgttgcctaggctggagtgcagtggcgcaatctcggctcactgcaagctccgcctcctgggttcacaccattcttctgcctcagccttccgagtagctgggactacaaacacctgccaccacgcatggctaattttttgtatttttagtagagacagggtttcaccgtgttagctaggatgatctcgatctcctgaccttgtgatccgcccgcctcagcctcccgaagtgctggtattacaggcgtgagccacttttttttaatgtctcctttttccttaacagattacagtttttaaaattttttctatttttaaaaaagccaaagtatttttaaaagataaaaaggcatataaaatagttaataaaagtttatatgtattactacatcaataagcaagaataagtgactttgaggtctttgtgcacccacatttgggaaaggggttgaaaactgctcccaacagtaccaattagtattttgtaaaacagttcaagtccaaggtcagagatgggcaagaagaagaagggccactcagctcactgaactgcagaagcagccaccataatgtcattccattgttttggagaggtaagaacaaatgagagaaagggcaaggaggaaaactctgtatctttgctgtgtcaaagagaagatgaattgagtgtgttctttggtactgatttatctattcaaaaagagattttgatggagtcttcataccatgccagagagtcttctaccgatcatggtaaacacaaatatgttgggagataattcctgtccaaagtattttcacatttagttgggcatatgaatacatattggagaaaaatgaacgaaatgtacaagacagtgagagagcaaacacatgttacaaaaaataaatactgtgggagttgagagtgggatggggtagcaattgctactgaaagtatttagaaagaatgtaagagatgcagcagataaaaaaggtaaaatgtcagctttgtgattggtttggagaaatcttctaaaaaaatcatttggcagtcagaaatttcttggaacttagaaatggttttcccataaaaataatttcataaattatagttaatatcttgggccacaatggagcctcctagtgacccagtgcctaacccatctgaagcctgagctctgagtcctatgggccttgaggcagagtacaaagtaggagagaggagatatagatatactctgggctccaggaaaagacaggccccaccacctacacctctggtagggcttctggtattctcagcagcaataaaggtcactaaagcagaatagcagtggatattcccactctggggcctttgagccatcaaatatttggaagcctatgttcagtattaacgggccattgaaaataatgattgactgaaactagggagataatttttgtaagggaagaaaactagcatttattgaagacctatgctgaaccaggtgctattagccacaatctatttcttaccaaaataatccttacaacaaccctttaaggtaggtatagcattaatcccattttacagataagggcactgaggcttgggcaggttaaacaattggcccactgttacccagtgctggcaattggctttggatctgactctaaagcctctccaggatctctgcctgctcaccaggctgcctcttggaggtgccaacaagagccagtgagatggaatattctctaatcatcagacactttctttctgaaatgaatgatttaaatcctttcagaccagcgccaagaacaaattccaaagaaccgacttcccctgtgtcagatcaatggggctttgtgtgtctttcttccgggggatgtttctaacaagatattgaaaaataattctttgacaggagtgcctgttttgttgctactttgagagttgttttgatgtttgtttctcaattttgctatagcttaatcagtttccaagaatattatttaaggaaaaaccagagaagaatattataggtacataaagaaggggaagggtttagactacttttacttgaccatatcagatgaaatgtatattccactggctaacatacctttgagaaaagaggccagaatttctatcccttctctttatgcagtaaatttttcaacaagttaagggaaactagaatatcatgactgagaaagcctttaacaacctaggcctttataaaagtaaggctaaataaataatacttaaaacatcttcctaatttctatctgttagaagaaaaaggaagaaaaatgcccacacatatcatcatggataggttaaatcctcctgtttagtagaaaacaagtatatttaaaaagttaccctttaatttcagataatataagtagcatcttaggctaatgtgagaacctcctggcccaggaaactgttggcactgaacatgacgtgacagacaaatctcatggctctaatctaatgcaagacagattttaaaagaaacagttttttagccgggcccagtagctcacgcatgtaatcccagctgctcaggaggctgaggcaggggaatcgcttgaacccgggaagcagaggttgcagtgagccgagatcacgccattgcactccagcctgggtgatagaatgagacaccatctcaaaaaaacaaaacaaaacaaaacaacaacaacaacaaaaaaacccacaaaaaacagttttttaagtcttgcctctctttagaagtgttgaaagttccaatttcaccagcaccattcatgcggaagcttgtaggaccataatgctaagcaatgcaaacaggaatggcacacagaaggagaatgggtacaaatggagagaaagagctaatattcattgataccagctaggcttatcttattaaatcctcataacaactttgtagagaaatgagaattaccatttattgagcacccaagttctaagaccacagtgggaggttcacatacattatccctttttttacccttattaggtaaaatagtacattatctcttattaggaaatggaggcacagaaaatttaaattaccaccatgacagtctacaactacaaattgggatgtctggatccaagcccaagttacctgaaactatccatttacttactctttccaataaaagcatgtggccaatccctattcatcttttcaataccaatactgagcacattggtagacatacaaaaagtgttccataaacagatgttgtctacaactggccccaaagggcaagcttttccctcatcctgttacacactgcctttcagaggacagaatttgcttgagatctgtttcgtctcctttgtaacctaatcagatttcattaggcattcagttttggtttttatctcacaaccaaatccactgtagtttttttcttttccataatgagtgatgagtggaaaaaagaatggaagacagaaatgaaggaaaaaaagatgaaaggacagtggagagcaacgtaactcatactttactaatatacttacaggaacagcattagacagagaagcccaaagcagtaagagcccataattgggtgagttttccttacttgtttccgtctctacaatatccagcgtagcttgcaataatgtctgtttaaaagaaataaacattgccaaaccatggctatgtgacaaatatcgatgttaataaacaagagatcatgcctttttctttaatatgaaagatatcatttctgccattcccaggttttgcagtttgaggcatgtgaagggatttatgtccttactgtagtatagtaattaggagtagggattctggagcttgaccgcctcactgcatttgttcaaatcctggctcagctatttaagagctggatgaccttgaacaagctactttaatctctctgtgcctctgtgtcctcatccataaaatgttcataatatggtacctacctcgtaggattgttgtgagaattaaatgagttagtacctaaaaagtgcttaaaataaaacctttcagagggtaaaatgcactttggatctctactttaccaaactgaattggcaaattgtgtgttattatctctgccctccacactgctctggaatccctgtcttataaacctctgctcttagcaaaatgcaagcaatagagaaacacacatctctggtgcattcaggagaaaactacacccccatccaccatacagattctcagcccattcaccatgggagacagaactgccaagccagaatattacaaataccacaatactctaaaaccatacagagaacggacatttgacttgaacagtgacagctcagggcagggccccatccaaggctacccatctcaagacatgttgttctcaagtcaccaaacaaatcccactaaagtattttcttcatcgggcggtttccccagatttgtctttgccagtgacggctctccatcatgggaaaaaattcagacactgtaacattttcattaagttactcatctacttttaatcttaaataacttatgtctaggtgatagaaataatgggagctaatatcaactcactgcttgctaagggcaagtactgttttaagtgtattgcaagtatttaacccatttcactcctcactataactccaagatgcagatactactatcttttttttttatttttaagaaaagatgtttacttgagaatagagcatggcaatgggaaaatgcatgcaatagtaaactatgtgcgtattcagagagttaaaggaagacaacaatttttaaaggaaaaaatgagaaggattacataattgttgtgcaatcattattcttgtctacaaagatcaataacaatattggacaggccaggtgctagataggtgttcctgtagaagtattattgtgtaggctgtgatggtctttgtgcaggtttgtggtttttgtagagttttcttttctttcttttctaaatcacacattcaagcatgagaaccctctcttcatgaccttccctggctctatttgtcaggttttttttttttcttaggttcaggggtacagttcaggtttgttctataggtaaaatcgtgtcacaggagcttgttatagattatttcatcacccaggtactaagcctaatacacaataattgtttttatctgttcctctcccccctcccaatctctaccctcaaatagggtccagtgtctgtggttccccgcagatactattatcttcaccattatgcatatgaggaaactgaaacacaataaagttagggaattttgccagggacatatagcttgaaggtggttgagttaggatcccaaccctgtgagtctagccctgactccagagcccatactctaagccactatgctatactggcccccttagagacacaaatcacaactctcttgtattagggatttggagaactgcattgtaccacagcatagtagctttgattcagatactatgacacagaaaaaaaaaactattcaatcactagcctataaaatacattataaaatagagactgatgctattatttactaaagcatgtaatttgtcaagggattaactactctaatccctagctttctggatttaacatcctcagttttccttgtattaaagttgtgaaaataaataagaaattacttgtgaaatatgtaacactatgcttgccacaaggtaagcaccccaaaaatgttagctaatgtgttattactgtttttgtgataatggattagcagaattgaaaatagtttagatatgaatttcatttactgcttgtctctattatacttataatgtaagttgtcacaggacaaagtttatacctcatgaaaatcctatagatatatttcattattttgatattctatgatacaataataattttaaatgaaaaacactagtttaagatatatctaaaataacatggaagaaatcacattttacattaatgatgcaataaagcgtgtatatattttttaaaaatgaaactcaacttctacccagtcttctgcttcactaggccactgaaatctatttatgcagttgaagacaacaaaatcttttaaatttcttcttagctcacacttttttttaatattaatataaaaacattagctcggccaggcacggtggctcacgcctgtaatcccagcagttcgggaggccgaggcaggtgggtcacgaggtcagaagtttgataccagcctgaccaatatggtgaaacctcatctctactaaaaatataaaaaatagccgggtgtggtggcatgtgcctgtagtcccagctactcgggaggctgaagcaggagaattgcttgaacctgggaggcagaggttgcagtgagccgagatcacaccactgcactccagcctgggtgacagagcaagactccatctcaaaaaagaaaaaaaaatgccactgccacacaaaacacacaaacacacaagctcagtgtgaacactgctagaggaaaacagagacgcaatacataaaaaaataaagttaaactgctcatggatgttcaagttgaattctctcctaaagttttaaacactggattagcttcagcagaattcaaactttgtttttattcaaataatgatatggtttggctacgaagccaccaaaatctcatcttgaattcccacatgttgtggtagggatccagtgggaggtaaccgaatcatgggagcaggtctttctagtgctgttctcgtgatggtgaataagtcccatgagatctgatggttttacaaagggaagtttccccacacaagctctctctccttttgcctgccaccatccatgtaagatgttacttgatcctccttgccttccaccatgattgtgaggcctccccagccatgtggaaccattaaacctctttcttttgtaaattgcccagtctcgggtatgtctttttcaccaacatgaaaacggactaatacaaatagggagttaagagtacctatgattaaaaatacctcatttcttcagagtaagaaaaataaatgctattctagaggtattgttggtagggaattttactttttttttctttttgctttttttttttttttgagatggagtttcactctgtcacccaggttggagtgcagtggcgcaatctcggcgcaccataacctccgcctcccaggttcaagcaattctcctgcctcagcctcctgagtagctgggattacaggcgcgcaccaccatgccaggctaatttttgtatttttagtagagatgaggtttcaccatgttcgccaggctgatctcgaacttctgaccttaggtgatccacccaccttggcctcccaaagtgctgggattacaggcgtgagccacagcacccagccttagcagggaattttaactgggaatttaaaaactctgtttgctaggcccatagattacagatctatctcgatacatcttttatatacatgtgcttttgcccctaagtcctggaaaataatgcaaagaacatgtgtgtttgtctgggttgtttacacaacaaaaatattagctgaaacacagtttgtcaatgaagggccttccagtatggcttcctattccctttattcaggaaggagatacctaaacattcacatagtcctttttcctaaggccatcttcctttctagttttaagcaaagctgtttgtgataatatttgctatttaactaaaaacaaacaaaaacttttgatgccatctttaaatataaaaatgtttgaagagtttttttaaatgatgataacaatgataagctcctatccagtcctctgttctcagtgctttacaaaaattaaatcatttaattcccacaactttatgcggtgaggaaactgaggccaagagactaggtactgtgcccaaggttacataaccagtgactggatttgagcctagacagtccagaccaaatgaaacccagtctctgtgggcagaccctggcctcagacagttttcaaaagctcccagagtgattctaatgagaggcagaggtgagaaccattcattagcaagcatctgaaccaaaggtaaggcttgttaaagcagattgtctacctcagaggtgtttgtttgtttgtttgtttgtttttgagacaggatttcgctctgtcatccaggctggagtgcaggggcacaatcagggtttgctgcagctttcacttccccaggctcaagtgtgatcctcccacctcagcctcctgagtagccggtaccacaggtgtgtgcaaccatgcctggctaattttttatatatataattatttgtagagaccaggtcttgctatgttgcccaggttggtctcgaactcctgggcttaagcaattctcctgcgtcggccccccaaagtgctgggattacaggcgtgagccaccatgcctggcctactgcagagtttctgactgagtcccaggtgatgctggtgctgtcggtttatgggccacatttgaagaaccacagatctggaataacgcttagggcacaggttcctagtgcctggctttttaaattatactattctgcttccttgcatctgaagaaacaactaacggtagtggcatcaacaacaaagcctattttgtagagctttgtttttcctaatttgccattagtttcacctgtcgctattgacacagccaactgtatgataacacagaaatcaatacggaacatcggaattgtatttttttgctcgttgtctctggttttttcttatgtggaataggatacctcttctacataggttgttgtgatgatgtaacagtgaaataatgtatctcaacatgtccagtacagtggttgacacaaaaatggtatctaatcaatctcatgtgttttagcaaaatatattttaacaacaataatttattactatctttacattagcaaaagaaaggtaagaaatacttaccatggaattatcttttgcagatttacatgcttttatatctggaatgtttttctcaaacagttccaggaaccactttttggattttgaccagtttctacatgagaaaaaatatatatagaaattaattggaaagcactttaggaataacaggtcacagcataaaaaagggatgtctgtggaattaaaattagttctccaaatttattcttcattttcaggtataatttcatggaaggtctaccttcggaatgattagtccacaaagacagctggggaggcagagcaactacattttagtgtcttttgtaaataaaactttggagtcctactggattggcactgaataagaaggcagaacccacacttgcttggtctgcctttactgtggctgctgtaagttgcaggaggatgaaaacccaatgcacagaaccaatcgctgacttaagccgggaaaaacaaactggctctcatcttctaaatcttgtctgaacagtcaccattgtagatgaatggtctacgtaggctatggtctgaatgtctgtgtctctcccaaatctttatatgttgaaatcctaacccccaaggtgatgtcattaggaggtgggggtctttggatggtagctatgttctgaggctacagccctcatgaaaaggagtactaaccttatgaacagggtctgagggagtctgtctgccccttttaccacatgagaatgcagtgaaaaattgggagtctgcaacccggaaggagccctcaccagaacatgaccatgctggcccgctcatttcagacccccagcctccagggcaatgagaaatagccctcaccagaacgtgaccatgctggcaccctcatctcaggcctccagcctccagggcgatgagaaataaatttctgttgtttataagcctcccagtctatgatactttgttatagcaacccatatggagaaagacatagagccactgccaagaaatttcaaaatcatgcagttactttgcatgtgcctcattttacaaacatttgtctgaaccaactgtgagaaatgcatttaaccacgcccatgtttgcctcagagagaatgaggagcacagtgtctgattctgagactgctcaggttgacgatttagcaggaatcttaactgtagcaatgagtgcaataataaaaagctgtacatgggataaaagacctcaaaataaattcttaatcccatcgatctctttctctcttttgtttttgttcatcacaataagaaaagcatctctcttccttggtcctccttcaattcacatacagacaccaaaaacaaacaggtcataagaaacggcttctctcccacttaaactgctgttacatctacttagaacagaaaaatgagaggtgttgaattgctgagataagcttggtcaatgaattaattataggaaacaactgttaccttagaagacactctggcaactgggacccatactcaaaatcttcatcataaacttgaaaatactgatggaactccttgatttttttcttgtttgtggaaaacaaacttttattaaagagcatattcactgtgactggataaaggagatgtctacaaagacagaaacacacaaaaagtcagacccgaagaccaaagaagaaaggcaaaggatacaaagcaaggcattatttcatagcaatatatggggagcagataataggtgacagattctcttgggaaaaagtcactcttaagaagttttgatatttgcttactgtggtcaagataatacagggggaactgaaactgtggtttgatttatctgaagatatttaaatgctttctaaacaagcttattagactctgacaaatatgagataataaataaactgatctaatacaattcaacaataatttatttagcaaataatagtagctaagatatagtccatgcctttagacagcaacaacaacaataacaacaacaacaacaacaaagattcagggcaatattagtcaccaaattccctaatttctcacaggatcccataaattcaaactattgcccattgaaatatagtacatatcatcaataagttttaccattaagagaataaagtgattactgtagcatacttaagataaagaatataaaatattgttaacatgccttaaaacacttaatactgtttatttaatttttatttaccatcccttcataatttcctccacccaaagttttaaaaatatccaagaatattttgttcatttcaatatcttcattttgttatagatattgggtatgcttcagcacatttttaaatttggttgtttttgtgtcccccctccaccccctactactggacctctaacaaaatgttcactgtcattctgagtctgaactgctcaatcttgccttgggcattccaggattcctgctgagatggcaaagtgactcaggtaacttcaacttacgaaatctctttatgcatgtgggaaattttctcatgtctcccatgcccagactttaacttttccagaaagcttcagaatggggctgactccgtctgctgctcttccctgtctcttgggatctcccttaatagaggaccctggggctcagtcctgaggcccacactgactttgcctgagccacttgttaagtaacacaaacatctcctggacttttttcaccactttatgattccattctctcccctatcctctcaacgtcctctcattctaataatagcaaattgcactgaatgttttatcaaaattctacaggaagtatgaaaattataagaagaaaatccgtgtagtttatacacaaatgtatggaatgactaaggataaattactgcaaatgtattacaatgactgtattggcttgtttgctcaccataaaatagaaatgctaaactgaattagaatttaaaagattggtgacagagcgagactctatctcaaaaaaaaataatttaaaagattaaaataatctcttaatagcctagttaggtagatttcattaatcaacctgacaatgtttgaagtccaatctataggtttcaatttttttatttaaaacaaaaagcaagactaaatcatactaatgcgtctatttaccttactaagttgttcaggtccattgtcccatgagtgcctaaattctccagttgttcatgtaattcttcagtcagttgcccagtaaactgatggagattgacagtccccattttccctttcaacataatatagagtttttcatgcagtgctaaaaagacattctttggaattgatgctatgaacaaagaaaactattttcaaaataagcaacaactccttgaaacacacagtcaatatatatctactattatttggtcagcagggactacagccaaagtcctctcagtacataaggtcacctcccataaataaaagtagataaagattcaacctattctcgactgagtgtggtggctcacaactgtaatcccagaactttgggagaacaaggcaggtggatcacttgaggtcagaagttccagaccagcctgaccaacatggtgaaaccctgtctctactaaaaataggaaaattagccggctgtggcgggcacctgtaatcccagctactggggaggctgaggcagaagaatcgcttgaacccaggagttggagtcgcagtgagccaacatcacaccactgcactccagcctgggtgacagagagagactttatctcaaaacaaacaaataaaaaagattcaacgtattctgtgagatgatggaaatctattcactttaagggataatctataaatgggtgattaagagagctggtattttcagcccttctccctcaaaatctacagtccagatacattaaaaacatattttacatatcccagcatttcagaggctgttctgtctgctcagaatgttctctcctttattatacccatatctactcccacccaatcccacacacttatacctatgagcctcaaacttctcctgcaaatttctatttgtccttcaagtgtcttcttgaacactacttccaccaggaggcctttcctaaccccatgaatagctttgagcccactattttctttatgttagtattcgtgctccttctataacacacattcctaattagaaattgtggtttattgtttactcatttctttatatttttattttatcttgttttattgaccttgaagtaactttttctgttttaaaaaaattttgaattttattttagattcaaagggtacatgtgcaggtttgttatacaagtatattgtgttatgctgaggtttggggcatgattaatcccatcactcaggtaatgagcacagtactcaatagttagtttttcaacctttgccccctgccgcccacccccctccctctagtagtcccctgtgtccattgttgtcattttattgaagtaactttttcaaagaataagttttaattttgtatttcgtcatcctattacgtgtaagatacattttgtgtaagttaatgaaaaacagtttttagatttcctgagcatacatcttctctatgttaccataccagtatagtatgtatactatgctactatacatatactatgctggtatgtatagtatgctactatacatcttctgtatgtatagtagcatacatctactatatgggagggatgggaagctgactcaagaataaatattaatatatttcatctgttcaatgaaatatttaaacatgaaagtccccagaggaggctcaggtgaaaaaaactcaatcatttccatacacctctgataggtaacttagtaaatttttctgaagggatacgcgactctacagatcaaaggccttcaaaatatttatattatttgatctaaaattccatagtccaagtatcaagaagcactaaataatcaaataatttcaccaacaggttgtgatgatc

SEQ ID NO: 24172 - DNA, 1717 bp, Homo Sapiens
ttttttttttttttttttttttgagtcagagtctcactgtccctcaggctggagtgcaatggcgcaatcttgcctcactgcaacctccacctcccaggttcaagcgattctcctgcctcagcctcccaagtagctgggattacaggtgtgtgccaccacgccccaccgatttttgtacttttagtagagacaggatttcaccatgttggccaggctggtcttgaactcctgacctcaagtgatctgcccgcctgggcctcccaaagtgctgggattacaggcgggagccaccgtgcctggccaatgttaagtattttaaaagtcattttaaaatatttgtcattgatgaaacttggtttcagcacacgtaattgctttccctctcttcttgtgattaggtgtaaacctctatttaactcaagtcctagattagaatgtcctttgtcctgatgtttgcagtaattgcttccttggttaataaagatatttttgaaatatactctggactgttggtgaaagaggcaggcatggctttactggtactagtttggcactgaactgtttgggtgcccatgaggtaggcagaccttatgctttttttttttgagacggagtcttgctctgttgcccaggctggagtgcagtgatgtgatctcggctcactgcaacctctgcctcccaggttcaagtgattctcctgcctcagcttccccaatagctgggactacaggtgtgcgccaccactcccagctaatttttgtatttttagtagagacagggttttgccatgttggtcaggctggtctcggaactcctgacctcaggtgatccacccgcctctgcctcacaaagtgctgggattacaggcatgagctaccgtgcctggcctaaaccttacgcttttgaggttgagtgcaggccttgtgataactaagcgctacttttgacgagccttcaacaagctgcccagtcctctcctcagcagacgcatcaggttgtagttgcatctttacagtggtctttccttttattaaatctatagcagtgaatatagatttgattcaacttttagttacgttctctcaagaatcctaatcaactttcagttagcctcttaagaaagggaaaaaaaggtgctgccagtcatccccaaattatgtttttggctgtgcattctattttctacatagcactgaatctgagtaacagtcatcctggatttatagttggaacagaacagtaacagacctaactgggactcagccagcactagcctcatcttagctgccccttttctctgctttgcagtttactgcttccctgggctagccataacggggttctgggcaggtcagactcttcagcaagacagtgtattaatagtgtgaattagatacactgatgacctgctctgcctagttaagaaactgaattaatcagcagttacaaagcacatactttgttacgtgctaggctttgcctcctggcctctagataattaagacggcccagggaataccagcagagaagtgctaattgtatttgggtgttacaaaagcagacctagacgagctgttcacttaactggtacctgttggtcagaaaaagaatttatttagagattatgatcatgtaaaattacagtactcaacccttctagcaaagtatttttttgaaaaataaactaaatgcctttataaaaaaaaaaaaaaaaaaa

SEQ ID NO: 24173 - DNA, 2864 bp, Homo Sapiens
tggcaatggaaatataattacactttttactctcagaatattgttcacattagacttcctgtttatcttttatattcttgcatttatataatgcctcatcctttcaaagttctttcacatattatatgatcttctttatgaaaaaaatagatgtttcattctgatatattcagtttcccactttaggcaaaagtagattaatagaatgacgaattcaaagtagatgaggaaaatcaggcacagagaagtaaaggtagggatagacccaaatttacacagcaagataatgacatctccagcctttaagttgatcatcaaaggctgggctggatttgtcttgctgtatgtgtcaggaaatttatacctattacattttccattttctcaaaatttaagtcacatgactaatatttagctgcaactttcctcataacaaatagtgtcatgaagaatgttgtagtgtgaagtttgtacatttcagggtcagatatacaatatgaactcttaatctacaggaatgagaatggaggatcattgaaggccatgatataaacaaatttgcatgttgaagcctgtataaaacatggtacagtgagtgaatatacccccatccccaagaacactttatacatattaaatggatatatgattactgtgcaaaaattcattctggaaatgaacatatatttgagcactaatatgtaatgtacacctgccctaaggagaaaataaattataaaactttttacattcaaaattactttcccaagcatgtcttagaataatctatgtgttgatgcatgtaaattgtactttaggtaggcaaagaaatctggttatttatgtaaaaactagtctaataaagttagttagtggctttatcactttaaatctttagtgtccaaaagtggtgtttaaagtaatagcacatcagaagaccttgtctggacaaaactagttcactcactgcttctgcacctgcagttgctccctttagggttataaaataatgacccaaatgttacatgtgttgatattataacttgtcagttactgatgtctgtggtatcctaccctcatctctgaaagggataatactgaataattattagaaaactataaaacttcacactttgtaccattaaaacctaaaattttaatcttgtccttttttactatggatcagtcggcactcgggaacagcagcaaggaaaaaaagcaaatttcattcacatgttctgtgtccatacctcttctctacctaattgttcatttaaatttcagccttattccttgataagggattttaccacatgaagtcatccagtgaccctagctcttattgtgaagttagtggagtatacttagaaatgttacaactttaaaatgttacaaaacattcattaaagctcatatttaaagtagagcatctagtttgagaaatagaaatcaattattaaagatgtcttttttctacccatttaactagttaaaaccatgacatgtaaatgtagaagtagaataatcacagaattccctaaaatatttctgtttactaacatatattgaccaagtacatcaagcaggagagatcttccttcattctgttatagtccacatcattctaattttgctcagttgttattaagagcatattcctaaaccatacacttttgtttcaataaagttttattttgttgagatgaataaaataacaaagttataagctgcataagacaaaagttcaattgttcaaaaaaaatttactgggatagctttctattacaggtattgttagattatattgtgctgataagattactttctaaaaaatttgtacttttctgtaaattaaaagaatatggagtcataaaatggcaagtgttttaggattagcctaaaattggacattgtcattgatttcaaagaaggtatgaactagcagtcttacagcctaattcttctttggactggtccttggcagcagttccttttcagactcgataaacagaattcagatgatgtaagtcaaaacagaactttacaaagccaagcgtattatcttttgcattaacctatttttttccatcatacatgctactagtatgtgcattagcatgatattctcatatacattgcattaaaattaaaaggtggcagctcagggtgagctcttctgttgctcatttgttcctaaatttttaagggctttttctcagtcaatagtttgtacaaactggttagtttaacttcattacccatttcattaaagttgatgggtcgtgtgatgagatgcatttaaggccgatagtgatagatgtttttttcatttcttgaacacaggctttgtctgaatgatgttcttttatctcttgaacacaagctttgaatgataactacaggttttaagtgctgttacattaataccataatgtgatgtgttagaaacaaagggatatttcaaaggtagatatttgaaaattctctagtctcaatatgtatgtgtattgaatatactctaaaaataaatgtgcaatttgctagtaggacaatgcagtgactgactagcattaggtatgtttcttttatatcctagctatgtcccactttcttctaagtgcaatcctttcatgttcacttgctgttttaccccatctactctaacttcatttggaaggcttgtctagagtatagcatgtatttttacctttgcagtgaattgcatgtgctaattgtaaccacagctatttttatgttgacataactccaaatgttatattaaatgttctattatatattagctctaatcccttaagtaaattttaagaaataaatacttgttcaaatttcaaaaaaaaaaaaaa

SEQ ID NO: 24174 - DNA, 3403 bp, Homo Sapiens
tggactcaagaacataggacagcttgtgaaataggttcttacttgtaaggtttgtatttatttttcttgcttttgaaatcttggatttaaatataataaaagtagatagcactgtcaatatttagactgtactgataactgtttaggtaaaggtctgttgactcttgtatcctagtaagactttgaaagtaaactttgtaaaataatgatttagtttgtcccttccctcttataaaattgaaagtgtaactcagaaagtaggctgtaagatcttcaggctgatgtaggatggtatactgcctaaccagtgaggatgacttttgggaaaataatgtggaagaaactaactgtggagcagcatcttacttatatttaattatagtatagtgaatatctggatcagcagatgatacttattttatagtagggcatttgcttttctctaattatctacttagaaaaagctgcttgcttttaaatgagagatttctggtcataaataagggggaggaattatagtttaaaagcaacacctcatgggagcaataaatgaactcacatagcagtagcttctttttcgggagctttatctgtaggtctgtacttttaacatacattattttggataataaggaggaacatatgcagcagaaaaaagaggaggaagaagttcttaaagaagtaactgcacatttccaaattactttaactgaaactcaagcccagctggaacagcatgaaatacacaatgccaaactgcagcaggagaacatggaaatgggagaaaagctaaagaagctcactgaccagtatgcactgagggaagaggtaaacggcgtttggtttgtttatagacagctgctcaccagtagcaaaagctacaccctaccgtaaagtaaaaactctttcacaggacagtattttagaacttttgtgtatgcacagtggaaattacatgtttattaggaaaagagtagaaacctgtaaacagaatgactaaattggagcatcacttggcccaagtgtcagtggagtaggataagtaaagggatttctaggagatgtgtaccacttgtctcccatatgatgctacaagattgtcaatatagcatacagatatttttctcttatgcagtctaataatacagatttgttccctaaatactctgtatctcagatttctgtgccaatctgaacaatataaataggagaattgtgctatttgtgagaataaggaacctactaattacccatcaccaagtcacattgtttgtgtaatcaaagaagtaaaaagtttgtggaggactcaatagttgtcgaacctagtcattggagttattttataaattgatgtggaagttgtatgatggctaaataaaaaacaaataggtgataacctgcttatttgtttttattttttctttacttttagaggtctatacatagggtaagatttcaattttcaaaggatgcatccccttcctttattatgctttaagctagtaaaatatatatttaaatccttacttagtagattaaaattggaaatagaaagtgacaacttagaaattaataaaacagtaaatattactttatgcatatcaaaatgttattttgagttacaccttttcatgctacttttgaaaacatttttctttaagattttgagtatcttttaaaccattttcctctatgtttcaagaacatttcaaacttattatggaagctgcaaacttatagtagaatatatcacttggctttagcaattatttacttttgtttctagcaactcttgtttccatctatttttgagcaaatccaagatattatatcattttatttattactattcaaatatgcatcatgaaataagattctttttaagccataatcactgtactatttttactccaaaaggttaaacaattgctatgtaatcacataccttctcactgtactatttaaatatctgttacttcccttttccttcaggttgtttacatcaacatcaaaataaggtttatacattttattgttttaatatgtctcaagtctttttagtatataagcttcccccccctcttttttttccttggaatgtatttattaaagaaattttttaggcctatatagtgaacttttaaaattaaatttgttttatattataaagcatattatgaatatcatcagtttttttaaaagaatcctttaaattccattgttttaaataatggtattaaaaatgattaattttattttattttttattattttactctttaggatttatattattttaactgtattaaactctccaaatttgctatagaagtagcagattgggagaggacatgtgttcaagttgtactacttgtatgtcttgtttagatattacagtctttttcttttatcagaaaataattgaataatgataaaatcagttgcagattaagacagattatctgttgcagtcttctcaaaacttaatttaagtacattattttcagctagcatttcttccttcacatagaacctccatgtgtggagggatttcctaatgagtctattgtatgtacaatagcacttaatgacatagcttttaaataataacaggattttaccaaatgtttaatatgtgccaggcatcaagcaccttacacagtttaattattgcatagatttggacagcaactttgcaagttaggtatggtcatgaacctttgcagataaggaaactgtgtttcacaaggagaagaaattgtcctggatcatacaataagctaggatttgctccagaccatttttttcattttatcaggctacctacaattaaggaatttcagaagattttgtgaacaaaaaatgtccaggaattatgtgtgtaataaatgaatttgatattttgatctccttatccatctttttcttgataaaatatcagcttttttttttccaatgtagggcagaagcaagaagtacagatattttgatggggacagcccacgtctgatagggtgggacatggggcagcagttagagggttgtgctctttctagtgtgggatagtttgcaagatgatatgttgtagccacttctgcagtgacggggacagaaggagtcagtgttcttaactacagtggtagcagcagaaaagaagggtaagcagggttctagaagtttgtgttatgttttctccccactgtatttatttctttggttagtggtgcaagaaattctgttttcctgtagcaaattaataaagcgttcaaacataaggaattacgacaacagcttgtagatgccagacttcaacaaacagcacagctgataaaagaagctgatgaaagacatcagagagagagagagtttgtaagttctacttcttgaaaaaaaaaaaaaaaaa

SEQ ID NO: 24175 - DNA, 2208 bp, Homo Sapiens
gggtcatataatgcaagtgactatggactaagagttagttatggtgtcttatgactagatttattatggtatattaaagtaacaataatattaatattaccttccttttttttttgtttcaaaagagatctttctccagatgcttcagcctgtctggccttcttatcatatgtgcagcacatcatgtctcagcaacagtgtggtgaggtccttaggtgtcccaagaacaactcagggagcacgggagggtctgcagttgggaccccacaactatacagctatagggtaggaggcttccttttcattggtcctgaatgaatacaaatcgctcagaaagcattttggtggcacagaaaggggatgtatttgtgttgagatcttattttattttgtatttatttatcttctttgacttgcacagcactattgggggtgggggaagcagggtagtgggagacgaaggcagaagcaagagtcaaactcagaatgactgagttgaattcactgtctagtcagcaatgcctgcttctgagtttggcccagagagaaggtattgagtaagattttaataactgtaaaaagtaagctggataagtaaaatcatgatggatccaaagcacagtttcttcatctcctgataaagaaagtcaaatgcttgataaattcagagtcacagatgtgagcatagctatattcttttaaacgagaggtagagtgacctagcactaagcaaatgagctgaaatgtcggaaacagagtccatcagcttatttggccacacgatcccaaactagttttatcttgggaaatggccctgtcctcagcattcccttcttgtgctggtggggccagtgaagtcttgatcttatcagaaaaaggccacaccaagtgcgagttttcccaggctgactttccgggcccttatcaaatgaaacaacagaagctcttcacagttctgtgccccatggccactccacagacagacaataccaagcatcttagaactgtcataagataggtcatgcctgaaatagatcttgaccatatgagagtcccagaaatcagcaaggcctggacaaatagaactaagagagaggcagaggcaggaagccgcgggtctatcttgtaaagagtttagcatcactgtgagagtgtgtgtctaaaattaaattaaactagaagcagcaggtgagtatttggtaagtacttctgtgactcgcctcaattcccactggccaggggccatctcaactgcacggtgaatcaagatgctggtgtcatcctccttggaaaaaggaaatgttaactcatggttaaaactaagtacaatgattcccaagggatcactttcttatttttttaaatgacattaaggagaatcttaagaaagcatcagagaaagacatgtgcatgtgaagcaccctgattctgatgttaggaaaacttaagcgaacaggacctgctgcacacagccccattgtcttctatccatttctctttatcattcaaatcaagcaacatgtgccctcctcatcaacacacattcttcccctttgtcagtatgcatctcccagcttagtgtcaggatactttcgattcataattatgtatgatccaaagtgtgcataatttcatttaacgttaaagaaatagatccaattcctttcttgcaaccaaaaataaataaaatacgttgcctcaatataaggtttgggctattctgtgtttctatagaagcaatctgtttttggtaaaatgtacttttaaggatccagtcatctgaagtattttatgtagagttagagatttcacaatattgactatacatatatttaaaatataaattatccagctgatgtttgaatttgtcttactttcctggccacctcgttgtcctattttataagctggggagttaactagcttaacaaaagatgcttagcttttgtaaaagaacaagtgtttcattttacaaagacactccaaatgatagttacttgattttctcgagacctttaactatggtgatgaataacaggacttgctttcaagccttaataaatgtaaaatgccttttaatgaagatacagctgagtgttttcctcatgaatctgaaccaattaccaatttgtgttccagtcttgattggtattgactgattcaaataaagttggtttattttcaaatattaaaaaaaaaaaaaaaaaa

SEQ ID NO: 24176 - DNA, 1486 bp, Homo Sapiens
gggctcgtcagatatattaattttacacttcagttttgattggtgagaaagtacccattctcttcaaataatcaaagataattattattttgttttgtttttggaatcaacagggaggcgcaaagtataaagttgctgctaacatatatacatatacatccatattttataagggtgtctatgtatatatagacagtgtgtccacacaaaaaatagatacagttatcagtcagtcagttcttccatgatttagtttttttaaacgtagaaaagctattgtaaacgtctctttccatttattcttaattttttgacatattggtatttctttaaagggaaatgaggaatgcacatcagtgattgattgtcaaacctcaccccctgatttcctacctaatctacccccacctaaccaatcaatcacatccacaaattgttttgtttgtttgttagtcaggcttccaacagagttcaatatttctaacactctagtgcaataaaaattattattaaatagctaagaggtgtgcatgtgggaaaggtcagtgcatatccctttaggaggggagaatgttgtaatatatcagctatcgagttgtttaaaaaaagtgtattcaatcgtatattgtctatagtatgtgctatgaaatttgcatttatgatatgtaacaggggcaaagccaaattcatgttactctgttcagtcagaaacattttgtggcatacagcattcctgggaagtgctgtactttgtttcgttttggttttagttttgcatttagagtgccttataattgatgcctattttaatagcatttctttttagcttttggttcgtatttccattcactgttcgtatctgttactttctattaaagcattatctgtttaccacatgtacaaaaactctttgaataatatgcattcctagttttcagccaagacggggatgttagtgattgtaccagcccaaagcacttggataatcagggcccttcttccttttataatcaatcatcaacatcagaaaaagctacttgttttatttatattcccttccaaatccgctctggaacatgcagtaactgcaccaaacttattttagtaacaaatatcattggcaactttggaatatatttgatattccattaggatttttctaaaaggggaaataaactatatatatatatgtatcttacccccaattcttccaacagaatttctataggaagccatggatgatggcataagtttgccacatattacatgattttaaataatcctcaaaatacccaaggaactcttaaagagttttggtatgagtatactactttggtttaattttagcttcatggatgttctgcatggaaggatttttgttttccacattttcccattgctagcagagtgaaatccaagagaccaaacatttgcaagcattgtatttgagcacttttgtaaaaaacaaaaaaaaaaaaaaaaaaaa

SEQ ID NO: 24177 - DNA, 1261 bp, Homo Sapiens
gggtgaaaacaataggttctttccaaaggggatcaagtggccctgggagacccggcaacaaaccaaaaagaagggctgctgctgtgtctgtttacaacttttccagatgctggcggtacctgtggacttaaaagtgttttttagaggatcgccatggttattgatcactactttatgaactaaacagcattttccagaaaaagggggtttaacttgttacagaattggagaagtctatgcaaaggactgatttaagcccttctacccaacaccttcccctgtgtagatttgcatacagctaaatctaaaatattctgctaaagactattggatgtatggttgatgggatgaaacctttgattaaatttccttttggtggagacatcctgtggtaggtacagataatccaacaagagtccccatttctttgagcttaaaaaggacactgtcgagtaggtaggaggaaacctggcagagccccttatttttggcctaaaaggactgagcaccaagatgtcttttgaagttttaagctaagaggtttccagtgcaatacaatatatacaagtgaagtttttacctcagtcttgcaatggactgcaaactatacttattacaccactacaccttctctcaagcctgccagggcctccatttatgtatgtggcttacagcttaaagtcagtagttggactactatatgaactgttactatcatgttttataccggtcgtaaatgcactccccaaactacaggaaagcggtatgtttattttttaaaccagcttttaattttcttagtattatttattgtagatgcaactgtttttattctgttggggggcttgggattattgcacttaactttgcagtttgagtgaactgtgttgaaaaagttaatgaaagcagttggtactcagacaaatagctgaaaactagtgaatgctaggttgttatcaagtttttatttgacattaaggttaaaaagatatatttattttctaaatattttggactttttttttgtttaactctttattagctgctaagtaaattgaagtgtatttaatgatgtgttaagttaacccgatttatggaagacagtaaagaacagccctctgtagtcagtaaagtttcaccttctaaagaatatattttgaattagttttatgaactctgttaaaattctgacccattacttgccaatttataaaagcctattttattacaaggcattgtctctggaaaaaaaaaaaaaaaa

SEQ ID NO: 24178 - DNA, 1574 bp, Homo Sapiens
tacagagactgagaattttttcattctggtgtcaaagttttgttacattatgggtgtgaagggcatttgatatatttttcttaactatggggtttatttttctaaatgtgggttgattgactgttaattgattcagggtacccttaaaagaaaagaagttttcccattgtgaaccttaaatgatcagagaagtaagttcattgattaaattctctgttgggagaacaaaacttttctcccttgacactttattatctttgatttttcaaagggccttgattggtggttgtgtctcggttaaaatttatgggactttgctatgtagttggcatttataaaatctgaagtatcataaataaagttatttatttaattatactaccagtcttttttactggtctgattcttttgtgcattcattaaagctgattgtgtgagagtgaactgggacacaagctagtctagctcactgcagccaagcaaaccctgttgatggctgatgggcctttccattagggttttgcttatgtgaagtaatggaattatgttggttattttctttatgaaaataaaccagttcttccaaggaagttaaaaggcttggtatggatgttggtgtcagataggtctgactaacctctccgtgctgcagcctatactaaggtgacccagggccacatgtagacagctaggccagtgctttttcctcttagggtttctttgcagaaagaaacctccagcaagggaagagaggtgtgtgtccacaggaaggggctccgtggggatcccatgaagggatttgagctctttcagctccatgtcatttaacttttttgtttaaccaccttggctttctctccttttttgctgtcctccttacggaccagttaccagattcagaggctaacagttagttacttgttaatgctagtcacagccaggaggtcagaaggaattttctacttctggatccaaatgttacctcttaggggaagttatgccccctcaactattgtcttattataatgaatctttcctttttggtccttttaagtaaccactcaaaacttttcatttcactgaaaaaatatgataaaccatgacaatagggctgggtgcagtggctcacgcctgtaatcttagcactttgggagaccaaggcaggcggatcgtttgaggccaggagtttgagaccagcctgggcaatgtagcaagactctgtctctgcaaaaaaaattaaaagatacctgagagctcactttaatatcagggtatttgcatccattcccaccctgttagctcttaagggaggagggaaatcaattccaaccatactttcctgtgatggaagatgtttcctcttgaaaaaatgccaatacagatttttaaaacctattgttttccaaatgcactttgtaagtttttgcttttaaaatagcttcttggaaccaattttattgtatttgtacttaatttttgttctcatctaaatgtgcattttctgactgtatagaagaagctttggtatgtaatttaataataaattagaaatctaaaaaaaaaaaaaaaaaaaa

SEQ ID NO: 24179 - DNA, 2561 bp, Homo Sapiens
gaactttccccttcagatcacctctgcgccacatctcatccatgcctcctccatgcactccagtccacactccccgtagcatcattccattgcccctcccatccatgctgggaccctcctggcccaccaaggcccaggcaccactgtgaatattctcctctgaaccactagagggcaggccaggcaggccaggcgggcccgtgcagcttgtgggcaagaaggagctggcaaggaccggcgctgctggagactgacccagccctctggctgaggacatgcagcggctcctaaatgtagagatgcctgtggctgagggggcctctctacctgtgtccccactcactccaggagcactggctttggtcacgtcttagcagcagggccttgctccgttgttcccttgccctggtggtgggggggccagaccgcctccggaatcctgccacctgtgactgtctgactgcttagtgcttcagctgtcccttccttgtgtcctgggggacctgctggcggcctcttcctgggagccatgacctcagaccccacccacactccagatcgagacccctgcctccccccggcaaatgtcctcccgctgccttgcagcctgcactttgcacatgctcacccccagcacagtcccactggcccctcacctccccttccctgagctccttcccaaggactcctggtcactgcctgctgtgcagtcagaggcccagggtccagcagcccggcgggaacgggtgctgcctcttcctccagttagctccagctcaggtctgagacccgtgctgagaaaggtctgagcaccgaccgtgccctctgcccagggctgggtcctgagcagctggttttcctgcaggaaggttggagcaagcaaagtccttctctgccctcagggtcagctgcccagactggggcggatgccagagaggcaggtgggctgtggctggactggtccggagctggcttccttaccagaaaagcctcagccttcctctggaagcatcccccgttctgggcaagggggaagggctcctttaaggggtgtgctttcccagtggggagcagtctggccctgccccctactaaagcctctgctctcagcactttcccccaagtccttgtaacttgcttgaaggtgggttctggctgccagccagtccctggacaaactctcctgccccttttaaatttcactcattttgtataaacccagcaggctggtgtttacttagccctgtagcttttttcattttttctttccgtctttcttcttgagttcacggttcaatattgcctcctcgccctggtgaggggaggtgctgcttttctgccccacctgccggctggttccagcagcgctggggcccagctggggggccgggatgggggcttctctctctgggaggggtgcaggtgccctccccaggctgggagggttccttccctagctccccatctgcccccgctggtgagagttgggcttcttggtcttggaactccctggcattgggaacagagcatttccagcatttgttgttgttgttttactcacctaacccttagaaaatgaatgttagaaggtgcctgccgaggcgggacagagtgttcgctcgcgctggagaaggctctgctcagccctgagagtcccttcctgccccaccgatactggcactttaacaaggaagctgaccgcacagtgtccagacgaattggcccccagaagatggggagttctgtcctgcccttctgtgtctgcgtgacctcacccagcctaggagggaggtgcattcagggtagatttgcctctcattcaaagttctggggctttgggtggaaaacagccagctttggcgctgttggggagactcctccagaccaggaaccccagaaggagacagagcctgccacatcctcccacgccaggccctgggccagggtgattggactgagaatttggccacaaccaaattgatgctggctggaaccagaggccagaaagcctggccttgtccccatgtgggagccctgtcctcagccctcttgtccccttgagctcagtgaattcccaccaggtgcccacagctcctggacttcaaattctatatattgagagagttggagagtatatcagagatatttttggaaaggagttggtctatgcaatgtcagtttggaatcttcttgaaagtttaatgtttttattaggagatttaaagaaaataaaggtctacaatatctttaggttttttttttttcctgtttaccgcacaaactgaccacatggcatgtctatcaggatggagggtgtccatgttctcctctgtctttagggaggtgataaggagatgggcggaggggtgtttttttctttgactcccctcctttctaacagaatgttgccaccactgcttgagtgggctgtgtttgttcctctgtcccagcttctgttgtagaaaataacattgttaggggaactcaggctagtgtcagcgtcttggtttggggagaaaaaattaaatgtttcggtttttgtttaaaaaaaaaaaaaaaaa

SEQ ID NO: 24180 - DNA, 1769 bp, Homo Sapiens
gctttcacccattagcattacttacgtagataattctttatgcctagttattatacatattaatttttaaggtatacatttaaattacacaattgttcattgtggtttgtatcccagaatgtgttgtgttttttaaaagatgcataatagctgaatgtatgcatgactttgaaagaagttaaaatggtgattttttttcacctcttgtacattttaaaaccaggccaaatctatttgccaagcagtgtatcactaataagaaaagcagtttttccttttattgcagtttttgtttatctgccatagaatttccttatactgtggcttggtattattcaagattagctatttcgctggtattacatctttttaaaagcctattataacatggttagcctataaggcagtgttggtccccttctaatattggcctcataaaggggttccactgtactttccgcatattactgtgttgttgttttcctttgtggatatataagcaaattgagcttgggtgatttttatggagacaataattagacaatactgtataattagttttacttaatagattatcatcttgtgagaagagatgtttaaacgtggtaaatcacttcatattacaaaacagttttacacttaatatgttaacattgggtgcaataatttagtagcattagctttagttacaaatataactggatctttctgctgacaacttaggttgtatgagttatgcttaaaagctttaaatctgatgtttcctgtacctgccacactatgttagaatgtgtccttcaaacatatcctcctgcaacttctcaaactgtactaaattgatatttcttgaagtctaactctgtgctaacagatctccattttaaatagaatacggttttaatttttgataagctgctgaattttaaagagagttttttggggccaccaaatattttggatcatgcagagaatatatattgtactgtagtaattttgtatttacatttgtatgatgtgacataatagatgtgaatgttaatcactgcttgactatgttaataaagttgtttaactataaaaaaaaaaaaaaacccacgcgtccttcagatcaatccatctatgcaaatttatggggaaaaattgttttttaaattaaatttccaatacccaagccctaaaattgatggatgtgaccccaggtgttccccttacctcttggccccccaaaacagggacagacatagatggtgggctggaacacccctcacctcctgtattcccagaaagcctcgcgttgaggtgtgttggccagctccctagtttgtgcttactatacctggccacgcctccctacctaaggccgctggcttaaccctaggggcaggcagtgttagatcagacccagaccttctcatcccaccctcatcacatcggggagaggggactccaggggcgggaaggcaggcgtccctccatttggccagggtgggcggcgaggagggggtcactctgcaggaacactgagctctgaacacctctcgcctgctgcctgcctcacaccctctgcattcgctgtttcctctgttgggggagggggtttgtgaggggaatattagattacaccttgtcatttggaaagccccgtgtctccggcggccacagcgaggttgggggggtggtgagggaagtccatggattggccagaactgggggaaaaacaaaaagaaatgagagaaagagagagcgggtaccaaaaaaaaaaaaaaaaa

SEQ ID NO: 24181 - DNA, 2436 bp, Homo Sapiens
gaaattggggtacagagaagttagccccaaggttatatattgcaagtaagtggcagagcagggattcatacaaagaccttctcactcagcagtcttcactcttactattcctgccactaggtagaaaaagaaagatttcggccgggcacagtggctcacgcctataattcccagcactttgggaggctgaggtgggcggatcacgaggtcaggagatggagaccatcctggctaacacagtgaaaccccgtctctactaaaaataaaaaataaaaaaaaattagccaggcgtggtggcgggtgcctgtacgcccagctactcgggaggctgaggcgggagaatggcgtgaacccaggaggaggagcttgcagtgtgccaagatcgcaccactgcactccagcctgggtgacagagcgagactccatcaaaaaaaaataaataaaaaaaaaataaaagatttcattttatgtgaggaattattttaataaaaaaaagagggtttatgctctatagtaataaaatttaccagtaacacccaatcagaaaattttggttccttagtatttagggaagacttttgtttaaatctcttatggaattttacatgttttgatttagaaaagtagatgcaatataatatatttcaagttttatacatattagatgaattgcatggtattttaggcaacttaactataaacaaatttattcatagaagcattgttgccaacaatttagatgacctcgatgaaaaaacacaccaattgacaaaactggctcaaaaggaaataaaaaatccaaacagacctgtaacaagtaaagagattgaaccagtaatcaaaaatctcccaacaaagaaagtccaggactaaatgagtttactggcaaactatgccaaacatataaagaagaattaacactaatccttctcgaactctcccaaaaaatggaagagaaaggagcaccctgtgacattctataaggcggacattaccttaacaccaaagccagacaaagacctcacagggaagctacagaccaatatcccttatgaatatagatgcaaaaaaacttcaaaatactagcaggccaaatccagcagcttattaaaatgatcacacagcatgaccaagtgagatttatcaaagaaatgcagggatggttctacatacaaatgtcaatcgatgtaataatataccatattaatagaatgaaggggaaaaaacagcatgatcacctcaattgataagaaaaagcatttgacaaaaatccaacaccctttcatggtaaaaacactctgcaaactaggaagaaaagggaactttcttaacctgataaagacatccataaaaacccacagctaacaacataatagcaaaacattgaaaatttttcccctaatatcatgaaaattcctgatttccccactgctattcaacattatactagaaggtctagccagagcaattaggcaagaaaaagaaataaaatgaatcccaaataggaagaagtaaaactacatttgcagaaaacatggtcctatatattaaaaatcctaaagaatccacaaaatgattccggctgattttaaaaattcagcaatgttgcaggttgcaagatcaacacacaaaagtctaagaaaaacctgaggggaaattaaaacaatttcatttacaataacatgaaaaagaataaaatacttagaaataaatttgaccaagaaagtgcaagacttggacactgaaaagtacaaaacgttgctgaaagaaattaaagaagacctaaataaatggaagacatcctgtgctggcaggttggaagacttaacattgttaagatggcattactcccaaaattagtctatagatttaatacaatccccattaaaattccagtgacccttttacagaaactgaaaagctgaccctagaatttatatgggattgcaagttactgaaggtactcaagtctgttcaaaacaatcttgaacaagaataaagttgaaggactcacattttccaatttcaaaatttactgcaaagctacttcaatcaaaacagtgttgtgctggtataaaaatatataaagcaatagagtagaatggaaagtccagaaacaaattacgccaatacactatggtcaattgatttttgacaagggttccaggaccattcaatgaagaaagaacagtgtcttcaactaatagtgctaagacaagtgaatattcacatgcaaaagaatgaatttgtacctgtacttcataccatatataaaaattaattcaaaatagatcaaagacctaaatgtaagagctaaaaccataaaactttgagaagaaaatacaggaataaatcttcatgaccttggatttggcaatggtttcttagatatggcaccaaaagcacaagcaacaacagcaaaaaaaaaaaaaaaaa

SEQ ID NO: 24182 - DNA, 2451 bp, Homo Sapiens
gaaaatacacacacaactgatctagacatcaagaggaagaaaaatgatggatgatgccacctgcttcaactgtatataataaacacttatgatgacatttcttgcctggctgagatctgatataatggaattgtaaatactcttcagaacaatttcttcagctacaggaagcgtggtgccatataattttaagaacttggcagtggagctccatttggggcttcacgtttcttcatatgacttctgattattgaagcattacttcagctagaggctcctgagggaaatgttcagaggaggttttatcaggattttaatttaaggtttcaaacaggggaagacaggaaattcaaagcgtgacgggataaaactcatgcctccctttgtccaggcttatcagaagtaatacatctgctctgaatagcatgaatgaatcaatgtgcagttttatcagatggcatcatggataaagatgataatgctgccttttctgtctctcaggctgtttccatggaaacctctagagccaaataaaagctaaccaatcatttagccaaagcttgccttggctcatagactggtatttctttaaggaaaattgtttttatatatttgactataagagcaaaggctcttgaacatatcctagattatggaacactttttcccttcccttttctctggaaaaattaaattttttttctgtccactgagactggagtgcagtggcaagatcatagctcactgcagcctccaactcctggggtcaagcgatcgtcctgcttcagcctcccaagcagctaggactacaggtgtgcaccacctttcctggctaatttttttttattttttgtagagatgggggtctcactttgttgcccaggctgaccttgtacttgtggcttcaaatgatcctcctgccttacctcccaaagtgttgagattacaggcatgagccactgtgcctggccaaaaaacattttaaatcccttgtctgggggtcagtcctctaaacatccctcagatttcagatagtactttcaaccctgtcctaacatagcaggtttgcagtaatcttttagaatatagcttgtcaaattagagaatggttttaccccacatgttctcataggagacattattatttagaaccctaaggtagacatgtttaaaatcaaagtcctaagaaacagaactttggaaaaatggaggaaatgtttttaaagtctgtaagtttgcacaatactgtatagtaactaaatgcatgctactccgttgtatcctagttattttagaaacagaggtggcctaatttggtggccaaagtaactggtttactttgagtgtaccagcttatggtgccattgatgaggaattaaagtaggtcaaaatttaattggagttggtattacttcgtaaagctagttttcaagaggaagaaaaccacacttactaatgttttctgtatctaatcaaatactcttcatatataattaagcctcatgttatcttttttttaaatcaaccttttgaacttcaactacagtctaaaagtcttgatggtaactatagtgtaattatctttttgtctcactggattttatagttagtggaaaatgcctttacaaaatgtatttaaaatagctgtcatctcatttgtaaattttgtcgtgtattgtgatatagtgaaccttattgtccttatgaaatggtagctttgtgaaatacattcaccaaaaatcaaaatttgaacatctttatgattccttaccagctgaagccagatagacaggtattaattgagctgatgccccacttgagtttatagactgtttgataactgcctgtcctccaaattgtgtatgtatatgttacgatggtttaattcttgagtcagggccagcacgcatttatattttctaccaattaccttgatagaaatatcttagaaattgctgacctggaacggttgtgagaagactcctggcttctttcttgcctcacttaacaaatattttaaggtcaaagcaatatctgtgcacggctttccttttgctcctccagacaagtgaggctgttggtatagtcctcttcaccctctgcatgtagcttcaccctagatcagacttttgtctcttgggtcccagatggcacaggagcactgcatgcttgttttctagagcccagccagtcatgggtgctagcctagtctccacacaccagcaagtagaacccaagtgtattgtataaatatttcctgagtaccagtaagagaatgcattcttttctcatctaggccaggaatgttgaaaatgctcagccttacatagaaactcctagattttcactaacgcatttcacaaaagtaaataagtatttcatataattcagaggatgtttaaattgtcagcattttaataaatacttgcattataaaaaaaaaaaaaaaaa

SEQ ID NO: 24183 - DNA, 2000 bp, Homo Sapiens
gatcacctgggagtaaatatacactaggagtgggctgagaattgagcccttgggctccctggagtttagaggtcaggaaaatgagggcaatgtcataaaggacactgaggaagagtagctggagtagaagaaaaaagagaatggcattcattccaggggtcaagtgaaaaaggatgtaatgagtttcctcaaatgctgctgctagagtaagatgaggactgagagttgactactgaatctagcaacatggaaatggtgaccttgacagaaacagtgtcattgaagtgagagcaatggaagcaaactcaagcaggtttggactcagggagtaaatggctttgtaggggaagcaaaatttccttctaccctcttcagttctgttgttggtccaagaattaaactgacataagacagattaacaggagaaaagcataccaattttattaatatttttacacggacgtggcagtcttcaaaagggaaatgaagaccctaggaagacagtaggccgtgaagcttatatacattttcacgcaaagaacaataaattatggggatgtgacaagacaaaggggcttgggcttggggcattaaattgtaggacagtgcctaggaaatacatgggggaaattaacgaaagacagggtcgttttggtagtttgttgtggaagtccatttcggcatcaactcctagtctctggtgataagaatgttctcttcctagtacagggaaggcacctttttcatggaaaattttatgatctgtttttaggtagaaatgaggaggtcagagagcctatgttagtttgttttgcatcgctgtaaaggaatacctgagactcagtaatttataaagaaaagaggtttaattggctcacagtttggcaagctgctcaagcatggaaccagcatttgcttggcttctggcgaggcctcaggaagtttttactcatggcagaaggtgaagcgggagcaggcatgtcacatggtgagaaagaagcaggagcgagaggaggagcttccaggctcagctctgcatgaatgaacagagtgagaactcactcattatcgcagggacagcatgaagacattcatgagggatctgcccccatgacccaaacacctcccactaggctcatctctaacactggaggtcacaatgcaacataaaatttggaggggaaacacatccataccatatcagagcccttctgcatgagctgtttctcaagtgccttcagattaaaataatcaatatgccaaaacagcatattttgggatggcacgaatcccttcagccccctttttttttgggaatagagtcttgctcttgttgcccaggctggagtgcagtggtgccatctcagttcactgcaacctccacctcccgggttcaagtgattcttgtgcctcagcttctcaagtggctgggattgcgggtgtgtgccaccactcccggctaatttttgtatttttagtggagacaggggttcaccatgttggccaggctggtctcaaaactcttgacctcaggcgatccacccacctctgcctcccaaagtgctgggattacaggcatgagccagtacacctgttccccttcagctcttttgaggagttttgctgtcaatatgaacactggaacagtggctggggaggatgagatctcaatacttccctgacatcccttaagactcaagtcttgatactttgtctgctctctggctctttctttgtcattactattatttttatcttcttgatgttgactcttgctaaaattttttgtcttccttattgttaatgcttatagaaaatgattccttgttatcttttagcccatgtcatccgaatcatttgctgtttctagcctaggtgctttgactatgccagcttgtatttcttcagaattttcattaactatatgtgtggtattgtaggcattacatattttaaaataaatttagccattgcttcaatcacaaaaaaaaaaaaaaaaa

SEQ ID NO: 24184 - DNA, 2347 bp, Homo Sapiens
gagataaagcaatgaaaagagtcagatcccatttccgtctgccccctcgtcaccaggtgtgatagccccagccaggtcacacctggcctcacactttgagctgagacttgaaaacgatgctgtggcggaagagcatgtggggcttggtggaggggccccaggatttgttgggggcaaagggggtggcgggaccgttcccaggaggtaccagcacctgcctcgatctcctctgagcctcttctgccccctgtcggccaggtgaggtcagcagcctgggagagtgcccccaagagatgagggcaccccgtgttccttggcaatcttggctcaccttggtaacaaaaggccatagaagtctgtttttctgggtcagttttttttgcctgagaataacaaattgctgctgtctacctttagcacacccaataattctatttggggcagtgaatgcatagaagatataaaaatacgcagcttaactatatcttcctgcgtgtgtatttattttcttctgggtctaggccatggtacaggagaactgtggcgtgtaggaggaatacttcaggatgagtgaaggctggagccagggagcgctggaggaaaccagccctttagccagcagcccctccaccacaggcactgctgtgtggaacgagttcttggaatgaatcccatgctttctgcagcctgtagttgttatgacccctcggaacaaccaccccgtggcttgtgtggggtctcgcagggaaaagggctggcttctaggtccccgagataagtgtgcagggggatgggccagggccaggctaagggtggctcagttccatcatctggaggtcagacacactgtccagaggcagaactgaagccctctcggcccctaccctaagccagccacccctcttcacagtgggtgagctgggctgggctggctggcatgaggccaaggggtaggcctgagcgccagagtcgcccaggttagcccacaggattcctttgtgtgccatggaatgctgaaagatgggtgactggggacccttcttaaaacctttggcaaaggtgccatcggcagggcttggcctcatgaagtctcaggtccgtgttcccgcagggcgcacatgcttggagagtcctcagcagggtagccgaggccaggccacttctgctgaggatggggcaggctggggtgtgggtgtggcctggggtggctcagggctggaactgctgcctgattcctgtgtggggagaagctcagtggccgtttgctgccactgacaaggatttcacatgcagaagagaaaaggcccccctccaccccccgcattccctgccgagtgagagccagtgtttgctgcccttgctgggggcgggtaggaaaccctgagcttcctgatgcggagtcatgaagcagagtcctcgggaaggcatctccacagccccgggtcctctgtctaacgccctccatttcacgccctccatctcacagtcaagataaaggcctcgagaataaagagccagcccccttccatttagtctcctgccgtttcccaaacagttgtccaacagttagacattgaggggcttcactgttaccaggcatgtaacagaaggaggaagactaacacacaccccctgccccatcccatccccctctcccgagctattttcttgctgtggcctctggtgcccttgagttggtctccccggctgctctgcgggggcttcactggcttcggagtgagcgcgaagtgctggtgagcagtgggcctgtgattggatgggaagatgtgcatccgtggtcaaaagtcagctgccagccctgcggaaccagagcctcaggctgggatggggaggcctccctgcttccacctgcatggtgggcatggcctggcttacaccaaaggctttgacggtttctccaagtaaggatctgcaaatcttgaatcgtcctcaaaatgacgaagcttgaattgtcctcaagatggatgtgaatcttacattccttttcatcatttcctttgtaaaaatgacgagtgctgggtttttgttttaagaagcattatgaaggccagacttactcatttttctcccccaagtgagctgcaagaggcccctgttaggcccctgtttcctgagcagtgatgtgctgctcttcttggtggggctttgggctgggaggggaaggcgggtcagagatgggggacctgtggctgccatgcaggagcccctgcgtcatctcgttggactctttaagggagtcaggaatagatgtatgaacagtcgtgtcactggatgcctatttagaaataaagtgtatgctgctgaattggaaaaaaaaaaaaaaaaa

SEQ ID NO: 24185 - DNA, 2269 bp, Homo Sapiens
gggatagactgaaggaagagagtttggaggccaggaaaccccagaaaaaccttgagttaaaaggcttatgcagggataaaatttagtttcttatggtccctttgtgaacatactggtatttcagctcattgaaccagcagctgtttatttagtgcctaccttgtgatatagccttgttctttgaacacctgaaggctcactgaattttagtgatgggtagactttgttcaaagtgctctctgatgaaatggctatgactggcctctttattctctttgtcccctatgatcttagcaccacaaatacctctgaaggtcctattcctagagtgtttgggagcacctgggtaggacagaccatacttagacagcccagggaggacatagtaagtggtggaaggaaaaggattctgcttaggttttcctttgctggctgtcatatcatgcttccatctgcttcacatgctgtggtatgaccacttaaagaatctaagtacccttcaatgacaaaattcctgtggttcctgggattgctaagcctcatagaagctctggaacacctgctgtgctctgccttgcctccagggcccagagaacccagctactgtctttatgccaaggacacaaaattcattgactgaaacctggggctgctgaaggactcagcattgaagtcatgctgttgagtccctccagcctcctttaaggcttgcttagtccatccaggggagctctttccctctcaggctgagcccgtatccttttctcagatcttactggcttactagtattccactgtccaaaccagttaacctgagggaggaaaaggagaaggattggctgactttactcactaccttttctagttatttcctcagtacaactccttgccctctctggactgttgagcaacgtgttctcttttctctgcctgcagatgtcccagttcatcgtccagtgcctgaacccttaccggaaacctgactgcaaagtgggaagaattaccacaactgaagactttaaacatctggctcgcaaggtactccccttgcttttggtagcccaccaggcaatgttctgggcaaactgtgtaccttctaagaagcccttttcatcatagaaagtattttttttttttcttgtcagatgtcagagctggggacccaggaacggggagggaaggtttggggagggatgcgtaccttacatgacagcagtagttctctaagaaattttcagagctcagcttgtcctttctggtgatcatagcaccagcctgccccaacatctacccccttattaacttcctgtcttggtgagaagggccctgaagcagcaggctggattaccacccctgtcctccccctcatataatttctgctctgattggtggctgtggtctctcttcctgtgccctggacagctgactcacggtgttatgaataaggagctgaagtactgtaagaatcctgaggacctggagtgcaatgagaatgtgaaacacaaaaccaaggagtacattaagaagtacatgcagaagtttggggctgtttacaaacccaaagaggacactgaattagagtgactgttgggccagggtgggaggatgggtggtcaggtaagacagactctagggagaggaaatcctgtgggcctttctgtcccacccctgtcagcactgtgctactgatgatacatcaccctggggaattcaaccctgcagatgtcaactgaaggccacaaaaatgaactccatctacaagtgattacctagttgtgagctgttggcatgtggttagaagccatcagaggtgcaagggcttagaaaagaccctggccagacctgactccactcttaaacctgggtcttctccttggcggtgctgtcagcgcacagacccatgcgcatccccacccacaaccctttaccctgatgatctgtattatattttaatgtatatgtgaatatattgaaaataatttgttttttcctggtttttgtttggttttcgttttgcttttagcctctacatgctaggatcacaggaagactttgtaaggacagtttaagttctcctgcaaggtttaatttgttatcatgtaaatattccaaagcaggctgccttgtggttttggccagccttgtgctatgttgataagattgatttactgcttaaaatcactttactttatccaatttttactgaactttttatgtaaaaaaaataaaatcaattaaagaacaaaaaaaaaaaaaaaaagggcggccg

SEQ ID NO: 24186 - DNA, 142707 bp, Homo Sapiens
gatcatcactattttcttatttttgcaatatggagccatcacttcacataaaagtgtatttaagacaattatttagatatacacctttttacttgtttctattttcagttccagtccttccagttatgatgtcctcattcttgttactgttttatttccaacttttctggtaaatatctctaattagtatattcagagaggtgccagggtttctaaatctttaaccatatatgaatattttctattgctttccaaacctgatggcccaagtttaaagtatatcaggatctctaaatctcatgttgccctggaggttccaatgtgacttttttggggtcatgttcctcatccatcaggccaaagatttctgctaaaagtaacatagtctgtgtgcctagctggttagcagctatcagttgtagattcaggtgtacttggagcaggtgaaaatttgagacacagtcttttagactgcagtgtcatcgacaaggctgagtctaatactttttgtttctgcatgggtatcctcactttctattctgaggtacctggctgggtctggatcagggccatctctgtggctaacactgcacagtgttgggattggcagcctctccagaaccacatgtggtggggagagggagttctctaaacaaacagcagtgctgtttctagaagttggaggccgggatgctaggcagccagaaaccacatgtatccactctaggcaagctgatgagaaagggattacatgaaaccaaatgtggaccttctaagtgggtcttctaaacattttgaccaagaatttttagatgatgagatttaaacctaaggaattgagataattttctgaatcttgttcctcatttttttttaaatatacacagaacttttagttagctatataacaccttgttcaggcaagagggaagaatgagggaaaacattctagaagttctgaatcttattcatttttttttaaaatgtacacaggtcttttagttagctattccattagttgcatagaatgcagttattatattttttcctgaaagaatcagacacattaaaccacagaaattaaattagtttatagatccatgttgtcacaagaagcagacattattatgtgaggctgggagcagtggaggattttggacctggcattcatttaaaatctctcaagtgccttcttgccactattttcttattttcataatatggactctttctttcatgcaaaaatgtattttggcaataaattaaatgtgtatgtatgtcttatgccatagattgagtttagtgttaactgtaaaggtttattggaagaaaagggagtgtttacttgtggggactgcagggctaactagaggtgaaaagaggctttcaaatacaggcatttagtacatagatcatcctcagagttattctcacacttgctatttcaaaaatagagttaaagacagtaaaattaaaatagctaagagaaaatccttaaaataccaaatgaatagaaaatatagcattagaaagatacaacagccataacaaattaattccactaaaatcagtatgtttaactacaacccactgtaggccaaggtggcagaccaccgcacatgtcctgttctgctggactgaccatgtcagtgcagagttccctgtaggatgctttgagccattagtggagaacaaagaccaaagccaaagtccatactgagttttggcatcttaaactcagaatgttctgtatggtaagccaactgaactccctaaatcttttccaaacttgttgctgacaaactacatcttttcccttcctatgctgtacaagtttttctatttttaatccaaggacagggttttatttttacaaatgattgggttcattatttcagatcatagctattcagactctgtgatcaagtgcctttactttgcctccaagtttctggtaatctacagaagtgaccttctgtatcctccttcaaattgctggtaaaaatagataggacacaacttgtgaaattacagttttaaagggacacatacaattgtagttatagaaaagtgttctttttttttttctttttgcttttttccagtgtttctagagaaaggaaaacatgacaaccctcattctttgctttatgggggtagagacctttttcctagaacccatgagaggaaatcttctggaactatgggaggggaggtgtgtcagggatgaggggttctgctggaggattcgttatttagaaaggctaaggcttgtctaaaatgtggtgaagggcagaagaggcagagtaagaaacaagaggactggacaatgtccccaataaggaggtttcctcctgtcagagtcatctgttgttgctactgttgttttttctttttatccaagtaataatataaagaacatgggcaaaaattgctttgcaacatcacgacaaacactacagctacagctaaaacttggcagttttgtaatggacaggcttaggctgtccatctcacggaagagaggcagtaggaaaaattctgcctcaccacccaccacacactggggaggtgagtacattcattacgacaccttgttcaggcaagagggaagaatgaggggaaacattctagaagttctgtcaacatataaccatcctggtcataaagaactgaaccaaatacaataaagttgagaagtcaccatttctatagtgaatactgtactttaattcagatttaattaaccaattcacaagctattactctgaaacaaaaactttttactaaaggaaaaaaaaagaacacatacaacccaaagacaatttgattttactttattgaatactatcacacacataatatttacagatgtaattaaacagaatttataagattaccatgtggaatatttttcaaagttaatctgaaactcttaatgaaaatcatcaatacatgtgtgttacaatacaataatagaatgtagaacttttcagccaatatcgtgatggttcacttaataaaaactctcttttcaaaaagaggtaagtcggaggaaatataaaaaaaaattcagaaaaaatatttccatatctagtcataatcttccagcttttctgtaaaataaattatagactttctcaattgcatacatgactattttcttaaataccatatttaacttttagcatattggagttgtttttcttttatcgtattttcagcataggtttaaatgtttttcttatgtttcaaaaggaatacataatctaaatttaaaaccacatctgaatattactttaaaaatagcaacgaggcacgtggccaccatcactaccttggctctttattacggctggtccacggaagggaaccacatggacaacaaaagtgaaggagtcctctaaccagctctaagtgtgatttattgtagatgccagttgctttcacagacattaagaagacatcagaaatatagcatctacaccggtatgtctgagagaatacatgcatctgtgggctaatggtcctaacttccatctataacaatattcttagactagaacagacagaaaatgtagggattatggtagcacagtgacatatgagggagagttaacttctctatccgcacaaatgtaaaggcgtttcactctgattttcagtgagctagatttactacccatacacaaaagtcaagaattctagcatttctgatctttaaaaagtagagaatgtgctattatacagagttgattttgcttttgaaaaagcatagttcttcaaaagatattactatcatttttggaaaaactagatattaaaaggtaaaggatctaatcatatctactcattttgaaacatttcaaaatcagtgtgtcagtgctagtaacttctatattaaaactctgaaaagctaacttaataatttgtaatgtattcattttgttagaataacaccactgaaggggctgataagcattacttagaaaatcatgatgaataaataccatttattatccattatgtaaaaaatattcacttgttaaaaaagcttctggaaatggtagtggtgctgagttttagggtttgtttgtttgttttcaggtaaaatttttccttacatacaataaacagatcttttgctcaagaaatccatttttcagataatatacaggcaagtttcagaatgtcatgaattatcatgtaaataactggaatgtaaattaacggtgcttgaggggccatttttaaatacagaaagtacgcctattcatgaacagtttaagtagctgaaaaaatatatacaaaaataaaggttgaagttgaaacaatggtataaagtacacttgcaatctaaaccatggtagagagcatcttcatctagtgattgactattcaatgttaacatatgcatgcatctattttttagaaatcacatatacaggccaggcgcggtggctcatgcctgtaattccagcactttgggaggccaaggcgggtggaacacaaggtcaagagatcgagaccatcctggccaacatggtgaaaccccgtctctactaaaaatataaaaaattagctgggcatgttggtgcacacctgtagtcccagctactcaggagactgaggcaggacaatcgcttgaacctgggaggcagaggttgccatgagccaagatcgcaccactgcactccagcctggtgacagagtgagactcggtctcaaaaaaaaaaaaaaaatcacatatacatatgctagatatgtttctattaaatgtaaatatagccaggtgcagtggctcatgcctgtaatcccagcactttgggaggctaaggcaggtggatcacttgaggtcaggaatttgaaatcagctgagccaacatagtgacaccccacctccaataaaaacacaaaaattagctgggcatggtggtgggcgcctgtaatcccaactactcagcaggctgaggcaggagaatcgcttgaactcaggggtaggggggaggttgcagtgagctgagattgcaccactgcagtctagcctgggcgacagagtgagactccatctcagaacaacaacaacaacaaaaatgtaaatatactactataaatttgaattttttttctaaagcacattattttcttctgaaagttgccttttaccaactttaccatcaaagtttgttaccatcaaaacactgatgattgctgtgtcttggttaacagtacgttaatgtcaggggcacatagtagctttctcaagatgcatacctacctatatggtcaatagttgatcatttttcgaagggcatcataacacttccatttgtctgggatgtagaatggttcaaaaatgtgaggaaatggtgtgtcataaccacatactcttgatataggagcctctaggttcaagaaacattcctcctgcagacagagtcaggatgcttaacttcaagaattttttttactcacagaaatgaaatagtgcaacttaaaatatttcacttactaaaaatacaattgcatctaaggacattaaaaatatttaagtatactgtaatatgaaaaaagcaggtaacagcatgttcgcatgatcccagttttattatgtgttttcatgtatgcatatgcattttatacctgtatatatatctattgtctaagccaaactgggataatatcaaatacgctgttctacgaatataaatggaaagaattataaaaatgcaacaaatgttcacagtagttaactctgcagcatgaaactggcaataatatataccttctcattttctgtttttctcacattttatacaatgcacatgtattactttcataataaatgtttgtaattcctccatgccccagccagactgaacttctatcagttacttaactgtgttctcatctctctcatagtctagcttttgcagataatgctgggtctctggccactcacaccccaagtccacagctctttgcctgactgatgtgtgtacaaatctcaggttattacctgaggaatcactcccgctgggaagccttccttgacagcacctccccagccctacagggcagatgaggaaggggcttgtgctctgagctcccaaagcaccgaactcggcataatccattgtagttgcccaattatctgtcttccatgagagactatgagtcccatgaggctagagatctgatttaaacatgaaaacctcaaccacagtagaacactgtagaaaattattttcaggagaaaaaaaatgttactcaagtaaaatattcaaatttgaatttattttgaaatagggtctcactctctcgcccaggctgaagtgcagtggtgcaaacacggctcactgcaacctcgatcttccagactcaagcaatcccacctcagactaccaagtagctgtgaccacttgtgcacatcaccgacgccttcctttgttccttttcttttcgtttttttcttccctttccttcccttccttcccctttcttccctttctttttttttttttttttttttttcagaaatgaggtcttcttatgttgcccaggctggtctcaaactcctgggctcaagtgatcccctagcctcagcctcccaaactgctaggattacaggtgtgagtccccaagcccagactgaaaataaaacgtttaaaggcttaaaaaatttaaaagggatatgtgattaaactattctaaggaaaataatattacttttaacattcacagctattacttaaaataaaaccttcatatttattcatgtgtttacacattgccttgctttataaaggatttaaggaggtccagttttttttacatattatactatgttcacattttaatttgagcaaaatttttacatgaaggaatcatgatacctcatgctttatccctaccccctgtgtgatttcttccagtgacaagtgtattggggcagaaagaaaatgcaaacagcacaaattagctccaaagagaacctactggacatttacagacctccctttggccccaataactatcatgatttacaatatcaaacaccaaataagtgttggtattccctagcaactggaaatctccacgaacaactttaggacttttaatacacacggtttaaagagccacctaagagattccactactaataagctgaaaagagatgacagactgggtggattatttcttgtttgcaacaagtaattttaaagggctttaaattgtcaatttgggattaagtcggttttattactttagctgacactgggctgtttttccatcttccctgaatactgaactcttcataaacaagctatccatggagaattaagggcaaaatattttactaaacgtctttgattttatacctgttataaaatgactgttctcttgaaccagtaacttggaaagctggcctaccacaagaagttctgttggtatttgttaaaatcactcctttcagcataatgactaacatcatcaaactggatttttattttttcaaatagcaatgctcctaactcctcaagaatgcaagcatcactctttccaggaatacatctatatgtctgcacgagcatagaaaaacatctgctgtgaagacacacttgaactgtaaacagtggttaccctttgaggctgggaatgacaaggaggtgagagaagactccacgttgtgctttataatatattgttttggtttttcgaaaacagtattaattttgtaataaatgatgctgaaataaaggaaaacagtaaagtgaataatgattttcttatatgaataaaagttcctgtgttatgttacataaatttgtgattttacacatagggcttccttaatttggaaacgattactgtaaattatgtagcattaagttgttataatacgctattataagtatataaaatataaaaatcatggaagataattcaaggatatataagagaagactacgaataggatatcagtctttttaagaatatatgctaactgactgaaacagcttgaaattctcttcaccaacaaaagtatattaaagagccttaagttatttcttccatgaacttcactttacacttatttttaagcagttggaaataagacccttaggtcaattaagcagctgtacttacttctcactgaattggttcacatataaataatttatgtgtgagtatgtttctctgcactaccaccaaaacagaacaccttgttcagcctcagtgttttcatgcagaagctgtatacatgtacgtacgtacgtatgtacacacacacacaaacacacacacacacacagaaaaaaaataccgaatcccactggcaagtttgtagattaatgaagacaaagtatctctccattataaatacatgacgccataaccatagcaaccatgtgccctgaattttcatgacaattcagattaatcatattcttctgttccataacttaaaaaccatatttgatgacttttcattcagaaaaagtaagccacataaattgggaattaagtaatggcatagcctacagggctgttgagagacttacatgtattatgcagaatatgggctagaaacggggagtgttcgtttatggtctttctccccacagagctgtgtatgtaagctggctcagttcacgtggaacaataacatatgtggctgtgaggctccaaagcagattatagtgtaacatgtaaccagagacgacaggcacctagagaaacttttctctagctacttggggtctaaagttgcacccaggatccagtaagaaggactgaaaatgaaccccaaaacaacaatttagtaccgcctacatatattctgttggcaatgtgaaagcacatatgacaggtgcttaaagaaaagtagctatttcttccaaaagacgctgtgaaattttagaatatagtatttgaatttacttctgaatatgcctttttgcaacaggagaattttcattctaaattatgttaataataaaccaggcatgggctaaatgagttatattttatctaatttaaccatcttaacaaatccatgaagtcagtattatactccatttcacaggtgaggaaaccaagataaaggaggttgcccaagatcaaatcgctacatacacagccaagtaagattcgaacctgactacaaagcccattttcttagtcactcttctgcaaattttaagaccctactattgagaatagcaatgataagggaaaaaattgaattaggaataaagaagaatggtaatgtggaaggcaggcttggattatcaaggtttgacaatatagccttgagggccatatgagttaagttcagtcttagaagcctctttcacatataaagaaaggtgtaggctaagatatgtgaaggagctgaaaacacaaacttgatcatgaaggtaatacacagagcaatgaacagatggtcctgggtagtgggaacctcctaagccacactaaatgattccaataagcataactccaattgtttatatattagccatctggattgctatgcacattatagccagaaaagaaagcaaacaatgtgaaataacaattccaaatcattaaagtcacagacacaggcaaaatatcttcatttgactattttctgtaacaaaacaaaacaaatttacctttttgtcttgtttcatttttggaaaatgaagtatcttgttaaaattaggaaggacagacaacctttaaattttctagcaggtaagagaggacaagcacaaattaaaagaataagatccattacggttttaagtaaaatatatttatggggcttttaaaaattaagagtacgtcaatttattcccatgttttgatgaatgtaatatgttacatattatgtgtccataaaaacacatatattaaggttttcacaggtttccttgggatctctcaatatctaaccctatttctccattcaagttttaagtatgtcaatccctaattctccttgtcacagtgtcactggagttacatcactgaaacctctgtctcaggcattacacatcgtggcttcgctcatcctcaacaatttttttttttatggcaaggtttcataatataattgatacagcacggaatttggaattctatctgaagggatctttgttccattgtgacttaacctccccgaggtttatactgtttattcaacatcaaaatagaagtattacaattccccattattgcagtttcatattgttttatgactctattgttatcttgcctctatgtctacttagattctgcagtagcatataaaaagtacctggtttcatgcctgacatgtcatagtgctcaataattgctagattttacaagttaaaggaatcccatatttataataagcacaaggtattttaaataatagaacaaattatcattaaagacaaaattcaggtacacagaacggtcaaacctgaaaagtagcatccgtatagcacaatgcctaaacagctaacatttattaaacacttactaagcctaaaatgtgtaagaaaataccaaaaatacgtaaggcctgtatgaggaagaggggtggagagcactgccagaaagccttaaatgcactcaggcctctaggaaaggcagtgtccggtgctgccccctggtggggtgcaggacgcctaaacgctaattgctggttccggggtcgggggctggaaatccctccgcgcacacaaggtgcctatttcccactatagaaaagtggcctgtcagtcaacttccgaaaagttagagtaaaaaagcccaatagacaactggatgtaatgaacgtatacacactttaaaaaacagagtcaagaataaagaccatccaatatcatttggtgtgcttttaaagcaatcatttgctttttgttttttaatgcaagacaattccaggctcagatttatttctaagaacaattttggaataatttttactcagttcttctgacggaaagttggctacagcccattgtgcaagactatataccatcttgagttggaaaactgtgaagaaaagttcaaagtgagatcggaaaattataggtcttttatatatgttcctacttcttatatagctggtatagactgataaatttcctttcttttcctgcaaaactattaactaatttttctaaacatttaatggaaagccagaaaagcaggacattgtactaagaaacatatcataagtcaaaacaggcatacgtttcctgtaggattatctgataaatcaggattttatgttgctccttggaccaatgagaaacatcactccacaacttaatttccaagtagcaactcagaaaataaacatttaaattactttgcaaacagcaaggtccaggttatttcatgtaatcattatactaccacaacacacttaactatgagaatatattttatttggacaggactaaattataaatataatggataaatatatatgtaatataaattataaatataatgagtattgaacagaacatatagcgatcatggagctatcatttcttctctaggaaaaaaacattaagaaatagttttaaatgctgtgtgaatgtgcttacttttaaacctaaattggaacaccatttagtccttaattattaaattaataaaacagcagatattctgcttctaaatgcaattaccttctagaggtcataattagtagtataagagttaaactctaagaatatgagaaaaacaaaaccagtattctaaaatgatgtatagttgatacttttgaagtccgtgaactcacagatttatatttgtcctagttatgtaaggctagacatcactcagcttccaaatattatcacagaatatttactttaaatttgttttaaatctgccatgaacatttgcccatagtcaaaacatgagttttagcaaatgagaaaaaaatgattctggtctcttgaatcacactttctcagcaaatgagtcacagaaacctgtgaaggcagtatgccaacaactccaaattaatttcattactgaattaaataaacagaactttacgaatgtaaaatattatttttcatttaagctaatgctttaaacaatacatatcatgtttgaaaaataaagtttaaaaatagtatgtacccaatttttcaagagcatggatctatcaaattaattatttggaaagcagagtccctaacctacccccaaactaataggatgctcccccaaatgttagaagtatgcttattttattttgttaacaccatgcacatgagatgcacagaacaaacactcattgatataaggtctctcacttttaaaacacagttgaaccaatgagtaagacagtaaataatataatttcatccagatttgtataacacttaaaatattattatcaagcctatttcaacagtgcttctatgtaaaatcataatcttgactaaattaaaatctgagatctctattacttaacttcactgaactatcttcaatgcctgctgacttaaaaaaaaatccatctcttcctccttaatgcaaattactggcaatctggtaaatttggtttttttttgtttttttggttttttttgctaagatttctttccgctagttaaagaatggaactgaatcctaaattaggatttttatttaaattcagattccatttttaaagtggatgcttattttttgaagttagaacgaaatgttatttctgatctaaatgggtttccctggatacaatctagctgcctaaaacaaagttggagaatggtattaacaaattcttagaaataattagtagttcaaattcaacagctgtgtcagaataaaatcatacattaatataaaattgtcagaacctcaatatattacctatagaaactgaaataaattttaaaatcaaaatttaacattaaatcaataatttatgtattaatttagagattataacaattttaagaatatgaattactattttctcaaaactatagctttataaattttgctattttaaaatcagaaataagtaacaacagggaagtgacaactcatttctgtaatttataatcttacataaagtcactttttaaaaaagtacactgtgcttattgttgtccagagaccatacttaaatattttaaaatattaactcatttcaatttttataaaatctaaattagcaatcataaaggtaagaactagcacctcatataaaccactttgtttttccaggtaaaatctgtaaaagcttgtttctgctttcaaattctcccctgcatagtcttgaactatcaaagtttcctcaccattttcacctgcagagcactgtgagaaacaacggcaaaaaaaaattttcttcactaaatctctctgcaaaacattctgtttatttgctgtagtcagcctctaaagatgtttgaggctttaaaagttcaaagtctaaaatttaaattctttatgagatacactatgtgcaagttttgacatttaaaatgtactgggctaccatgcttttgttaaaacactttacattcaataaagaggaaaaaaggcaatgctctcaaatttccacagacgctgaagcttctcaaattttatagttcaaattcttcctatagaagaaagcactgacggcaacgtttgaaagtggaatttccttagaatgtggaagcataatgataaacataagcgacttgcagcactgggtcatctcatgaacaaatcgctctctgtaaggtaggatttctgatttgcttggcaccaagaaatgtaaaatactcctgaaaagtggcttttgatgatcatacaaagcattcaatttttcttcttttttttttttttttcccacaaaattcttcatctagcagtcttaacaccaccaaatggtgttctgaagacagaaatcaatcctggctaaagcaaccagacaattcttttgtctcacgaaacagaaaacatattcttttagaatttgaaagattagagctacattaagatttctcctaaaacttgttactgtcccaattttgcaacctgtttttaagtttgaagactaattacaaaacgaaactaccagaatagagtgatttctccctctctggcaccatctttctaaaaagtatgagaagccagacagtttttgaaaggattaaattagacaaaataaaaagtatatatatatacatataaaaaatgatgactgaaatatttgctattttacaaattgtaatcttttgataaaacagttttattttactgctttttcccttctctttaaatatgctaaatttcttttagtgtatgtttaaaagaatgcaaaggacttgctaaacataaaaaagacaagaaaagggggaggggggaatctatttttatctacacaatgccaaaagagatgtaccaatgtttttactaaaattaaacttttttttttttttaacagttaatcttgggtgccatagcaacacagcctttaaagcttggttttgctcagtgaataaatcagaccaagtcatttttcagcagtttaattccagtcaccagatcactgcaattttactaataaagcacagcagaaataaatgttctatactatcatcattagggaaatgtaatcagaaatttgttaattgaaccccattagtaaatttatctttgtactctcaaagtttaataattgaacaaattaacaaagcaaacaagtttctggcaggaatatctgacctaagtaagaaaaaattgcttgaaattgccctattatttatatgcagatgatttttgctagcatgatgagttcaaactattcattaaaacacatctagcaattgtaattattgtttgtatccaatggaaataaaattcagaattcaaaatatacttttctactatatttaccctatggttcaactttaaatttggttagtattttatacaaagaagtctttcagattgaatgtcttaatttgcatgcacacattttcacattcaaatttcaagaactgggagacatttcagaattaggggaaaaatacacatgcctccttttttactcccataattgggtaaatggtatgctgataagatgagcccagttttatacctattttcacaaagtacatattacatgctcagtatagacaaatttctaataaatctgataaaaccattgatccattaatgaagaggtagttagtgactggaatctggttctggatactttcatagttaagtataaaatataaaattaaaaatgcccagagatactatttattaataaacttaggtaaactaaatgtatatagttcatataaaaagctattagtcacatattttgtttagatgaaccagggcatttacttaataatttttatctacttacttggggctaaactacataaattcaatcatgtccctcaattaggaattacaggctactagagatacaggagtttgtgtatttgtcatacaccaaagataatgacttatataagcacccatggacacgcaaacaattccgtgcataattggcacatcccatcctggcggaaatccagagaaacaacatggaggcatatagaaaaaaaatgtatttgcccatatgcctgttttaaaaaaggaatatgtgcatgtgtacaaagaacaaaaaaacccagctatttagttacccagactaaatagtaaccacacagatattatttaatcataaataaaaatagctgtttatatagtctcctttaatcctttcaacaactttatgtagtagtaaagacaagaaactgaagctgggagaggttaagtgaggtgaccactatcacacaggtgtacaacatttgctggtatatgcaccaaggctcctggttaattttaggtgcactgcataagacttcaggtttaagttttcgtaaaagtcttgcttggatacaaggggaattctgtacttagtgctattattgtacctatgaaaaagagactagtagaattatctgcatgtttatgtcaagtccaataaggattttaaaaacatttataaaaagcttagccgtttaattcctttttgggggagctagggggtcggtcattggggaatacaggatctctttaatcagagttacagtaggttccgtacgaatttgtactttttttttttttctttttagtgcttgctgggaagatgagcaagtaagaggaaggatggacatgggtggaactttctgattaattcctagccgtttgcctgcatgcagggcatgagctgccacttgagttctaaaactggttttgaattctgatttgaacctgattctgacttgagatttgatggtgaacatatggtaggatgtaagtttgaaggtgttttttttttttttttactataagggtaaaaaaaatcatcagagtgcttcatcaataaattaaacttgttccctctcatttatttccttatttatggctagacaaatttaggtaactaagtaatttgattaaaatgtgacaactttttgacagattagaaaatattttacataaacatagtttacaagttttatcctagccttaacttaaactggaatataaaatttaacctctcctctcagtattttacagctattctccacagttaattcactttgtagaactctaatactaaagaacaaacttcaggagtatttaaagaaatgtctcgagtataaaattaaattcattttttttctttgcaattaaagcaacacataccagaacaagccattgcaattaaattaaccttaaaatgtaaatacaagtgcagtataggatctcactgtctcagactgcactctccagcttcaagtggtggttattggcacagccctcacggctggcactggggtgtttattaaagagctgtgggctctcatgagaggtgtaaagctagttgtacacacataagcgccatcaagcagacatgggcacatgctgatggatcaatccccttgcacaggtctcagttgtctgagacaagcatttcagtcatccctgcgaagcacagcttttaaaaactcttcaaaaaattatatatgcatataatacatctgggtttatggtgcattaaatttcatcattttcaattcctagtcccccccaaatgagcatgcttacaattgacataacaaataaccaacccccaaggattttctttaggtttcttcaaatgctaattatgtagcaaatctaattaagctcaagtgaatcacttcagcagtaggtactttggttacttcataaatgccaaaagggatgagaagtgtctattctccctccaaagcagtcatgctgtgtgccaaactgataactgttaaacacagctgcagagcaaatgtgcagttttggtcctgtaaatacagtgttcacacatcaacctgcgctgtgagtgatgtagaattcagaacaaccgactgcagattggctcatgttacatgagtattatagatgagtgctgtttcacccagcacagcttgagcagattttgatgggccatgaaagttccctctacctaagaatatatactgaaactctaaaaaccccaaatattgataaatttattggatcaacatctggttgaagtggtttgcttttaagctccatagctcacaagaataaaagtataaaggtcattttgtgtgtctgagagcacatttatggaatggttaacacaaaaatctattatttaatgtcatccctgaagaaatatatgctgtctttattataaatgtttttcctttaattccagtaggtaaaagtgcaaaacaaacctataagcaaatctaagctaaaataaactctttttattttagaaactcaatttccatggaaggaaatccttttcagaggggctctctcaactgggtgggttgccggatgcttaaggccatgactgcattccctccagaggctgttagatcactatggcaactaacttttccctatcaataagcaagagctacaaacgctaatattctgaaaaagccatttccttttctgtggcattaacaatataacctagtttcaagatagaaatatacctctttttgtgcaaaacgattatctttgctggtaattactagaattcagctttgcaaataaatgcaaaaatagcaaaatcagccactgtacttcagtttcaaaacaaggtaaaatttgtgacatagtaatctaaggatggtacagctaaagtgggttgggtgtgtaggtctgggcagaaaaaaaattgggtattttaggagcaaatgtcatatgagaaggaaaactgacaagaaaacaacacatgcttccacgtagctcttggagtttcttaaaagaagcacacatttcaacagttatatttcatacctgtagttgtttctagatatctaattcttactgtgtagggtaacaaataaattgacattttccaaattaaatacatatccttcctatttagggaggtatttgccagctttgtcttcactggttcgagtatcaacagctaaatctcttaagtggtgtctcattttaggtatgcaaaaacatctccaagtatcacatacacagatttacaagcccaaatggatcagaggtacaatgactgacatggagcagggatcagtaaatatttgtgaatgcataaatatagattaaacaaacaattccagtttgtatttctattctgtatcatcctggagtattaatgagctttgctactgatgaggccaaatatatatatatgtcagcaagacaggaagtagggtgtggatgcttttacttcttagcaattcctgaaccttcaactcatccactagatgccacactggtgccattttgatcatgtccctttcctagataaaaggttttcctggttccccaaagtttattctttatctctattttctccacaaagcccagtaaagacatgcacatgcctgccttcataccaaagcttttttttttttataagatcaccttgacacaagcctctctcttctaaaactcttgttttcctacaccctgctatcttcacattctacttttcaaagtcagctcaaatgcccttctccacgagcctttaggatgttggtactgatctttttaaaaatgcattcatgtttcaatcacttattaatatgtgagtgtccacaatgtccctatcctcatagagttttatgttttagttgggggaaggtgtttgaggagtgctaaaaaggaagtaagtaaggggtctgtgatagagactaacagggagctctgagttgcacagtatgctcaggaaagggctttctaaggtggtgtcatttgagaaggagaaaccagatctgcaaagaacccaggagaagcactcctgccaggtcacacagcaagtacaaagctaggaatgcagaaaggagcctggtgagatccagttattgagagaaggcctatgaaagggcagcaccagcacagggaggagggggagacacccaaagtgggacaatggagcagtaggaagcaggggacaaccagatgcaaccacagtgtctgatggccagttgaccagccctgccaggaagacagtaacagattgtcttcatactttacatggctatattttatagaatatatacaggggtagctaggaagcattacaagactctccaggaaacctctcagggttcatttataggatacccagaaatatcattagatgtgagtaatatttttgctggtaatctaagtgagacacaatacagtgagtggtaagtcaaacacactatcaatatgagcagatcctatgtttttgtaatttcatgaaaattattttattcagtaaaaaagtttttaaggagtaatactaaaatgcccatttctcagaaacttagaaaaattaaaataggggattttagaattgaaagaagttagtcactgtagtttgtaagtaattggaatcctttcttggctactattcaagtattttttctcttctagtaatctaatatatttattaccatatctagtgccttaaagatatcaatttcccatttactcacactactggtttccactccctatttcttacctctttcagtattttttaaatgattatgtattgtaaagaaaaaggctcaaaattgagcaacctagcaacatgcacaaagattgtatttttataaatgttgtctattgtatctttggcaaggagtaggaatctaccgtggagagaaacagattttcatctgctttatctaggggcagtaaaggaaaacctttctccctcattgacattctctctgtgttttcagtcactaaggctgattaaaatacagcaaattctgagctagtaccataataattttgctacctagcaacttggggtaattgcaagttagtctaaaaatgaaggcaaaataaaattagaaagttttctgtatacccaattatacaacgttcaggagggtatatttgttttcccttagattccgatttatgagatttctgattgtttgaaaattctactatgtcgcctctagatatgcactgatctcttataaagtataagttaattccaatcagctaactttttatgttgtgaaaaatgttccctttgggaaaaactaaagaatgacaaaacatctcaacttctttgggtttagggctaatattgtattagaaaggagacgagagtccttgtcctgaatctgttatcaactaggtgagtgacaagacagtgtagctctcccttttccactcaatcagccacactgccagtgtacactgatcagcatgataataaagaaaatcaaactccagtagctaaaagagtaaatgcccttcctgaatccttttaatagaatatatcgtagcatgcaatgtctggcacaaagcaggcattcaacaaatcaaagtttacctgcaaaatctagttttcccttatcttaatatctctcaggctgggagaatgagaagggcttgaaagtccttagtccctcaatactggtaacagaaacatagtctgaacaaaaagaacttcagcccttggttcttgacaaagctcaactcagatggtcgtcaggtgaccattttaatactaaaaggcagacaaaaagaaaagaacatacagatggtcacagagaaaaaatgaaaggaaggaaggaagggagggaggggaggggagaagggaggggagaaaaggggaggggaaaaggggagggaaaaaagagaaaggaagacattaagaaacaccaaggaccttatgaaatcattaaacacttttttaagaggcattattctgaataaatgctgaagggggctaacttcatagtagcgagatcacaaagtacataaaagctggccatattggtataatattaccaccataaacaaaatgggtggggaaagacatcttgaaagagaagtatgagaattcctcaaatacgaggtacagagagggcagagaaaacactatttattttgtaataaaaacctaaaaagttggacgaactctttcatggtgaaatgcaaaagactgcaagtttcctgagaccttcccagccttgtgggattgtgagtcaattaaacctctttcctttataaattacccagtctcaggtatgttgttataacattgtgagaatgaactaatacagtccccaaattaagaaatgttcaacttaaaaattttttgattttacaatggtgcaaaagcaaaatgtattcagtagaaaccgtactttactcatacaaccattctgtttttcacttccagtattcaataaattacatgaaatattcaacacttcattataaaataggctttgtgttagatgattttgcccaactgtaggctaatgaccacacttaaagcatacaaggctaagttacaggttaggtgtattaaatgtatttttgacctacgatactttcaataatgagtctactggaaggtaaccccatcataagttggggagcatctgtactgtttttgcaacttcctgctggcttatacttatgtcaaacttaaacaatttttttttaaaacataggcacaggttaaaaagagtaccttgctaatctgaatcttacgataacaaagaaggcatatatatgagaaggtagaaaggctggaaattggagtcaagtaataaacaaggctctcatgtagtctgtcagtaaacatctgtgtgactctgggcaagttacttactctttttttttcttttcttttgagactgagtctcgctctgttgcccaagctggagtccagtggtgcgatctcagctcacagcaacttctgcctcctgggttcaagcaattctctgggattacagacacaagccacaatgccctgctaacttttgtatttttagtagagatggagtttcaccatattgcccaggctggtctcgaactactgacctcaagtgatctacctacctcggcctcccaaagtgctgggattacaggtgtgagccactgtgcctggccaagtaacttactcttcttagtctgttttcctcttttgtagaaagggtagtcctctatcctacaaagtttctaaaaattggatgtgttaattttagtgaaatccagtacatgattggcatacagtggatcttgaaagaaaaatcagttttcttgctcctataacctatactatactatggtgaaacaaagtgagagacagacataaaacagaatttcataggtcaacaataaaggtctcaaatgccaaatctaagtgatgcctcagcctggaggattacagagaagatctccaagaataccggacttctttcattcatcaaacagtagcattcaggctctgctatagtaagcttatggcggagactctttcctgaaaaatgtatccccacatctttaaaaataacgttttattttgaggtattttaaaatttagataaaaactatgaaaacagtacacagttttcccatatatcccacaaccggtttccaccattgttaatattattaacatcctacactaatatagtgtatttgtcacaattaatgaaccagtattgacacattaactaaagcccaacctgtattgagatttcctcggttttgctctaatgtcctttttccactctgggatcccatccagaatccaaattacattcagtcctcttgtttccttagtatcccttggctgcgacagtttctcagacttttgttgttttttgatgacttggacagttttgaggagtactggacatatattctgtagaatatccctcaactgaaatttgtctggtgtttctctcatgactgaactggggttatgagatttttgctcatgtgtttttaatcccaaactttaatcccaaattaaacagaagtaattgaagtttgacaatttaaacttccaaaactagcaacaggttttctgctcattgtctagttaagaaactgctttgagataccaaatcatttcttaagaatgtgatcaccaccatcaaatggattaactcaaacatgtgtcatttacattgtatacaaaacagtcctaaaattaatagttatgggctttatcttaaacagtttttagactgttaactattttatttcaactgctaatgtcattttgcaggaggctttgagagtcatttaaaattcttactagcatttgttccatttttcagacaaatagattgcagggtcttaaatgacatacctagcaattacatttttctataaaatagtaaccagaaaaggtaaaagccacacatttgcctgataatctccagaaatgtaattatagaagtcctagattctgccacaacatcaacaatgtgaagtaatgattttttcaaaaaaggatcagtcagtaagatgtgctacagactgctatatgctacagtgtttaagttaataaaccatgtttgatctagtaaattatttgatgtttattatattatattctaaaacaccacagatttttttctctaaatatttgatgctcagaaaaatatcagtactatatagtactttctatatgttattcaaaaccgtccccatacaagaccactcataatttgcacatgtaaaataactgattgcattgaatcactgtgacttttacatatatagtgggtagtactggctgtctaccagcatcctttcccatcttcctatgtactttcttgattgacttcacaaatgagcatattccattcccccagcctcagttactagttgaaatacgaccttaatggtctaatcagggtgaattcagaactcttgctgagaactgctggagccatatggccaccatgagggaagtcaactttgagatgctctgtcacccagtttaagaaagaaaaggacgaggagcagagggagcaggatagcagtattgtagacaggggctggggagagaagagagaagggagggtagtgagaaagggaaaggtgtatcaaaattaggaagttttgccaaatgcatgttcatccctggttcctaaattgctgatacactgccctaggggagtagctgagactcactactatatatgctaatatatatatatatgctagaatgttctttctcaggtatgttgtgtttcctgctaattccttaagttacagtcccatctcttttctgcctttcactaccaaaacttatcaaaataagtctacatctcctgtcctgatttcttcctctccctctcattcctacctaatcaggccatacaacactgtcctatagtagctctcatacttagctgcccattaagatcacctgaagggctttaaaaacagatgcctaggtcccacctacagaaagtcttatttaattattcttgggtatggtcacggtatcagaattttaaatgctgggaaattgtaatggataaccaggactgagaaccagctcactgctgaatagctattataaacgacctctgaatgacttaattcagtgatttttttctgagctgcctctactgtaagatgaaagggtgggggaaagtcaccatatataaaaaataattttgggccgggcacggtggctcacgcctgtaatcccagcactttgggaggccgaggcaggtggatcacgaggtcaggagatcgagaccaccctggctaacacggtgaaaccccgtctctactaaaaatacaaaaaattagccggccgtagtggcgggcgcctgtagtcccagctactccggaggctgagacaggagaatggcgtgaacccggggggcggagcttgcagtgagccaagatggcgccactgcacgccagcctgggcaacagagcgagattccgtctcaaataataataattttgctttttctcactaataattccataaggttggaaaaattgaaaaggagcagcacaatcagtgtgaagaaaagagctctaggaatatgaaagtgagttatgagggcaaaagtgtgagaattctaaaagaaatactggatgagaaagtgtatgttagggaaatactgaaggggaaagagttagaaatcactgtatgaaaaactggccaacatacaaattcctctctactgtagaacagtttgaattggtctatacgctagaatgtaagcccatttactaaacactgattaagaaaagatctttaaggggtttttagtgtcttaaaattcatgtatgttgggaggcgatatctatgtattaaaagaaaatataagctcacaatttatcacttttctgtgcagttacagaaacaaaattgataattaaaaaaacaaaagtcaatttgtactatgtgttcacaaacaacacaatacttcaaaaggcattaatagcagaaaacaaatgaagaaagtgggtttgtgtaaccaaacacaaaaatattattacaaacagacagctaacacctatggagcatacaagatgctggtattaagcatgtgacattatctcattaattgtcatgagccctatgagagggctgaaccttcatcatccccttcagagatgaggaaactgaggttcagaaaggtaagtgactagtccagttatgcactttgcatgtggcagaacagtatctgaaatcagctctgtccaattccatagcatgagctcttaactgttatgctccacttttataaattataattgattcatcaagattagttaaaaaatttttaaacccacaggcattctctgctgtatgcaaaaaaaaaaaaaaaaagaaaaaagaaaaaaaaagaagaatcattaggagaagtaacagagaacatttggggtaattataaaacagcaagaacagaatgcaagagttagtttaacataagatgtaaaatccagagtcagtcactctggggattctccataaatgtttattggtgacgatggaggaattaaaattttatactattcttgatgcatgctatttttgcaactttaaagtccttcttttgtgagtatacttcccattaattttgcttttcatttacacacaactgtaggtcactaagccaaagtctcctctaagtaaagatggttaaggggatcccaatttctaataaatccactttagaaaacacacgtctgccaggtgtgggggctcatgcctgtaatcccagcactttgggaggccgaggcgggtggatcacgaggtcaggagttcgagaccagcctgaccaacatggtgaaaccctgtctctactaaaaatacaaaaattagccaggcgtagtggtgcgcgcctgtaatcccagctactcgggaggctgaggcaggagaatcacttgaacctgggaggtagaggttgcagtgagccgagattgtgccattgcactccagcctgggcaacaaagtgcgactccgtcaccaaaaaaaaaaaaaaaaagaaaagaaagaaagaaaacgcctatgtctaagagagaatgtgtgagaagctggcttccatggacctgatgaatggtaccattacagtaaagaaaagagcaatgatggcagtattctgcataagtacataccttttagttgttaagtaatatacatataaatgctttatacagtgaagacccaaataggagcatccctcctcttaaatgaatgctccttggagcaagtaccacattctattaatcattgcttctcttgtgctcagaaaaggcagtagattccatgtaagtatcttctgagcttacttaatattaaatactacaatacatatatgaagtcagaaaacacatttgatttcatgatggtatttttccatcaattgcaggtgcaattgtttacattttacaaaatgtaattggaagtagagaataacggaaagacagaagagaatcattttatgttttgattactattgaatattttatagttcccaaggatattagacattagtttcctgtttcatattagttgggatacacttaaaactatttttcatttaagggatttaaaaaattcctgttttaaactttaggcaaagttcaagtctctggaagtttcagtggattcacgaaaaataagttatgggcatgttgataaaaaatataaacaggtgtaggtttaaaaggaccactaagaattgaacatagggcccttatcagcctcacacataaggaatccaacaccatcctcatgaccacatgatggcaacttgtcaatgtccacatgaattacattaccacaaccattccacaggagtcctgttcagataatccacctggacgagggataggactatagaaacatggttttccactacaggttattcagtagaattgaggaaagatcccaagttatgagtcaggagacatatgatattctgttctctagatctcttcccatccagatacttaaggatggaaaatgtgtactgctcctaaccactactgatattctgtacccaaggcagacatcactaattatagcatccttctcagcacacattctaggaagcacctcccaagagtgacaacagctgcatggggagaagttatcggccctagatgaactatattgtctaatttatgatctgttaaaaaataacaccactttcataatataagcttgtttaggttaggatagaatctatcctgggtgttcttggtattttttactggctctgtactaatttcatattttttcaggggacaggggatatcagaggtatagcaagaaaatatctcatttttatgagattattgaaggtttaatttactcagtggtcaaaataaaaatcgaagaaggcattatactttcatttacatttcagaaatatggccattgttgtacatgtataagtgacataagaaaatatttgctttcactgtgtttcttcaccatcgctaccataaccaaatgttgataatttttattagaatgtcatttgcaaaaatcataattgcctatcaatttaaaattgtaaaaccaatataacttttgcaattttatgactatgcaaatattaggagcacaaatttctctgtttttgtaaaaataggactgattcttctacaggcctccaccctggaaacggtcgctgaattgtgaactctggatacttaagtagagcctgaagttgagagacttagatttgggtcctattagtgaagaactagaaatgaagttttaataatgttttgcaaactcggaaagatagaaaatagaagcaaacatgaaaaacactacaattatcaagatgtatgaaaaaagagaaaggacataaaaggctgtttagatgatacaaattcttaacttttatgtcagaaatggtcaatcataaggtagaagaaagaacatattattgtgactgtaaccaacaggtgaaataagaaattatcaaaacctgttgcgtctgtggaacacaaaaatttttttaaaaagatatttgtctatgtacattataaagcaagaacccagaactatataaggacatatttgctactattcacaatatgatactgtaactaataaaactaaaatttaaaacatgtaaacatatcctatttaacttggtaggaaaaataacttatttataatggttttataaaagctgaatacatgctttcattttcatataactcagatttccttttgcttatttgagactaaagggaaaatactcaaattttagtatatcttaaatttagcagtatttacattaggtaacatttatacaatgtttcctatttcactgaagatttctaagcagatctaacatgtggctgacaaaccaatccctaaaagaactgatcttatgttttgtctattaatattttaaatgaagctactttgaacttcacttttatttaagattataattatacaccttaatcagagagaaaaatcaaagttccttttagatttacaaatacatgcataatttacagaagagaacaatgtgagatcttcctaatataaattaagcattataaattatcttattggaaactgacaacgcctacacctgaatacacatattcttactctggaagttgtatacacctgccttcaaaatgcaaccacttttgcagtacaaccagagggctacacgtttccttaggcattagaggcaactcctaaaccgtaagtaagagggagaagctggcatgaattaaaaaacttgtttcatatgatgatgtcagaaaagtgatgagtaattcaagagagattgtagtaataaatggtgacagtgatacattacaataatattgttaaatattttctgggtagtaggtcccattctaaaagcttaactttaataattcattcaaacctcacaattcagcaagttgggtactactaatggaaaaactaaggattaaagagctaaaaaattcatataagcccacatacctaaagagtcagccagtattctgattcctactgattccctctaaaaacagtgagaagagcaatgcagattgtttcatgtaattcttttccacataaaaaattccacaagcatagcttattccataaggcctgagtgaaaggagaagacttatctggttagtagtgtcatgacatctgctgctcaaccctagctgcctctggacaactttccctgaatccctgagggaaatttaagggcttatctttcctgtgctcccattataacagataactaacacacatatataaatatacacatatgtcaacccttggtatccataaaggattggcttgagaaccttccatagataccaaaatctgaagatgctcaagtcccttttataaaatagtgtaatatttgcatataatctatgtatatcctcccatatactttaagtcatctctagattatttacaatacataatatgatgtaaatgattgttacactgtgttgcctaggaaacaatgacaataaaaaaaaagtctgtacatgttcagtacaatttttttttctaatttcttttcttttttttttttttttttaagagagagagtctcactctgtcacccaggctggagtgcagtggcacaatcttggctcactgcaacctccacctcccgggttcaagcaattctcctgcctcagcctcctgagtagctgggactacaggtgcatgctgccatgcccggctaatttttatatttttagtagatggggtttcaccgtattggtcagactggtctcgaactcctgacctcaggtgatccacttgccttggcctcccaaagtgctaggattacagacatgagccaccacgcctagcccccaatttttttgatctgtggttggttgaacccacagatgaagaacacagggatacatacagaggaccaactgtatatacagacatccatcccacatacagcaatgcttgtatttcatgtccttctccctgtttgactattaatttcttgagggcaggagccatatctctatatccaattctccccacatcttgcacatttgaatgattaattgaataaataaatttcagatctggttttaggagctccaaacttctctttatagaggaaagctacaatgggaagggtgttgggaatgataaggttgtggattattacccaaacacccacaattgttggggttccactgccatttctatagagtacagtgtatatcctgacacacagagataaagttataggaagaacactggcagactgaggaccacaggagggaaaacatctcaaaacaagaccaaagactgctggaggaaagtagagggagagacagccaaaatccagtctgttacaccaatagaaacagtcagctgagaagccctggcctggagcctgatacactgggttttatgtttttaaaatgactatatcctgggcccactgtggtgaggtagaagagaaatggctaggttccttcaagtcaccagactagtgtggtctactaaggaaaagagaaagggattgtgatatgcagaataattgtccccaaaatgtccatgtcctaatccttcgaactacgaatatgttaccttacatggcaaaagggactttgcaggtgtaattaaaaaccttgagatgggaatagtagcctggattacccagatgggcccaacctaatcacatgcctttaaaattggtgaacttcccctagctgtggtcattgagcagatgctgtgactatagaagaagggtcagcgagatgcgcgagatgcaatttctgtggctttgaagacagaagaagagccatgaaccaaaaaatgtgagaggccgcaagaagttagatggggctaggaaacagatagtcccctagagaattctccagaaaggaatgcggctctgttgacaccttgattttagaccattgatatgtgtgttggactctaaacctacagaactgtaagacattaaatctgtgttgctttaagttgggggtgtaccctttaagttttgggtattttggaacggtatttgggtattttggcagcaatagaaaacacagatatctttgaattttagtcaagtctgccccttaagggtaaaggagagaaactgcacaggccctaagtgtgtatcagaagcaaaatcagagagaacggccacatctgatccagacagctcaaccaaagatgaaagcaattggaatacaaatgttttaaagaattagagcaagcccagtgagagtcctaatttataaaaggttgacagcgtaaatctttctggagaaatgctgctctaattctaaaccccaccctaagattctgttctgggaagcctgatttgagccaactaagcacatttgaaaacaatcagaataaaagccacactgttgggtgcttctaaatagcttctgccctccactgcgatccaaggttggcatagtctatgcatgaaacaagaaggcagtccacaaagctctgtaacaaaaccaatgttcaggctgcagggaaataataactagccactgagagagtaaaacaaatgagatcagtttcctctcatttcttccattccttctaggcaaagaaaacagaagtcacaagacaaaagttattggtataaagccctttaagaattccttgtgggaagtaccttgatttcataattttctccatttattaagagtaaggttaaataaagaatggatatcataaacatatttgctaatattgttacccaccaaatagtcatatgatatgaacttagtggctgtggaagaaaagttctgatgaaaaggagtatattttatattcttatgaagaactgaaataaagtcgatgcaaaaggaaaaaaaggctttgaaaaataaaaaaaaagcagtttgagtttcactgaatattttgtctcataatgatacagaattggaattacttttcatacgcaaacaaaatcattatgattcaaggaaatctaaaacaagcatggcttaaaatcttaagataattggactgtgaattaaaaaataattcattgaggtttataaatgttttaacatctgttttatgatctgtcaaagtaaattatcctaaacttgacactgtactgcctaatgaagcataccagttattttcactgtttcggaatcctaaaatcacagcataggaatgaaaccttagaagtgaccctagtccaacaacttgcctgatgggaggaagatccccgaaagatattttcactttttaaaaggctctaactgatacagcatttttctttacagaatcttttacaggccagttaatactctaaattgcggtgtaaacaggaagaaaagagaaggaattggttacttattctgtgcttactatatgccacatattgtggtaggtgctttacatattttccataattcactccttacaccatgccagtgaactactaagagcctcattttctagacgaaggaaacaggccagttgcggtggctcatgcatgtagtcccagcactttggcaggccgacgtggaaggattccttgagcccaggagttcgaagatacagtgaactatgattgtgccactgcattcaaacctgggagatatggcaagatcctgtctctaaaaataaataaaaataaataacttaaaaaaaaaaaacaagggatcgggggccaagacggtggaacagaagcaactgtagtgcgtggcactcacagagagcaacaaaaggggggtgagtaaatacagcaccttctactgaaatatccaggtacttgcactgggactgatcaggaaaacaactcaacccagggagaatgaagaaaagtatggtgaggtgatggcccaactgggagtgacatgtagtcaagggaacccccacccccagttaagggaagcagtgaacgaatgtacaaccctaagaaaccacggatctttgcaaccctcagatctggagatcccctcatgagcccatgccaccagggccttgggtccaacacacagaactctgtggagtctcaacagagcggttgctcaggcagcacagagacccagagctttacatactctggccccgggatccccagcaaggcaggaggttcatacatacccctaggaaggcggctaaatctagggagctgagcagtgtcagttctacaggccccatttcctcacaagataagacccagtggcttggaattccaggcagctggaaacagtgtggaggctgcctgagaggggatggaaccccagtggggagaggtgggctgccatctctgcagtttaaacaactcagccattccagcccgtgggctttgcagagtacaaacggtctggatgagcagcgagtcccgccgcacagcacagctgctttgccagaatgtggccagactgcttcctcaagcaggaccccgatctattccttctcgctaagtgggacctcccaccagaggcctgagctccccctaccagcccatattctatggacagaggtctggtctctccctcggacagagtgccttgcgggaggggcaggccaccaccttggttgttttgacgactcagcggttccagcctgcgggctttgaagagtccaagctgaccagggcaaaagtggttccacagcatggcacagctgttttgttgaggcattgccagactgcttctttaaatgagaccccgagttacaaatccccctcgagggtgggtcctcccacttggggtctccagccacctccctctgtgtactacagctgacaagagttctaatttctctctaagacagcgggcatggtgggtggagcaggccaccacctttgctgtttgggtttctcagctggtccagcctgtggaccttgggcagcccaaatggatcagggacaaaaggggtcctcagtaaagtacagctgctccaccaaaacgcagccagattactcctttaagtgggaccctgatcccagttctcctgactgagtgacagctcaagcagacctgataggtatctacagaactctctacccaaatagaagagcatatacattcttctcattgtcacacagcatatactctaaaatggatcacataatctgaagtaaaacactcctcagtaaatgcaaaagtactgaaatcataataaacagtgcaatcaaattagaactcaagattaagaaaatcactcaaaaccatacaactaaatggaaattgaacaacctgctctgaatgacttttgggtaaataatgaaattaaggcagaaatcaagaagttctttgaaactaatgagaacaaagatacaaagcaccacaatctctgggatgcagctaaagcagtgttgaggaggaaatttatagcactaaatgcccacgtaaaaaagctaggaaagatctcaggttaacaagctaacatcacaagaactagaacatcaaaagaaccagaaaaccaagagaaaacaaaccccaaagctaggagaagacaaaaaataaccaagatcaaagatgaactgaaaaacgcagcaacacaaaaaacccttcaaaacatcaacaaatctaggatctggttttttgaaaaaattaataaaataggtcaggcgcggtggctcaggccaggtgtggtggctcacacctgtaattccagcactttgggaggctgaggtgggcagatcacctgaggtcaggagtttgagaccagcctggccaacaaggtgaaaccacgtctctactaaaaatacaaaaattagccaggcatggtggcggatgcctgtaatcccagctactcgggaggctgaggcaggagaatcgcttgaacccaggaggcagaggttgcagtgagctgagatcgcgccactgcactccagcctgggtgacaaagcgagactccatctcaaagaaaaacaaaacaaaacaaaaccactagctacactaataaagaaaaaaagagagaagattcaaataaacacaatcagaaatactgggatattaaataatcaggatattaccactgatgccagaaatacaaacaaccattagagaatactatgaacacttctatgcacgttaactagaaaatacagaagaaatggataaatttctggacacatacaccctcccaagactgaaccaggaagaaactgaatccctgaatagactaataacgagttctgaaattgaggcagtaataaatagcctaaccacaaaaaaagcccaggaccagatggattcacagctgatttctaccagtgctacaaagaagagcttggtaccattcctactgaaactattccaaaaaatcaaaaaggatggactcctctctaactcattctatgaggccagcatcatcctgataccaaaacctggaagagatacaacaacaaaaaactttaggccaatatccttaatgaacatcaatgcaaacatcctcaataaaatgctggcaaaccaagtccagcagcacatcacaaagcttatcgatcataatcaagctggcttcacccgtgggatgcaaggttggttcaacatatgcaaatcaatatatgtgattcagggcaaaaacagaactaacaacaaaaaccacatgattatctcaatagattcagaaaaagccttcaataaaattcaacatcccttcatgttaaaaatgctcaataaacaaggtactgaaggaacatacctctagctactaagagccatatatgtatgacagacccacagccaatatcatactgaatgggcaaaagctggaagccttccccttgaaaaccagcacaagacaaggttgccctctctcatcactctgattcaacatagtcctggaagttctggctagggcaatcaggcaagacaaagaaataaagcatattcaaataaagagagaggaagtcaaactatctttgtttgcagatgacataatcttatatttagaaaatccatcatcttggccccaaagattcttaagctgataagcagcttcatcaaagtctcaggatacagaatcaatgcccaaaaattactagcattcctatacactaacaacaggcaagccaagagccaaattatgaatgtgaactcccattcacaattgccataaaaagaataaaacacttaggaatacagctaataagggaagtgaaggacctcttcaatgagaactacaaaccactgctcaaagaaatccagagatgacacaaagacatggaaaacattccagactcattaataagaactgatatcattaaaatggccattctgcccaaagcagtttatagattcaatgctattcccattaacttactattgacaatcttcacagaattagaaaatactattttgaaattcatatgaaacctgaaaagagcccaaatagccaagacaatcctaaacaaaaagaacaaggctggaggcatcaatgttactcgacttcaaactatactacaaggctacagtaaacaacacagcatgctactggtagaaaaacagacacacagaacaatgaaacacaatagagaacccagaaatagaaccacacacctataacaatttgatctttgatgaacctgacaaaaacaagcaatggagaaaaaattccctgttttatatggtgctgggagaactggctaatcgtatgcagaaaactgaagctggaccccttctttacacaatatacaaaaatcaactcaagatggattaaagagttacatgtaaaacccaaaactataaaaaccctagaagaaaacctaggcaataggacataagcacaggcaaagatttcttgacgaagatgccaaaagcaattgcaacaaaagcaaaaattgacaaatgaatctaattaagagcttcttcacagcaaaaggaaccatcaacagagtaaacaggcaacctacagaatgggagaaaatttttgcaatctatccatctgtattagtccgttttcccattgctcataaaggcatacccgagactgggcaatttacaaaacaaagaggtttaatggacttgcagttccatgtggttggagagggctcacaatcatgggggaaggcaaggaggaacaagtcatcttacatagatgatggcagacaaaaagagagagcttgtgtagggaaactcccctttttaaaaccatcagatctcatgagacttattcactatcatgagaacagcacgggaaagatctgcccccatgattcaattacctctcactgggtcccacccacaatgtgagattgggtggggtcacagccaaaccatatcaccatctgaaaaaagtctaatatccagcatttataaggaacttaaacaaatttacaagaaaaaaagaacctcattaaaaagtgggcaaaggacatgaacagaaggacacatctcaaaagaagacatacatgtggccatcaaacatgaaaaaagtgcaacattactgttatcattagagaaatgcaaatcaaaaccccaatgaaataccatctgacaccagtcagaatggctactactaaaacatcaaaaaacaacagatgctggtgaggttgtggagaaaagggaacacttttacattgttggtgggagtgtaaattcaaccactgtggaagatgatgtggcaattccttaaagacctagacacagaaataccatttgacccagcgatcccattactgattacatacccaaaggaatataaatggttctgttataaagatacatgcacacatatattcaatgcagtactattcacaatagcaaacacatggaatcaacctaaatgcctgtcaatgatagactggacaaataaaatgtggtacatataaaccatggaatactatgcagtcataaaacagaacaagatcatgtcctttgcagggacatggatggagctggaagcgattatccttagcaaactaatgcaggaacagaaaactaaataccacatgttctcacttataagtgggagctaaatgatgagaacacatggacacactggggacaatgacacacaccagcctgatgcagggctttgggttggaggaggaagagcatcaagaagaatagctaatagatgctgggcttaatacttgggtgatgggatgatctgtgtagcaaaccaccaggacagatgtttacctatgtaacaaacctgcacattctgcacatgtaccctgaacttaaaagttggaaattaaaaaaaaaaaaagaaaatgttgtatatatacaccatgcaatatcatgtagtcataaaaaggaatgagatcatgtccttgcatcaacatggatggagctggaggccattagcctaagctaattatttcaggaacagaaaactgaatacatgttctcacttataaatgggagttaaacattgagtacacatgaacataaagaaggcagcaaaccactgaggcctacttgagggctgaggttggcaggagggtgaagatggaaaagctacctatcagttactatgcttattacctgtgtggccaataatctgtacaccaaatccccgtgacacacaacctatataacaaacctacacatgtaccccgatactaaaataaaagttttaacaagtaaaatggtaaagaataaagccattttagtatggaagagaaacatttcaccagatggttaaataaagatggcaagccacaagctattcagtaaaacaaacaaacaaacaaacaaacaaacaaaaaaaaccacaggccaaaatacatgaatacttactcttttgttaaaataacaaagtcattattacacaagtaaatatttcaaagataaatatttttataaaattaatgatgagactatagaaaggatgagactgtagaaagtatgagacagaaaaagtacacagaatgcactttgaatagctcccaatattaaaatttattgttgataatctatacttttggctgggcatggtggctcactcctgtaatcccaatactttgggaggccaaggtgggcagatcacctgaggtcaggagtccaagaccagcctggccaacatggtgaaacccctgtctctactaaaaatacaaaaattagccaggtgtggtggcaagtgcctgtaatcccagctattcgggaggctgaggcaggagaatcacttgaacctgggaggcggaggttgcagtgagccgagatcatgctactgcactccagcgtggttggcaaaagcgagactccgtctaaaaaaaaaaacaaaaaacaaaaaaactatacttttaatagtagaccaccccaaaacacaataggtttattataaagaaatattttatagcaaataatagcaagtacacaataaactatagcatttgggtacaattatgaaaatctatgtgtggtaggtatatacatgtgaatggcaaggcaagttaagaagaaaatctacggccgggtgcggtggctgacacctgtaacccagctctttgggaggccaaggcgggcagatgacgagatcaggagatcgagacacggtgaaactccgtctctactaaaaatacaaaaaaattagccgggcgtggtggcgggcgcctgtagtcccagctactcgggaggctgaggcaggagaatggcgtgaacctgggaggcggagcttgcagtgagccgggatcacgccactgcactccagcctgggcgacagagcgagactccgtctcaaaaaaaaaaaaaaagaagaagaagaagaagaaaatctacctgtgttgggttttttttccccatttaatctgagtagtactgtttaattatatctacaaaattatatacaataatataagatctgatagtaactttgcttaatgtatgtagtagaaaacatgtttgaacacactttacattaataataaatgtttaggggtatttttgctcttttatttcttctgaggcttgtagcagtgagtaaacaatctaaatggtcaaaaatagaggaatatttaaattactatcatatgatggaataccttatggccattaaacacgacttttgaacaagttaagaatatgaaacaatgtccatgatacaatgaaaaatgaaaataagctggaatcaaaacacacagcacaatccccaaattgtaaaaataatacaaataaacacttgtatacataggggggaaatgaaaaaaaatagccactgcttagtggaccttatagcttagtcttccaattttgttcatcttattttattttatattataattaattcatatatttgttttatttctcactagactatcagctcttccaaggtcagtgaccatccccttagttgtgattgtagaattctttgcagtatctggcattcaaaattttttgctagattaaattgaataaaatgtaaagtagcccatgatattacttttgggaataatttttatgtttttaatttaattatttgaagttgcatttgcagtgttaagtagtccaaaacacatatagacacattccatttgaatggattatctacaactttggtaaattttatactccattatgaagtgtgtgcttcatcttctactaaaataaatctgacaatatggtctaacaaaagtcaatctggacatttacacagtgttgtgtgttaaaataggcctaatgtgaatacaaataattttttttacattttctataatggctagatatactttatgtttgtcactttttctgttgacgatcttgttatttttcactagaagattttttttagtcattcatggacccatctggagacgtttaagttttaatttactgaaaatttaacagaggttctttcatgggggtatatctgaaaaaaatgtaatagaaaatcattagcactgtgaagcacagaatattgacagagggggcaggtggatttaatattggatacagttcaattttagaatatggaaaaaagaatataaacaatttattacattcctattaaatatctgtcaatgcacaagccactttgtatatgttagctcatggaaccctatatgttagctataatcatcctcagtttacaaataaggaattgagatttatatttatacatgaaaataagtttcttaagaaaacacagctattaataagtagtaggttctaactgcagtctgtatgattaaataaagctgtttcttcaaggccattatgcctcttgggaaagaaaagttggtggtgaagacaagttgaaggactagggagcgagtctcagacttagctactagttatgtaacttaaatgatgagagaggcttgaggaccccggctcaatatgaggaacatatctgggatatgctggaggttggtccaatgaatacttctggaaactgactctgacctcactgtaaccaccatctaggactgtattgttctttacatgtaccagtcacttgctttcagttaccaggtagcctcatatcaagtctccagaagaagagcctccaggaggcatcaagccaacttccacaaggaagctggggtcaggataaaggaaatgagagtactcaagcctgctatgaatccacagctgtaagactccatgaaaaaatgaaaagatatatctccatgtgacagtatgctgtgtcatcatctgatttatctgtttccataattttctgtatcatttgccattaaggaaatgaaattattgatctgatttgttggtgtctatcaacacacactgttgccacaccttgcaaaggtttttaattaactgatttctgtgaatggctggcttatatgtttatgtgtccaggacacttactcattcatcaatctcagagaaaatcctatattctttatgaagtcttctggactgatttgcttaggttcactcaggcaccctttttttatgtttagactgtactatttacatatccccattgtagtggatctcagtaatcatgctgttcattgaaaaatatctccctaataaactgatagttatttgacctcctagacactttaaacctcagcctataccaggtgttcactattcacatgttaaataaatatgttattgtgtttatcacttaaggtatgtactatttgaatacaatttaacattaaattaaacttaatgcaaagtattgtcaaagagtaacacaaggatgaaagcattttgatgaaaagaataaaggtgtaaacaaaatgaaaagaagagctaatacttgctgagcactatgtgccaggtgatgttccagttttacatgtattaattcacttaatcttcacgatagccatatggaagaagtactgctattttttccattttccagatgagaaaactgaagcagagaaagattaaccacccagcaaataagaagtagtgctgagatttgaattcaggcaggctggctctagattcactgctgaatcactgtcaaagtcctccctgtattaggcattattatattccttgtcatttaatccccaagagcagttcagtaagataggaggaacatcctaggaggacaagtcaagttaaatcaacctcatctggtcccatggtaggtgagaggcagaacaggtgtcatcagtgctgtgtgttttggggtctcttaagggacagagacaagtgatgtccacaacatctacatgtggggggctcctttgcttcaacatgtagcagaaatcagccctcactcagttcttctttggagtatcttggttattttgggctcttactcatctacaacattttagaatcaatttgtcacatttcaagaaaaaaagagagcttgattttgttataacttggacagaccctagagagccattaaataacaacttaaattgcaataaatgtctctagctatgaatacagtcttttaaaaaacatttttaaattttttttaattaagtcataatttttcaaaaaaaaacccacttggttttcttagaaattggactgactctagagatccattaagcaacaacttatattgcaatgaatctatctgtgaacatagtcttttttaaaaaatgttaattattttaagtcataatttttccataaaggtctcaaatgattttttaaagattatccccagatacctatagtcactaccatagatactgatgttttttaaagtttttattttcaatttgtattgatgtttatctatagcaacattgttaaactccaattaattctaataagcagtatatatggcctaaattagattttctatgtagaaaatcatattctgtcaatgaacggcatttttatttcttttacctcctgtcctaggacatcgagtacaacaataaatataattagtttcagtaggtttcatggtttctgatattaaagctaatgcttccaatattttaccattaaatatagtggttgttacaggtttttggtagataacctttatcaggtaaaggaagtttctaatttcttcttttaatgataagctggtacttaatgttactaaatgctctttctgcatgcactgaaatggtatagttttctttttagtcaatcaatgtaataaattatattaatacaatgtctaatgttaggtcaatctgccattcctggaataaacccaacttggtctggaaaacttctggattcagtttgctataaaaactttgcacctatgtttctgagtgagattgatttacagttttgtgttctttaattatccttgtctggttttgaagttacacaaaatttataaaatgagatgggctaggttttctcatcaatcttctagaacactgtgtataaaacattgagctccagtaaaacttaccaataaaatcaattgagcctagtgctatcattaaggaaaaataagctaatggttcagtttctctcatgctataggaagatttgagttttctttttcttcttgagtcacctttaacagttttcactttgctaggaaagtcagaatttttaggaaacattagagaataaaaatgtattgcaaacttagccagattcagaaattcaaaatccaaaatgtagcaatggcaaaaggtattaaccaatctctaccccaccccaactctgcctaggataacaatgacccagatctgccaaaagcctactacaagtgaagaatcttccaactgaagaatgtacaaaaataccacagtattgctcacatgtctactttcttatactgtgttcgaattttcacaagcataaagtatttgattttatcaggatgtaactacttctgaattaatcacttactaccatagacttatcttcagcaaattatagactatttcctaaaccctatttctttctaatattcctctgttcacaaaaattcacataaaataatctttcatttcattccatgtcttactttttccctattaaattactaataacttaaaggaatatggtgatcaaatttcctaaagctatgacattaagtaaattcatgcctcactcagaattgaaatgactcatttaaggtaacagaccacttctctagtggtctccattctttcaaaggagagggagttaattagaggtgtcataaagtgatgctttgtaaatttttaactcaagttccttaggtctatttgctgtgccctacctctctttacagaagtttaaaggaagaaatgatgagttgctgaagcagatcacacacacacacacacgcatggattttatgtacttatctatttttaatttcacacggatttataatctatttctgcttgacatagatgaacgccaaatgctcaatttcaattgtgtcagtatcctttctggctcttatgcagaagcttgtgtccatccatgtttaggttggtgtgggcatgttcccaggcatttgaagaagttgaaaggagatcaggagagatcaaagcagatgagatgggaaactgtgttggatgttctctaaggttcttttgtctgtcatctatttttgccagacttattcagttacaatatgtaagtgaacttaactcgttaaataaattaaaaaactttctttctccatctagcctgcaggatttattagagtggctccacctcgatgccagtggatactgacataagattatgcaaatccgcttcctagaacttaaggcataataaatatatatatataaagcatttaatgctaaattaaaaaataaaagattacgtaaatccaactaactgaagccatacaatacaaaagaattaccctttgagttcaggtaataggtgaggacttttctgtatatgacttgactttacttcctacttttaataaatcaagtcttatcagtatttttctctgtgcacactggaaattctgctctttttttaagcatcattatcccacttaagctaacactaacatttgtgaatctcaaacatgagtgctgccacctccacagatctgagttttccaataaagctgcttcattccatatgttcatattgcaatgtttgttttacagcatagctcatatttcattttattccaaaattttgtctcagcaaaacttcatggaatattttctctttttcctttaacagtgtaatgggacaaaacaacaaatccagaatatggtttaaagctaaacaaatggataagtgcaatcgatagaaataactggttgttgtgtttaaaattcgaccagctagaaaactcaagctcatttggtttgcactgacatataacaaataagcactgtgcttgttttattagaaaacacttttatcacctacttgacaacataggttttgccaggaaagtcagcattttgaacatccaatcctctaacatgtctcatgttgattatgtcatgattacagaactaaacattttgcaaaaggaaaaggtatgtaataagccttttgcaaaaggaaagcatcctcacaacatcattgcaaaaatttgtaagaaaaaatctaaaagttgttttaaaaataatttagtatatatttcaattagacattactgtatatagaaatgctactgatttttgtacattgattttgtatcctgaaaccttgctaaaattgtttatcagttctagtagccttttggcagagtctgtagggttttctaagtataaaatcatatttttaatgaagagagccagtttgatttcttcatttcttatttgaatgccttttatttctttctcttgcctgattgctctggccaggacttccagtactatcttgaataggattggtgagagtgggtatccttgtcttgttccggttctcaagtggaatggttccagcttttgctcattcagtatgatgttagctgtgggtttgtcatagatggcttttattgttttgaggtatgttccttcaatgcctagcctattgagggttatcataaagagatatgaattttatcaaaagttttttttgcatctactgaggtaatcagtagattatcccagtaattcttttagttctgtttgtgtggtgaatgacatttattgatttgcttacattgaaccagccttgtatcccaggaataaagcctatttgatcatagtgtattaactttttgatgtgctactgaattcggtttgctagtattctgttgaggatttttgcatctatgttcattggcttgaagtgttcttttgttgttgtgtctctgcgagattttggtatcaggctgatgctgtctttgtagaattagttagggagaagccccttctccttgatttttaagcagagtttcagtaggattggtaccagttctttgtatgtctggtagaatttgactgtgaatctatctggttcatggcgcttaatgattcaatttcctaacttgttattggtctgttccaagtgttcactctcttcttggttcaatctttggaggttgtatgtttccagggatttgacaatttcctgtagattttctagtttgtgtgcacagaattgtccacagtattctatgaggatctctgtgggatcagctgttatgtcatctttataaactcgaattgtacttatttggatcttctctgattttattctttgttaatctagctagtgttctgtcaatcttattgtttttttgaagaacgacctcttggtttcattgatcttttgtatggatttttgcatctcaatctcattaagttctctaatttttgttatttattttcctctgctagctttagggttgttctttttttttccttcctagttcctttaggtgaaaagttagattgttaattcgaaacctttctaacttcttaatgaaagccttttagggctataaacttttctcttaacactgctttggctgcatcctagagattttggtaaattgtgtccctattttcattaatttctaattttttttatttctgacaatttctatgttcacccaggagttattcaggagcaaattgtttaatttattttgtgtagttattcaggagcaaattgtttaattgtatttgtgtagctttgagagctcttcttgatattgatttatatttttattgcactgtggtctgagaatatgcttggtatgatttcatttgtttttaaatttattaagatttgccttatgactgagcatgtggttgctcttagaatctatgtcccacatgcacatgaaaataatatatattctgcagtagttggatggagtgttctgtagatgtccatttggtccagttggtcacatgttgagttaacatccagagtttattagttttctgcctcagtgatatttctaacactgtcagtggcttgttgaagtctcctactattactgtgtggttgtcgaagtcttttcataggccaagaagaaactgttttatgaaactggctgcttcaatgttgggtatgtatacatttaggacagttatggctttttattggattgtaccctttatcattatgtaatgcccttcattgtccttccttttattgacttaaagtctgttttactgatataagaatagtggctcctgcccaggtatggtggttcacatctgtaatcccagcactttgagaggctgagatgtgtggatcgcttgagcccaggattttgagacaagcctgggcaacatggtgaagccctgactctactaaaaacaactaaaattagctgggcatggtggcacggcctgtggtcccagctatttgggaggctgaggtgggaggatcacctgggctctggaagtcaaggatgcagtgggctgagatcatagcgctacgctccagtctgggcagtgggaatatggtcctgtctttaaaaaaaaaaaaaagactagtggctcttgttcctcttttgttttccgtttgcatgataggtctttctccatccttttctttgagtctgtctatgtcattacatgtgatatgggtctactgaagacaacagatgctttcgtcttgtctttatatcaagcctgccactgtgtctcttttaagtgtggaatttagcccatttacattcaaggttggtatgtattattttaaccttttccccatgttgttagctatctgttatgtaaaattgattgtgtagttgatttatagtggctgtgggttatatacttatatgttttcgttgtagcaggttttgttcttttgattccgtgtttagcactctttaaggatgtctttaagactggtctagatgaaatgtattccctcaacaattgcttgtctgaggaagattttgtttctccttcacttataaagcttagtttggcaggatatgaaattcttggttggaatttcttttctataaagtttactttcttaataaacttgctttcactttatggactcacctcaaattctttcttgcacgagatccaagaacccctctcttggggtctggattgggacccccttccagtaacatctttctggtgacccagatggaaaaatactgaggaaacccccgaaccaaaggctaacttgaggtaagtggtggcgtctggtaacatctttctggccaaacacagaagggaccatattgaggagaccctccgacccaaaggaaaatcatctgcacacacacaccaactggctgacttttgggtaagtggggtgcatttgcctgggtaaagaatgggattgggttaaagactcaatttaggggaattaagagtctctcctaagacagagtgggttaaaggcccctcttaataaaaggcaaggatgcttgagcaaacttggtttgaggctcaacttaggaaggttagagtccttcctaaaatttagggagttagaaagaccctttcagtaaagtacctctcagttaagaatgggtttggcactatgggatgttaactggtattctctttggattaatctgccttgcaatctttgttgacggctatgggtgacagaattaggcatatacgggaccataggacatggggcgctttttctctccctaaagggggaaacttaagagctgatgggactgccagaaaagatcctttcatgaccaacaaacagcagactgaacttctgattcagcgttggctgcaatgagtgggtctttctttggcctcactgaactcttcatcttccccaccctgccacaggcaacgctttcctctctctcctttccttttccaatcttctctgttacttagggtgaccatcttgcccagagaccacacattgagaaatgtccttgggaacatgaacctgtaaccatgtggcagtactttcttttggtctccatcatcacaatggtggcctggcttagggaatgagtcctttctgatttgatatctgttctacctttaccatttgttaattctcctctcctccacaaaacttgaatttttccattctctgagcacttggaggttacatttggtaaagcccaaaagccagacatattggccacttggtatggctaaaatcaggtaataagaaatttaaaaggggcaggcatggtggctaatgcctgtaatcccagcattttgggaggccgaggcaagtggatcacttgaggccaggtgtgaccagcctggccaacatggcaaaaccctgtctctaccacaaatactaaagttagccaggcatggtggtacatgcatgtaatcccagctacttgagaggctaaggtatgagaatcacttgaacacaggaggcagaggttgcagtgagcagagattgtgtcactgcactccagccagggtgacagagtgagactctgtctaggaaaaaaaaagaaagaaatttaaaagggcattttttaaagagtgctatagttaaacatcagcttaattaaaagcatatattcaagctctaacagcctgggactccttgaaaaaaacagaggaggcagcacagaccctattttgggggaaaaaaaaaatcctctgtttttctcataaaagcccaggaattggaagtggataaatccctctcaaaatttaaggctctgttctgttttgcactgcattgtgtgacatttttgacactgggggcatcagaaattgcttcacattatgagagagctttggtatgtaataactaggtaggaaatatacttttggggctagctaatggcagttatgggagatactcatctctgcaagtatggatcagagaaacatggtcttggccacctacaagttatggaaatgtcctcactctccactgagaggtaagattcccatgggaggctggttaattccatctttttgagatccaggatctggtaataaaaatgggacccttaatttttggaaatcagttttgctttccagctgtgtctgcttattagaccctggaaaaggcatgctttaaagagaaacttaaaaactggaaatgaaaaatcttacaactactggaccttctgtctctctatgtatttgtacatggtgtgtgtgtgtgcgatgtttatatatgaaaaaactttgattagtttaaaaatagtaagtgcttaaatcaaatagtttgtcagaaaagtaaaatgtgtaatgtcatttacttcatatgactttagtaatcttttggaaatgaaggcagtttcaaaaattattgacaaaataaagatatcttcaaaatttaaacatttggtccaaattaggcaggtcagatattaggttttctaagtagtttagggtcataaactgcttctttgactttggaaaactgttcaatttacctacattggatcattgtgtattacataagacctgggacatgtggaaagccatgcccccttgctatgctggaaacagtcgcccttatctgcacttctgtccattgtcctagactccacacctagtacctaattaaaatctcttaccaaggttttcatcaaaagtaaaagtcactaagagttaacgctataacacataattgagactactaaaaacagttttacatgcaagctgtgtaaagaaagtgaaatgtgttttttggtaaaagattataagaaggcaggggaatgaggatttttttccctaagattaaaaggttaaataattgttttaagttagataaaataaagctgaaggtttaagccagttgtggaaggtttgtgaaaaattaattgtaaaagagattctgtgtgtgaacatattggctaaagttaaaagggcatcattcagtttttccataaattaaacattggaataaaagcacaacaggtttttcatagcactgatctgctcattaaaaaaaaatgtaaagggttataaaaggtttatgagactattaccttatggtcaaattaattaaggttaaacagatttgtttataaggttttattaaaaatttggtttatcaataatagcacactaatgtaaaggtaaaatttggcttatttgatatattaaaatcatacaggagtgatgttgtctttggactgtatttgtataaatatgtttcatatgtgttccaaacttatgggaaactcctacaattccaatatgaataactgtatgttattaataattataatggctacataaaatcactgtatgccacagaggtaaccaaatttccttgtcaattgtgtttttgactgtggttttttcctaagacattttatcattcacagacaattgttgtcttgttttaatcctcttcaaaaggtggtttataatcagctataagactttgacaggtgcacttaaatgcaggtttctgataactatggtgattgtaacattagaatagaggtaaaaaactttcaggactctcatagacaggtgaaatgttcataaatatcaagcagaacaggagttaactgcatgaactgaactaatagaacactaaagtaatcttgttgactttgcttcaaacattgctgatcctttgttttgttttgcagcatcaaggaaacttttgaggtattaatagcttttaacaattgagtaaagtatactcctgtattttacattactggtttggctgtgcccccactcaaatctcatcttgaactgtaggttccataattcccacgtgtcataggagggatccggtgggaggtaactgaatcatgggggtgggtcttccctggaccattcacatgatagtgaataagtctcacaagatctgatggttttataaagaggagttcccctgaacaaaatttggagcgtatttgtttctacctactttctccaaatttgcaaactagttgtgagtattcttaacttatgacaatatacttattagtgtaagtgcaataagaatcttttttttttttttttctggtaacaggacacaattggagaaactggttattttaccaagtaatacgatttggctgtgtcaccactcaaatctcatcttgaactgtagctcccataattcccatatgtcatgggagagatccggtgggaggtaagtgaatcatgggggcatgtcttttccatgctgttctgtgatagtgagtaagtatcatgagatctgacggttttataaaggggagatcccctgtacacactctctcttgtctgccaccacacgagatgtgactttgctcctcctttgtcttctgccatgattatgaggcctccccagccatgtggaagtgtaagtccattatatcctttatccttataaattacccagtttcaggtatgtctttatcggaagtatgagaacacactaatacagtaaattgataccagtatatcgagggaacccacccccaatatatcaatgtagttctttctattttccataagttctggccagctgagaaataaagagagacagtataaagagaggaattttacagctgggctgctgggggtgacatcacatatcggtaggactgtgatgcccacctgagcctcaaaccagcaagtgttttattaagggtttcaaaaggggagggggtgtaaaactgggagtaggtacaaagatcacaggctttaaaaggcaaaaagcagaacaaagatcacatgcttctgagggaacaggacaaaaggaaaaagcagaaccactgataagggtccaataaaggtcacaagccaaagggcaaaaggagaactactgataagggtctatgttcagtgatgcatgtgttgtcttgataaacatcttaaacaacagaaaacagggtttgagagcagagaaccggtctgaccacaaatttaccagagcggagttcttccccaccctaataagtctgagggtactgcaggagaccagggtgtatctcagtccttatctcaagcacataagacagacactcccagagtggtcgtttatagacctcccccaggaatgcattcctttcccagggcattgatataaatattccttgctaggaaaataatttagcgatatgtctcctacttgcacatcggtttataggctctctgcaagaagaaaaatatggctctttttgtccaaccccacaggcggtcagacctaacggttgtcttcccttgttccctaaaagtcactgttattctgttctttttcaaggtgcactgatttcatattgttcaaacacatgttttacaatcaatttgtacagttaacacaattatcaccatggtcctgaggtgaagtatatcctcagcttatgaagataacaggattaagagattaaagtaaagataggcataagaaattataaaagtattatttgagaaccgataaatgtccatgaaatcttcacaatttatgttcctctgccgcagctccagccggtccctccattcggggtccctgacttcctgtaacaccagtaaagtgagatgctatgtgaaaatgtggaactgactttggaattgggtaataggcagaggttggaacagtttggagggctcagaagaagacaggaaaatgtgggaaagtttgaaacttcctagagacttgttgaatggctttgaccaaaatgcggatagtgatatggacaataaggtccaggctgaggtggtctcagatagagatgaagaacttgttgggaaatggtgtaaacgttactcttgttatacaaggagactggtggtattttgctcctgccctagagatttgtggaattttgaacatgagggagatgatttagggtatctggtggaagaaatttctaagcagcaaagcattcaagaggtgacttgggtgctgttaaaagcattcagttttaaaagggaaacagagcataaaagtttggaaaatttgcagactgacaatgcaatagaaaagaaaaacccatttcctggggagaaattcaagccagctgcagaaatttgaataataaggagcccaatgttaaccaccaagacaatgggaaaatgtctccagggcatgtcagagaccttcacggtggccccttccatcacaggcctagaggcctaggagcaaaaaatggtttcctgggccaggccagcccctgctgtgtgcagtctagggacttgatgccctgcattctagccactccagctgtggctaaaaggggccaaggcacagcttgggctgtggctttagagggtgcaagcctcaagccatggcagcttccacgtagtgttaagcctgcaggtgcagaaacatcaagaattgcagtttgggaacctaggcttagatttcagaggatgtgtggaaatatctggatgtccaggcagaggtgtgctgcagaggtagaaccctccgggagaaactgtgctaggtcagtgtggaaggaaaatgtaacatgggagtccccatacagagtccccactggggtgctccctagtggagcgtgcgaagagggccaccgtcctctcgaccccaaaatggtagatatactgacagcttccactgtgcacctggaaaagccacagacactcaatgccagcctgagaaagtggccaggagaggggctgtaccctgcaaagccacaggggcagctctgcccaagaccatgggaacccacctcttgcattagcctgacctggatgtgagacatggagtcaaagaagatcattttggagctttaagatttgactgcctcgctagatttcagtcttgtatgggcattgtagcccttctgttttggccaacttctgtttggaacgagtgtatttactcaatgcctgtagctccactgtatctaggaagtaactaacttgcttttgattttacaggctcacaggtgtaagggacttgccttgtcttggatgagactttggactgtggactttttagttaatgctgaaatgagttaagactttggggggctgctgggaagggatgattggttttgaaatgtgaggacatggtatttgggaggggctggggtggaatgatatggtttggctgtgcccccactcaaatctcatcttgaattgtaggttccataattcccacgtcatgggagggacccggtgggaggtaactgaatcatggggatgggtcttccccaggctgttcacgtgacagtgaataagtctcacgcgatctgatggttttataaagaggagtttccctacacatgttctcttttgcttgctgccttgtaagacctcccctgctcttccatcatgattgtgaggtctctccagccatgtggaactgtgagtcaactaaacccctttcctttataaattacccaatatcaggtatgtctttatcagcagtgtgagaatagactaatacaccaaggctttaactgaaatggtgtgctttcctttgaggaatcaaacttaacttatagagccaataaaagacccttgggaaaactggcctcataccttgtctacacagttcctgtacagggttcctgacctgtggtaagtaacaaaatgtcactgtatgacaggcccaggagccccaagttatcttcagaccataaaaggaggggaatttacccaactcctaggtccttgagggtacaaacccatggcagggctcagcttttaagaagtcttatctaagattcctttcatggaacagagttccatcaaagccaatttaaaaacagcttatgtgaaaaataattattcttgctgcactttatacaaataggccaagtataataaaacaacttggtcttaccactatgtctttagtaaaaatataaaactgaagagacgaaaaaaattatgtttcaagaactgtggtacacttgttattaaattctagtctcatcagttatttttgaggtttttcctacaatttagactaaccctgcttactcctgtgaaccaaccagtgatctctggctgctactcagaaaaaaaaacaaaagggatggataatgtagaaattagatcaatattctaattctggacacatagtggaatcagctagtaaccccatatcagcttggttccagcagttgccgagttcatggaaaaccttcttatttagtttacttgggataattttgctgatcttgctttaccattgtgaaatatattgctgttgtactctttgtgcaggaatgcagaatagtcttactgaatgttttcttaaatacttattaatattccagatatcacattctgtcagaactcaagaattataaatggcccttgacataccgatgatttctgactgagctcctctctaccctgaatgcaagacaccctgacaattagagaggaatgtcatcgcttcttttcagcatcaagaagttacagaagattgatcttcatccctctgtaacccttaagattaagggttcttttaagggaggggagaaatgtcaaaggcgtttgaaccagagcaactccatcttgaataaaggctgggtaaaataaggctgagacctactggactgcattcccagacagttaggcattccaattcacaggatgagataggaggttggcacaaggtacagattataaagaccttgctgattatacaggctgcagtaaagaagctggctaagacccaccaaaaccaagatggcaatgagagtgacctcaggtcatcctgactgctacactctcaccagcaccatgacagtttacaagtgccatacaatgtcaacaagttacccctatgtgttctaaaaaggggaggcataaataatccatcccttgtttagcatataatcaagaaataactataaaaatgggcaaccaccagcccttggggctgctctgtctatggagtagccattcttttattcttttattcctttactttcttaataaacttgctttttcaatttatggactcatcttgaattctttcttgcaagagatccaaaaaccctctcttggggtctgaattgggaccactttctggtaacaaattcttgtgctggatttcaaaggagcatatagtagtgggataaatttttggtgctgtagtctcaatgcaatccattagatggtgcttaggagtaatggccattaattaggtaagttaataccccaccatgaggctctttcgttcttcctcatgttcccaggcatgctccgcagtgggcgggggagagacatggccccctcaccaggtctgctcctgggccttgggggagcctccttccagtcactgatgctgtgcccatgtttcttttgttaggtgtttcaggctctggggccttcttgatcaggggctgcaggaggaagatatgcctcactatctctggatcaactctgtggaggtaggcataccctgctcccctcccaccccagcccagtaacctgaagatcttgcccccttctacctgacttgagtgctggccacagatcttggctacttactcccaaaatgctgcatgaagcagccctgggggcactgggacagcctgtggattaggttggcattccagctgtactgggaggatccaatgtgcttccaagtcactaggaaagtactcaggtagagcaacatactcaggctgtgctgcaggggctgtgctgtgcactcactcctacagggtggctaagcgtgaccctgggtggggccagcaggcaggaagccttgcagaatagatgtgctctagtcccacagggaagctggtttcactctctcctagcttgaaggtcagctggggtccacacctcccagaaagggatgaagagccctccccacagagcagctctatggctgctctctgctggagctccccagtgcacgaaaacttttgggctccatgctgtccaacggcctgtctctgcctgctccccagggagatgcccctgtcagctcacacatccaggggagacacggagttctgtaactaggatctaggatcccagaggctggcggtgagagtgagctttccctcagttcctcattcacccctttcccaagagccattcggggctgggaactagccctggtattcaggtacccagcacagggctgccagcttccttactcttcacccttcattttaacattgcctctcaacccaatctgagcattttctctccgaagatctgcccagattacagtggtttactctaaaatttggtctctctcagtgggagctgcacttcctggctgcatctagtcagccatcttaaccttatgtctcctttgatctttttgctattaatcagtgcagtttgataatcacttcatctcctgatatacttggcagtctcactatttcaaagaagggagaagttcaacaatgtactatgtataacccgtaaagtactcatggaatcaattttaaaatggctatttttagctcgcattttagattctgcaatgaaattttatatgcaaccatactgtctaaaatgccttaccagaaccataaaaagaacaattagaagaactactctttcctcacaaaaagcaaggaaatatatgagtaagttctagatatacatgaattggccattcaataatccctcaatgagggcttagcaaatctatgttttgagaaaacagctctgtgtttactagaattttaaaatgtgacatctatttatatacacacagatatgctctgtccccttaaacaaaatgctcacttaaccattaatgctccctacccctccatccctgcccctaagcttcccaatactatgtgttacttactcagccattccacacatgaacaaagaccaggcaatgaaaatcaacccttaactctcagagtaatatctgaaaaggctgggcattttcacagtatttaagaaaaaaaaatacacatatatatggtatatatttatatatacatatatgactaactttaattataatacaagttagtttaaaaaccttaagacaaagtacagtcggcttaggcaatcacatattgcagcattattttatgaacagaagatcactcaggggaggggtatctacacagttggcaaatactcattattccagtttctttaggaagtcatgtccttattttaaatatacatttcaagtatatttaatgtcatatttatttgcttctaaatccctgttttctatgagatcctgatcttgccaaatgggcttttctcatcatatttttcaaaaacgtagaccctaaggttgatgaataacaacatgtcagtatgccattaaacaaatttttatagaatttcaggcctttaacaatatgatttaatgaaagtgaagtttactgaaataataaatgcttaacaattctccctagatccttaattcactattaaataacagtgtaatttgcccctttagcaattatttgaaaacaccatgcttgtaaaactttaaaagttgttattaatagaaaggatcattttttcacttactcgagcagctaaaaagtaaaaggcatactaaatcatataattatattttatcttcattttgtgcgtaatactaactactaacacccaatttggaaaaaaaaagcttttaagttatttaggaatcattgatattatcgaactactgaggattatttaatttccaacacaacaaattgtaagtcattcaatgattctcgagtagtttgtcactaactaagaataaattatagaagtgaacaagaagcagtagctactggcaaagaaacctcaaatttttctttgacattgaaaggagttaaccagcttgctttaggcagaaagtaagggaagggtcccaggcaaacctctgacccatgttttgtgcagataagggaacgtgcacagggggcttgtctaaacatgccctcagcagactaagtgcccacatgcgtccagggggaatggggtggagccaccaggaattcccaccttatacaaacagggaatccagctccatcaagcttttatataaaagcccttgtattcaaaactggaagggaacaaccaggaacctgctttacaggacccatctctttgctgagaactttccttttgcttaataaattctgttccactcactctctggtgtctgcacgcctaatttttcctggttgggagacaagaacctggacctagctgagctaaaagagcaaaaatcctgtatcaacattacattaaaaaaaaaaatcactgaaccaaggaatagcatttatattcttgatcttttttaaagttctcagacattaagaggcctaaatttgatttagaaaaattgctatatagtcctaactccattatcactaatctcttaaattttaattgcatactatggtggctgacatattcccattaagtagcatgaaaactatgtaagtgaacatcctggtttacatcaaacaacctcactttatgtctgttgtcccactacagaagacaaagtatatggtcatcattattccattaccagcttgggatctctctgactctatgcaagcttcctgtttaggcaagtaaataagaatttaggaacttggtgggaaagagaacaatgtttttaacagttggatcaacaacaagtgggtctaatctactcactccccaccagttcacctccctttggcctgacatagaagctgaaactatggtcacttactgtatatttctgaacatttctttttgaaagaaaattattgtaatatagatgccagctctacttgatagacagatgaccaaagactgatgaacaacaatgcaaatgtaataaaatcacccttaaatgcttgccttgtatatgtcataaaaagataaatataagtaatcatactctacttctgtgacacaaaaaaataaacttttactaatgaaaaccttcattaataacacagggcttcagactctgtctatgaaacacttatcaatttaaaaatgctgtactgctggtttcatagttgaaaggcaaaaaactttcaatgaaccagtacctgagaagcccatctatcctccccgttaactcaaagcaattatccatatgtgtataataaggaattctaccctctcagaagacattaacttaaggctaagagtttgtccctaaggaaaataattcaatagctggtagtcagtgagccaagcctctggttctaaagaaatcttttaacatataatgtgaagttgatgttaaagataatgctgctttatattattaactaaatgtgtcttcatcaataaacaaaatattttgtcccaattttgagtaacaaggcaagtagtaagaaaagtcatacaaatgaatgtttaagtacttagcaaatctcttcaaatagcctaaccagcatttcaaaataagacatttgttctaaaaagaaaaattaaaattgggtttactctaaggagaaattgtttttaaatgtttttcctaattcccacttgtttttttccttagtttatatttgaagaatctctttcttaattatgtattgtgctgatcgcccaaatatcttctagtagcaacagtaaagctacagttagctatgatatccttggagaaaattaacagcataagcagaaaattcatatatcacacctcatttaattacactgtttaaaaaagtatcaatttaaaaagttaattcatatattcttcaggttgaaaagttaatgtagggagaatcaacatctcttactacacacacacatatacacacacacacagagacacacttatcccttatactgacagaagatccactttacaaatgcttttcgaatggtattaagcaatttcatagtatttttaatgagtatcatctttgatcaaccccaagggaggaaaaaaagatttgcctacatcaaacctcattcccttactttcatctaatattacaggatacttctattttagtctactaggatggagaaagccttcataagcacaaactacccaaaataatgcttagtttacccatggtgacaaaaaatattatagttttgctgcaaaggtccacatgttcacaagactggcatggaggacactgcccggaaagttgtttgtttgtttgttttttaaaggcagaaagagcagcaagagggcaggcagaaaggagaaaagatactgtggttctctgaacagatataagagtatccatgcttactaccagaaggatttacccatgctactgttgctcccatgactcagtatagatataggttagtaaaggtcctatttttataaagtacacgggttttattaaaattgaaactgcatttaatttattaggtaaattgataacagaatacataattaggcattccatcatattagaagactattttatcaacatttatgcagtacttcattattttaatgtacttgaactgtgtattgggactgccacagaaaagctggttttaataaaatttagaattgtgcgatgttggaatattactcacaaaatacactcaagttgttcagctatgtacacttaggtagaactctatgcccagaaaagttcatggttaaaaaataaagtataaattttgtgtcagagtgcagaggcaggagattcttcagtaatgagctgaaaaggcaagattaagtttcagtttttttaactgctaatataaattagagttaaccattgctattagaaaaaagactagcagaacaagaagaaaaatgcaacacttaaaaatacaagccatctcagagaaaacattgtctgagtggttctgaaagcagctaataatacaggcatggtgactattttatgctactgctttttgaagcccagaatttaaatcaatccagaaaagaaatgaaaatgtgttacaattaagagagcaaactaatcctgtcaaaagacaggacacaatgaggacttgttttaagcaatggcacaattacaaatgtggatgatacaaatataggtttagaaatgttagtcaccttaaggcatttttaaaaacataaatatttagatcccctttaaagaacagtcatgaattatatccttttcagctaataattttgataaagacaaatagactctttgtgccatctgaaatataaactgtcttaaacagcaaatgtcattatctgatcctctaaaggattaaaacaaaaaagttatgtctcttcaaatgaatcaagaagcaaaaataaagtcactttttaagttaacttgaaagaaaatgatcaaacatccaacattttccaatcaaatggaaattttcagatatcttaaagactcacattaatattgatagatttgaaaaatcaaaacaattatcaactagatgatttctgcttttaaccttcattttcaaattcttgtttttgcagtaagtgctgattttaacttgtcttaattttcacaagtgtttaacttcaaattgaggagaaaatgcatcagcagtagtgaatctctattttaatgtctattttaaactcgactatattttagtgagctgtgaactcattcatgaaaatagataatggccctcataacaaaacacaaactgagttgatctgtaagtttaattaccctaaattaccaaaccaaaatgagctatcaacatcaccaacattattgcctacaaagggcatgacaaaatgagaaatttagttctgtctccaggaggcagacccatcctgttactgattgtgaatacaatgctgacaaaacatggctaacatttcttggcaaattgaatatgtgtcttcatttttgcctaaaatgttgtacaaggtggccaagagaatcagccaggttatggatacattatctgctgtctttcatgtataaaattttaaataaccttattgtagttagaaaattttgaagataaggctgtacattttaaaatatacatactgaaatacaatcatttcataccaaataagaaaatattttaaatccactataattttctttgaagatacagccatattttcaaggatcaatgcaatgaatggaaactacaacttttaaggtattaaaaaacaacaaaaagggaccaagtcatagaaatcaccattaactttttaaataaagtaatgctttccttcagagaatctattttactaattaatagtccattcagtctacgaaacttcattggtaaatatgtaaatataaatgtcttccttagcttactggggtgacaacagagaaagagtagaggagcttggtatgaatgcacctttgaattcaagggggactacttatgactacagaaataccaagaattgcatgagagaaactggggcacttattactcagggagatgaaatatgatcttttttctgactggcttaaatccagaaagacttcaaaaagaatgatgacaattcatgataaattcaataccaaaaagagggatggaaaataagcagtgaacccaatgttagtatcaattacatgctagtaatgtcagtttcagtatcattactgattaatacagaaaaattaaataatctgaataccccaatacaatgctgctttcacttctgtaataagagcaatgaatcaaaatatgccatacatgtagaagacagacactaacctgcagaaaaaccaaatcttatgcggtgaggtggcattggttttaaaatcatcccacatgacaattctgagtaagtaaccaccatcactatgaatggtaaatcccaaaactcaaatgtacatgataaaggaattatgtcaaaataagtaatatgaaatctttgcaaaacaactttataagcaaaatgggttttttaatttaaaacaactaggaagatttaaaagaataaccatgtcatgtgagagaaacatctacatataataaagcttttaattattaaaaaagtgacatgtatgtacataaaaatgaagaaacaattagaaaatacaaatcaataaaagacttatagtgcaagtttcttttcctatgcctagatgtatgtatatataaagtttttttcttttttcttttcacaacattgagcaagtaaagtacctgtaggtttgcatacaggtgagttttcatttactattttattcatgcaaatattacaatgttatcaactactcttttaatgattttgataaatccataacattcatcaagtggacaaatcataacttattaaaatatattcctgttgttgtcattaataatgtgtccgatattttcctatcgaacgaacaacactgagatgaatacatatttttgtgtttaactcctaagtgaggattcctagaattcttgaatcaaaggaaatctacactttgaagagtctcgatacacattctcaatatgatatcctggaaacgtgaatcaatttctattaatacattcacattctacatcatctcagcagaaaataaaattcatttttaagcagtcccactcttataagtaacaaacgatattacatttttaaaattagcattttatcaatagtaagtggcatattttttcatgtttgctggctatagttataaaactaatctgtttctgaccctttaaataaaggccctattaatttccgtattgacatttaagaatgcttaacagagtacacgttagttctctgtcatgtgttacaacatattctcatttgtcattgtttttaaaatcatgcttgtttttgccatacaaaaatttccattttatgcaaatatatttctctgtaacagtatgattgagtctgctgccttttaattttctgattaaaaatgtcttgcccatcccaatataagctattttctaccttttccttttagatttagtggttttcttttttttttctaagttcatttagagtttattaggaaaatggaaaaaagaggtcaggtttgatagatgtttaaaaaccgactgctagatggtttggaggggaagggagagaatgaggacagggagaggggcagggaggagagggagaagacaggcaggctgccagggaggactgcaaattgaggaaataaatggcattctatgccaagtgaatagcattaagagatcaaacctagctctaactacttcattcctctcctttccttgaaagtcaagtttcttgaaatggtagtctatattcatcggttcaagtcttcactacttactcactcaccagtctaaatgttgtctggcttcctggccacccttctgttttcatcagtcaccagtgtcttccagttgctacatgcaaggtaggaccattagtctttagctgtcttaaattctggaagcatttaatattcttggccatatatgctattgtcaaactcttctgcacttgtctcatgtaatggctctctcctactcccttccttttctgaagccactccctctcactctgcttcataacttcctttctttctcttaaatgttggtgtggcttcttcttcaacccaggcagcttcttcttcagaaactttcccttcttaagattatctcttcctatgtgaccctatctatacccatgaactcagccaccagtatatcagtataagagaatgaatccttacccatttcctacaccttagattctctcctgagctccagaaacacattttcatccccatttcagatacaaatctaaaatgtactcattaccttatacacacacacacacacacacacgcatacacctgttcttcaatgatattccccatctcagtgaaactgcacctctattcaaaaatcatccaacctagaaaccaagctatgctttattcttgacttctgtctgcctctccctcatccacttcaatccccaccccactcctgtgagtcagcaagtctttcattcagattctctctcctactatctgaaaaattcacctttctctaacctactcccatgtccttggtttagaagaccgtcaaatctcacctagtttaatcacatacagtaatgagtcacaaggacaggaatacattttgagaaacgcattaagcaattttgtggttgtgcaaacatcacagactatactttcacaaacctagatgatatatatttttatttatatacatattttttcacatggaaaaccaaatatcccagaagcagcattaaatatcaatcatttcccatacttgatctgcaatgcccacatcaagcaccatattattaggtttctatttatgctccactatgatctcatgggaccaacatcttctatgtggtccattgttgaccaaaatgttgttttgcagtctgtgactagctttttagcaattctccatcacttcctctctcactcctccccagtgtatcctctacacaactacctaggagtttttctaacttttaaatctatattaatctcctgcttaaaattcttcacttatattcttttgccttaaataattatagtaatattttcagctcctactactttctatttgccaagaactccataaagtatattttatatatattacatgagaaaactggaagttacatctatgtgagctggctttactctgtcatatctatttcctccacataaaaacaaattccttaatatttaagattcttcaggatctaattcttacctacttgtcaacgcttaccttacgctacagcctcacatgctagtctttaaacacacaaaaccactttaattccttcaatagcaaatcctttgcctaattccttattcatatagttcattctgcctgaaatacccacctaccttcactaccaagttcatacttatccttcatgagttaacttagctgccacatatgggttaaatgagcacgtattttataatcctatagttctctgaatattccattctaacatgtactataactacctgtttatcatcgacttctaataaactctaagtgtctctaaaacaaggacaccaattcttggatgaaatgcccatattaaggctatccccagaatacttaataaaggatggttataagaaatacttatcattcaggaaatagccagtaggccagtgtgatctgcatactggagtcaaaaagggatgtgagaaataacactggaagactggtttgagtagatcaggatcttgaatgccgacataaagatttttttgctagacccaatgaggatccattggatgctttcaaacagacaatggacgaaatttgatgtgtgttttaagaaaataatacatagtaattagacgagaggtgaacagctggagacaaagataaggagacagtttaggatgggtctggcggctcacgcctgtaatcccagcactttggaaggaagaggcaggaggatcacttgaggtcaggagttcgagaccagcctgaccaacatggtgaaacccctgtctctactagaaatacaaaaaattagatgggcgtggcagcaggtacctgtaattacagctacttgggaggctgaggcaggagaatcacttgaacccgggaggcagaggttgcagtgagccgagatcgcaccactgcactccagcctgggtgatggagccagagcaagactctgtctcaaaaaaacaaaacaaaacaaaaaacaaacaaacaaacaaaaaggagacagtttaaaaggtccagaaaaagttgaagagaaatagagttcatttttatataagctgatttccataaactagcaaataaccatgtgcatatgcctaccttttctcattgtttcacattcaaatttttccagataatcattttattacacaaatgttttatctctaccaaaataagcataatgttggaattttgggtctaaagctcaacaggtcaaaccttgaaagtttcaaatttgaaggtttcaagagtaaccatgcaaatggttgagacgtcccaggaaagaatggggaaaggcactttgggaggccgaggtcggtggatcacaaggtcaggagttcaagaccagcctggccaagatggtgaaacctcgtgcctactaaaaatacaaacattagctgggcagggtggcaggtgcctgtaatcccagctactcaggaggctgaggcagggaattgcttgaacccggcaggcggaggttgcagtgagctgagattgcgccactgcactccagcctgggcgacagagcgagactccctctcaaaaaaaagaatggggaaagggttggaggtggaaactaaacaagcaaaggagaagatgacatggaagcagaccaggtgtggttagggcaaggagaagaaccaacagagtataacatggatttaactacaaacagtaatgaagcagcccaatccacaatatatccccagagtgatttagactttggttcctatctgtggtcacagaagctgtttacagaatactaaacaggcttcaggaagaaactacagttttaaaatgccatcctatatccaaacactccacattaaactgtttttctgatgctctggctccatcttttagtacagaagtatacttctcctgattgttttatctgttgctattaggaaaggttttgtatcactggtaaattttttgttaactgagattataaaattgcagtaaactactcatcaaattactaatctgatagttttctctgatgacaatttaccagcacggcaattttaatgaaacatgttttccagaatggtaaaaattcaagaccctataggatcttttcccctcttttcagattgatatctttaaacaaagtgcttggaaatttagtagtaataagtttataagaaaaaatccttctccataaactattctaacatgaaacactgaaaaaagcaaaaattcctttaacttgaaagttattaaaagttttcttttacataatgacttgtataggccctataaaaatcctttgaactattagaatctgataatcttaaaaaatatatgttggtatccacagtttctgagttcttatgctaagaaaagagaccgcacagaaaggatgtaacaatggtatggaaacttaccatcctctccaattggactctttattgcagacttattgcttccatgtgatttaaaaaaaaaaaaaaaaaactcaaatcttaagccaaccacatccctaaaatttctggcactctttttaagcactgaatccaaagcaggagaaataaacaataactttaaaaaaaattatcacacaactcttatcagactcaggatttgttttttcattatgcaggtgtgttggaaattaataataaaggctgatttacaatccttaaaaaaatttactctatttaaaccagccaaaataccataaactatttggtcttaatatttaaataaataatagctatgttgaacattacattctagaatatataaattaatttgggtgatattaaaatagatgaggttaacacttttacacactaaaggctttcttaaaaaaacctggggttacataaagctgaagcatacaagcatcaaataaaattcattcatataattttctgaaacaataaaatctttgcttaaaatacacaataaaaagaacaatgaattatctaaactctatagtcattgcacttttccacaaattacggtgcacaattcatgactccctaaaagaagcattttaagttatagtatgtgtcaagtaaaagaaaagaatgaaaaagttcccataccctaaagtgagaacagatgggaatgtaagataagaagagagagtgaagctttaaataactgaccaagaaatcttccccagagtggggccaaatataccagacctcagcttgctctgccttccagttaatttccaaattaaatccaatagaaatataaagcacttcgtaaattagatgcactgttttttatttttgtaatcatttatttctctctatatatatgttttatgaagaaactttaaataaataagtttaaaaattatgtctaatcaatataaaatagtcttctaatcacttctgtgagtttaccattatttcaaactaagactgttaacaataaatttctgtaaaatggtaaaataaataggcttataaaaaaaaaagtagcaggaatgaaacaaacctaagatgtgggcactgaattccttgcacgatgaaagagccatctgctataaactagagttttgtaaataaattatgactccatcttatattcatttctttcatatttgatctgtatactaaaataagctttaaatagtaatgccaataccacttcttataaaaatgttcctttatttgatatttaattttatatagcataatttttctatctaaaaataccaattataaacttaaaagaatactctccatagtgctgtattctcttcaatattttttattttaatataggtagtaacttaaacttttgaataaaacagcatagttcatattttcaggtgttttcagattttaatgtatttaaaaacaataactttactattaatactcattctcttaaaatattttaaaagcaattttgtaggattaaccatgagcttttaaaaagctaccagatatcttctatcaaaaatcgcctgtggagcaaacattgttttcatttcctttgacataaaacttgcatttgttgaaccaacaataacttcatattttaatcaaaagtactcaaatttatacatcattctcatccacgatttaaaacatcttttcccagataacaatgaaagagttgtccgtgtacattttctctgctgtcccagaaagttggctttcaatatcttaaccctgttttatcttttttaaccttaaaaaatataccccaaaaaagaaatagagaaatatgaatcatgctaagtggtgaaagcagttgtacctcaaacttaggtgatctcagtttaaacaacccaaggcactggtaatttgatacaggtttcacttataatatggaacaaggctttccatagagaggaagctcaatacaggatattgcatagttgaatatctgcatgaaagagttactgaaaggtatattttattactcagattactcaaaattatatgggaaaattatcaatgaaaaaaaatttttcaagtgtctagttttttttctaatcttctttatcagtagataaaagccataacaggcaaacatttatggatatcatgctcactaaattttactaaaattcattttctatactttctatttgtgcaaataaaatctgaattaagcaaaaacactgtgtacctttcaaatttctcatattaataaatccaaactcaaattatccaaaatattaaatataattcctccatcaaatattacactattgtctcaagtcattctgtggttagctggtgaataattttgccatgaacaacagaacattgtataacgggtccaaaacttctattatcttcctcgtggaaggcaggggattttgaattaagagtgcatgtgcacacactttacatttattcaagactcctgtctaatcccagatattccactgtctttataaaatgggtaagtcacaaacactctggatgacactcatctgtaaaaagaatgcagttggtttagatcaatatttctcaaaatatagactagggacacctgaggatctatgaacacattcctgggagtctgagagtgctacaagatgctttgttttggtgtcttcatattattatataaatacgattatattctgatactctcattgacaatttttgcaactgacaattatcacataatttcaggatcttattttgatattatgtttatgatattttatgttagttatagtgactatgtttaattcttaatatactacttctcaaactaggattcactaatgtattcttggggcctgagagacatttttccattaacataagaccacatattatttaagaccaagagacactggattagattatctttctaattctattccaatctaaaaaaatgttgtattaaattgcagtctaccaataacttacagagatcaaactttaaaagcacacttacagaaagcaaacttcacaagaggagttatagtatctaattccaactatgttctacttgttttccttttttaattatatgcaattgaaacttttgagatatcaataagcagtgaacaaaacacaacaaggctgtcaaagtttcaattagcaacagtcactatcctttcaaatggtttagtagactatatattaactataagtcagaaaatccagtttctttttccagttttgcctctggcttgaaatgattgccctaatctttgtattatgctactcaatgtataaaatacacaataaatactaggtactcatgttatataataataatcagtacattttaaattttaattgatatagtaactaggaaaacaataaatctacaaaactcaaatatttgcttttcttactatcagtgactacatataaattgtaaaaataatttcgtttttgactataattatggattactttgatctagtttttaaaacatttatgtttaaattgggttcatctaatttacaaatattttaattttgcaattagcacttaagatatttcattggtaaaaatcattgtttactaattaaacatctaaaaataaaaacttaccattatccatatatcataattctataacaatgtagtaagccatatactcttaaaggaattccctattcatatattttaacaattaaagcatcttcacaccagtaaagagaagtaaagtgtttgcaaactgcgaagatattctgaatttaaaagacatgcaccttccatttaaaatatggctacttaattttcaatttaaaaattaggaagaatgaaactaccttaaattatcttatatatgtctatgatataaatttgaatacaggttttaggtaaaacttgccagaaagaggtgtataaaattttttcctgatatgtggcatcttaatgagcattttttttaaaaaaacataggtttttaaacaattctaaagcatttccaataccatagcataatttgaataactaaaataaataattttcaaaattacttattaaatttaaattattgacttttgagagattcatttttagaacgtgaatgctgtgaaaatctaagatcaattccacaatcaaccaattccataacctcaagtcatataaacagggaatgggaacagattcaaattaaaaagatttttctttctgttaacgtagcaaatacaagcaaagttaatttagtagactcattccaaactttcttcccataaaaaatttttcagctttcaatattttaagatatctgttctagaaaattaattagatcattaactaacaaacagaaagtgtggtcagaataaaaaatgaaaaaaaatttacttatcacagtatatgaaagcatgcactacatttccataaagtgtatgctttcacatattgtgataagtaatttattttcttctggaattggcatgtggaattgcacaagcattgaaatcagttccaaaaattactctacctgaactgtagagctgatttccgatgcaaagccgcctgtcaagggagcctcgtgactgattagcagtcgccctgttttgatcacagactgaaagagaaaagaaaaacctgatgttaaaaagaatatctattttatatatatgatggtagttttaaatcagtaataaaagtaaattatatacattcaataaatagtgtaaaaatcagtaattcaattgtatgccaataagttacaactcgctttcgacaggtcagtcatctgatttttgaactgtaaaatttttttcaatatggtttgtaatcccagtagaaaagaaaaatgagatttgtaattccatatatgcaattaaaaatgcatacccattattgtaagatacgtttgtgttataaactgaattgctgtatttcatatttcaatgttaatatttttcttcatgttaaagagcgaaagttttttttattcatttgtttgcacataaataacaatggccttaagaaatactgttttatggaaaaggaaaacacaaaaacagtatgtgaaagctatagcaaaggaaaaatttggcagtaagaaatccctgcaaaagtaaacctccttcgttaatgtgctctaaaatctggttgatgaccacactctattttaagggtaaaatgtcacaaacaatgagtacgtattctcaatagttgttcaatgtggttgtccacactgtgcatgatacactctgtaaaatattaaataaaaaagtatagcaatgatatcatagcaggatgccagctgtgttggcaggtaaaactattaaaatcaacagcaggttattgcttaaaatatgttgaaaaattatcatagtaccaaagagaaatggcagttttgtctttagatttctaacaatttaacatcacctttaataaaatctgttactatttcataaatataaaatgaaatctttcaagcaaaaatatctattgaaataaaagatttcattcattctaggcaattatagttcagaatttaaaaagtatgcagcagtttcagctagcatatgttaaactctcagatatagccagtagccatgacaaaaataagttaccatatctactaggtaaatagtgactttagaacataaaattttatgaacaccttaatgaataccactcaaaccccagtgaaacgctaaccttaggatatttgtatttggctttctatgactgtgattaattatgccatttgtaagagtcacaaattaaatttcaatgtacctgtacaaaaatataaaaagacaaaaatattccacaatcacaaaacaacatatgtattttcaaagtgttttctaaaagatgtcctgactttaagaataaacaatgaaaaaaaaaagatttgacaatcagatcattctttttttgtttttttttgagatggagtctcactctgttgctcaggctggagtgcagtggcaccatgtcggctcactgcaacctccgaatcagaccactcttatagctctgaaactcagaacttggccaacataaaagtatctaaggatgacagccaaaatccatccaagctatctggtgcatcttaaattttgagcaggtagaaataagaaacttctataaaaatgctggtaccctaaaaccctacacaaccaaattgttcctttttgtctgagctcaggcctatccaaaatcaaatgacaacctttagaataatccctgaaagcaaacaagcaaccagggcaggtggcctatgtatcctatagcctatgcagatggccacagagtggatggtgaaatcaagcacagatgaccaaggacaaaagcttccaacatttgaggttgattcaacatgatttgtaagcagataaaatttggagcccttctgagcactcctcagcagaggaatgactaaatagaccaatatgcatcaacatagtagagtattatgcagccatgaaaaagactaaggacatgtaaagacagccatgacaaattaactggtaaaatgagtaagttgcaggacgatataatcttatattttgtaaaaaacaaccaccacagcagtgagcacaccaagcaacttatcttttcaacatgtacatcgagccaacatgtataaacagtccagaaactttcactccaaaatatcaaaaatagtttctcccgagcaatgcagtgaaggaagtgtaggaaagagacttttactttttgctttatgtatgtttagatcactgaaagtattctagtaagtctaaaataaataaaaataaagggaaagcccttgaattagtgccaaacatttaaaaatacatgttattttgtagttataatcttctcaaaaaacataataatgtttttgtgatatcttaggactagcttcagaaacaaaggaatcctgagatccaaactccagcagcaaacaggcacactaacaacgcagggagccagtcttcccatcccactctgtgtgatctgctccaggtcaggaccatatccagctcatcacttggccctcaaagccgttagatacttgacaaaatgagcaataaactactggcatcagacaagttcaagttcttcaacacctctgtatgtgcattacaaaaattgtgtgctctcagatgaggagttaggctgacagatatggaaataattccagaaatttctaaaacaccaagaactagaggaaaaatacaataaaagtaatcacactttgagtttgtggaaattgccacttgtctacaaacaaatggaacaaaaatagtgcagcaagaagagaggagtcagaagtaacaatcacaatcataaacaatgattgtcacaaaaattgctatgtgctaggctctgagctgagtattttacaattacttcacttaatttggaaagcacttatgattcatttttgcttcttaaaaatcattgccaatgtctaaaagtattaaaatgtattatgtcaaaattctgaaaatgcaaaaatttagaagactgatactttcagtcacactcaattagcatatactgaactgtctgaaaacagttcaatcattttgtgaggtatagtagaaatttgttatatgctttttatcattcacaattttaacttgataaaattcctgaagactgcttttctatactactttggaaattattaacaatgttagtatagtgaaaatgagatcattataaatctacaaaacaagagaatgttatttctttctattctgtctattttaattagatattctgattaaagtacatatttttgtcccctttaataggcttttaatgttcacatatctaggcaaaataatatgtaactgtcaagaaattcccctaaccatatttagcattttgatgtccttagtaaaaattaatgcagtatgtttcaatggagatggccatttacctttttaagataaataattgtagatacaatgctaataatcatttaaaaaatattttcttccaaataaaataaattttaaagtttttaaattttcttctgagataaattcatttcatcacttgaaacaaattaaaagtgtttaaacaacttttcaggatgaaagctgaacctatcaaagccaggaaagatcacgtaaggctggatttgcaagtatctacttctccaactttttaccaccgagtactgttcctggattccgggctatggcagatggagcaccaatgagttacgggtgacaaatggcatcagggaaagctaagccaattgaagatcaggaccctgaataactcctctaccataaaacaaaaggactttgttccctgcaaaggaacaaaagatttgttctaaaagatttgtcaaaaaagcattaaaaacagtcctgaaaggctcgcagttttctcaccacttcagttagtcattccgtccaacagagcattagtggcatactatcacaataggagcaatcagaatcccagctccgtacacacggcattgccaaaggcagatatatcaaggcatccctgttctgctggaaccctaaacttgtttcttgtttggccactctatgacttttccccattacccattttctttctacccaaacgtctttatgaatgaccataaattaaccaatgcagaatgtctagcacagtgctctgaacattgtagacactcaagaaaagttaactagataaaaactccattaaaacaaatcgtttaactttattatgcatgttctctttaaatttatttatgctattgcattcttagcacaatccatttttaaggtagttcagaagtatatacttgatcacatcccagaatgatttaattatgaagtagcatgttccaaattgatggtattttaatgtagttttaacaataagatatttgtggtaataagagagctgctaagttatactctgttaaaatgattgcacagactttggctgcccaaacattagacatatgttttagtgaatatagcctttaaagattttaacacaatccaaccaggaaaactgttaagttgttattctaggagaactgatacagataggcaaaccataaagcttccatattcctgaaagtacaacatcgacatttgaaaagcaaaacatttatcatctatctgtattttttattttatttcttcctcaaaatctatagcaagattgttttcttacagacaactgaaccttacctacaccaagtacagcaactattctgcctgctgataaggttaaaaaaaagcaatattttggataggcaatttatagcccttttaatattttctatccgaatataaagctaataaaaagcaaaagaaacaccaaagctggtctgtatcagttccttctgaaatcaagagaacctcatatatgtaatgcatacatataagtacaactaatggtaaaatcatagcacgtatacttcattaatcaagaacatattatttatacaatttagaatcattaaggatagaattttgatgaacttcaaatatcaacgcaactgaattagatacattttttgagacgttttcttgttttgtagccaagtgcatgtaacaagttagccagaaaaacctcacaattaatcacaggttagcaaacatattaatatatgcctagtaatttgttaatcagcatgacctcctccacacatgactggaccactggctagtattccgctggagaaatgccaatgctaaacaacaacaaaaaaacagtcctgagcttcagagaatgtcttgaaaactccattttggcaaagatgttagtgagggggttacacatattttagtattgtaggaaagtgtaaaccaagaaaaactaaattgtcagggctttatcacccgtgtggaaaaagtacaaaagggaacaagcagagcacaaagacaattacatgaagagctgaaaaataagcaaataatgttgacaaagaaataaaacatttgggaaatttttgtacatcctcactggttcattttttcctcaatgatttgtataatcagaactgaaatactgaagaacctaagaaaactgcttttgcaaaattaaaagtggacatctttctgaaagctacttcaaaatatttcagataaacatgttcctgtcagttaatcgaccttacctttccaacttgctttctaatagtccctctatgctccaggcatgtcagtcccctcacaactctgaatgtgattgatggttttccacctcagacttccttccccacactggcagacattctatccctccctcaagacccatctcatacaactctttctccctggtccccgcaaccagctgggctttcccttatattaaaccccatggtacctttcctcctttttcttgtcagattgtctatgtactcgtaaccatttcccagtagaatttcagggagctgacaatgcaaaatattatatgaaacctaaaaccaggttacaagggcaagaatcaagtacagtaataaggtgaaggcagcacactctgcttcaactctctctcttaggaagacacacaatttacctcatagcacagcactgtatagatatgtctaatcctccaacctcactctaaattacaagtttgaagacagaaactcttacttacaatgcctactgaagaacacagcacatggcaaatagatattacattgagcaaattatgccctttgtatattagtaaaagataaacagcttagaaaaggacctaagtatctttgtttctttgttttgaggaattttttttcatgggcggggggtggtggtggtctctatactatctccttcagcactccaaatcattcaagagcatggaattcagaactaacaaatattctgtacctaactagaatacctaatacattgtatatgtggccgctcaataaatgttgcttatattgatccccccaaaaagcacacagacacagtaatttacatgaataactcttcaagactggaagtctctgatgtctttcatatcttagaggggaccagtaatgttattaggatgctgaaagagaagtcctataacctaagctctaatcgttctaattgtaatagaggactgccctgggccaactctctccacctattttttcctattccagacttgttttagaataacgagttcgcagtacaatacatgcttctgtgtacctttttaaacatgcatgatggtaacaaatacacaaacactgagttagtactgaacacaagcttcccgttcctactgaaaaaaggtcacaatggcggcaaaggtattgtactggactagaggacatttattagagatgtagttaaacatgggtaaatagtaaataaatgctttcaaaagttttttgccccatttccctgtcagcttaaacatcaaacaaagcataaccacctgtaggtagcaacataattatttctgccaaaacaatatttcaaagattgaagtagctgcttgtcaggttgtttttgtatcttcactcttttccatcagtttttaaaaacattttcataaacttattcctaatctccatctcaactcaatctgtttctatgaagaaaagaaattgtaacatgtgatttggctattaatactgttgacttccatgtcatagaattttagaaaactgttgaaaaggtctactacaaagccaagttgtacttttgagacacaatcagggtgctgcatcttccacaccttctgtccttagaagacccttcctggctcttccaggatttttctttggagttggcaatggcaggaggcatttggaagtaccacataactaaagccttactgtaaatatgcttatgctcttctaataaataaaaaagtgagagttcaagagttactgcacagtatttggcaaatttagaacctgaaccaaccataaagaccactgtcattatcattccactatatttatcatttattaattccagcagtttaccttcattcaagtgttgttaccatggtgttaatacctattatattgttccaagtttagcattcaggttataattacaagctgactgaaaaattccataaagatagttttgttttccccttttaatcatttttaattgtacagttctgtggcattaagtacattcacattattacacaaccatcacgaccatccgtctctagtccttatctatcttccctagcaaaactctgtagccattaaacaataactcctcattccctcttcttccaagcccttggtgtcattctactttctgtctctatgaatctgactggtttaggaaccttatataaatgggttcatacaatatttgtcatcttgtgactgccttatttcacgttgcataatgttttcaaggttcatctatgctgtatcatgtgtcaaaatttccctcctttgaaacagtaatatcccactgtatgtatatatcacattttgtttatacattcatctatcaatggatgcttaagttccttttaccttctggctactgtgagtactgctgcaatgagcataggtgtacaaatatctgtttgagtccctgctttcacttcttttgtatatatacccagaagtggaattgctgggtcatgccataattgtttaatattttcagaaatagtcatagtaatttccacagaggctataccattttacattcccaccaacagtgcacaagagatgcaatttctccacatctgtaccaacacttattttctgtagttttgacagtagccatcccaatgggaacgaggtggtatctcattgtgattgtgatttgtatttccctaataattagtggtgttaagcaatttccaggtgcttaatggccactggcatatctttcttggacaaatgtctatttgagtcctttctccattttttaatccccctgttttatgttttgttgttgatatagtgtttcaaaggtgcttaatacatctaatttcttaaactggtccctttgaggattggaaagaaaatcttttcagaatatgatattccatatggaaaaatatataatcaaatctcaattgtttaccatgtcctcttttcttaaaaagcatcacgttctggtttcctcaccatcctccattctgaaagagacacagggaaaaattttcctgacatcatcaatgtcacacatcctctgccagactgcttatccatgacagcactcctctcctgaaaaatcttcaacggtaaatcagctaaccagaatcttagagaaaacttatacatggtaacagcacctataattcactgctacagaaacaaaagagacaagttacacactagaaaacctctgagcctcatagctttgctccatattgtgccagtaattaggagataaataatgccaaataagaaaatttgaacattatattagtacaaaccaggaaatcactttcatcatcttatttattacatacaatctctcaattaacttttaatgttgtataaattccaaaggtcatcagttcatattaaaacaatttcttgaaccacatgtgctaatactggggaagcaaagacgagttaactcaggtccctaaagggttgtactatatatgttgccacaatgccctagggcaaagcatacccaagaaagaaagaaattaatttaaagattattttaagtgataagtaacaaggaaaggcatgatactggtattaaaaatcaatttatttttgttagaaacaagtttttctagaattttaaatttcaactcctttgttcttttctaaaaaaaattgaaaaatgaatttttctcttcttaaaacaacaattactaatatcctctgcttttcaattcgtaagtccccacttggcaaatttttctcaagtgttgacaacagagggaaatactatgtctggccatcataacagttctaaagggtagaaactgacatcatcccttgtactcccagcataccgtgaataagaagaaagtgaccctaaccaaaaccaagattgtcagccagttacattttacactgctgttttaagcacgtatcaagggtacaattttccctgaagccagctggttgtctaccaaggtcatgcttccctaaggaatgatcaaaagtataaacactgctacacttctgtatcaccatggataaatggtcctattttctaaaacttggtccaattctgctggaataaatgaatttttggcccattgtgaagcaaaaattatgtgtagttcataatacatgggcaaggcttaaaatcttttgggtttttgggtatgactcaaaaaagtgctggagtaaaactcaaaggatatttcagcaaaaattacacatatcttttgtagtgtatataactaagatggcacagagaaaaacaaaatatataacttacgtgctttcattaaaaccaagataagagggttttaattatgtatctaagttattaatgtgacaaatggattcaggaaaagaattctttagcagaaatagtactatttttccgtaacatattcattgattacttaatagagaaggtaggaatacagaggagaaatttattgtgttttattcatttgtttgttttgagacaaggtctcgctctgtcacgcccaatggagagcagtggcacaacagaggcacaaaaatcttaaggtcaaaaattacattattgctaataggatattagtgagaagatacaataataatagttctccagaaatacaatttaatatttaaaaatcaatttttatctaggtttaaatccttttgttcagggaaagagctgagtaattttctttcctcataatgcacaaaaatatcaacaatccattcctatttgatttacaattctttattctgcaatgctttcattgacaaggactataacagtaacatgtttctgtctattataccagaagaagtgagatatacttacaatagcttaggttgtgaatgacagtattttatttttttaaggagtgatccaagaagattttgtgcttggctcacctcatcataaaaagttgatcactttgctatattgtctatgaataaaatagttattataaaagagaaaataccactgctaaacaaagaaaatgttctattgctccattaatttttaaaaataagtttaaaagtaaggacaaagtggcatttcacccattaatgtcacaaagtaatttaaatttaaattctgacaaaggaatatagttaaaatcttccttacattgccaaaggccatgtaaactgccattaagtcttttgagaaatattttgggaatatatttgccaaaagctactaaatgttcaaatccctgaaataaggaatctcagttctgagagttgattctcagaggactccaaaagatgtaaaatactggacttctggtttaaaatagtcatatgtgtgtgcgtgtgtgtttgtgtgttaccacggtcaaaaaaattcagaaaaatttaagaaacactgttttagagccagggcatcatactaaatacccaaataccatatttggtcatgggcaaattccacttaaaaggacaaagcactttagaaatactgcctttaaatcccttccacagctaccataggttgcatactgcttcactaattttgtttcatctgtctaatctctgcaggcccttcagtgtgtgaccctagctcagtggcagaaaaacaagtggaaagctggcagcacaggagaagaccttacctgtacagcagagcttctacaccagagatcaagatgggaactgcacgctctaccctttgggtggaaacctgaggagattcccacagcaaacaaattgagagcagaatcaaagcgaaccccaccttctggttatgggcaaatgagcctgtacaaactgatactgccctattcaaagattagtaaaggaagcaaaacatagactaaagctaatagagcctactgaaaaaaaatgctgaaaattatcctgatcactcaaaagaaaagcaggtctctaagaataatctacttaacatccagaagaaagtgttaagcaaccactgtgtactctcaaccgaagagctaacctttaagaaataagaataataattctagggagataataaggctgggtaagaaaggatacagatgaaacgtgaaagtctcataagtaagctaaaaccacactcgtgaaatgaagacccatgatagtggtggattcgtgtattctcgtggtatcttcccctactgcctaccactctcagggtatgatgctccacattcagcagacctcaaaactatttgctgagtgaatgagtagggataaattggcctcagctgcaaatgtctgaaaaatacagggacaagaagcaagcagacaggaaggcaagttgagtaacaagttttctttccccctcctcccctggccacagactggcagtgaggatgctttcccctggttgtctccatcccttctgacagccaaggaccactgctggagagcatggacgtgctttcctcctatccttccatttgtcctttcccaaagtccacttgaggcctgctattgcccgaattggaaaagaagccaagaataaaaagaaaaaggaagaaaaggaggttcatcttcccagtgtgacaacaacttaaaggatgaggtacacaaatcacagactgcaaagagctttcatttagcaagagtcacgaaacaaatatctcatgacctcaagaagtaatgggaataactaaggtaataagcagtggaaggtggtgtggacaaccagagaacacagtctctgacttagggggccaaactcatttcctttttattctttttgaatactatgaaagccaagcaaaacatgtctccccaggccagattctgtccaagagtttgcaacctatactttaaggaaacatctttggcaaaatgatcttttttttccaaatatcaagatgcactttctgttatgttatctttgcccacaaaattatacaccgaatcaggcagacttccattccggccttcccaaatatcttgtggatatttaccagtataaacatccattttgttgtaaagttacatttagcaaagcagacccagtggttcaaaagaaatttgagccatatcttcaccacgtgtttctaaaacccagaaaaacaatgaactagtcaagataatgtgtaaatttaagcattcagtagtcttgctatatgttccaaaatgacatcataaatgggtaattatggcatttggaattttaaatatgcaggaaaaaggattctatggctctgaagctcttccccatattgtacttggtgatgtaccgtacttctgaagcactcctagggcccttaccaggagccctccagtgtgtttatatactactggaagagtgagagtctgtttccagtttcaagagacccaataatttgtagtccctcataggagaaatcttgtaccaagaacatccgcaatggatgagatgcagttttactgactaaaagaagttttagtaagttacccaaaatacagttttctcaaaacattacataaaagataaatggtaagattgtattttattaccccacacacacacacacacccaccattaccaccagtttttactaaattgcttattttggccatcagtattggcagctgggccaggcaactagcggtgagagtggtgtctagaaccagtatatcaacaggtatgaagaggaagtaaaaaagccacaaccaatgttttaaagcaaaggaagaaaataaaggtgataccatgaaagtaaccaggtttaattcaggaccaatacaaaataggggctggaaaatccaaagacctaaatgatgaggataagataggaagttcttttcatagagtcatggtgtggggttggagttgtggatatttatctcctcatcatcactactgtcatggtcccagaggttacctacatctccaccttcacttggtgcatcttaactacattcaaaaataaaattcagaattgggtttttggctttactcatcataaattaatttttattaagcatataaattggtgtttttgaatctactttacagtattcctttagttctgatgatgattaatgtcatcgttatttccaataaattaaaagaaacatgttagggtatcattattcttttggctacctggagacccaaataacttaagaaatcatttataaatctgtctcaaagaaaaatgaccatttctcacatctactataaaattgtatgacctataaatatgtgtggttgtatttataaatgcacccttttcacacattttacctatactatgtgaagttcatgtattttaaaccatagcctcaaatgtaaccaggaaacctccatgagggtggaatcttgacatagctttcaatgttattgctccccggtcctactactttatgatgccaaagcgtatcactttaccctgggactgccaaccgtaattctgaaatcggaacacaactgactgcatcagtgacactgaaaccataatattgcagctggcctggagcagcagcaagctgctgatcagtgagcaagacagtggggagggaggaatggctgaagaaaggcattcaagacaaatctccaaattctcaataagctgcaaccatcaaagagtccaatatctaatctagaaaatgtcaaaggtcaggttttttaacaaaatcaagtagggagattaatattaagtatatctacactgccttcaatactgaactgtttcaggaccacttttagaaacaacaatatgataccactccccatgccaggacatcttacagcaatggcctcatattgaggaaaaaacatttgcaaataaagtagcaaacagtaacttgaagcataagacctacattctaactacagcttgaaagaaagaactgggggggagtctggaagaaaattataaccccaagagttatagtgtaaaggtgaaaactataatttatgtcttcatgttgttaacttgagcatcagtgatagaatgcatgagtgctgctaaaatggatgctttttttttttttactaactctcatcaaataatacatcaaggaatacatgtacacaccttgcattgtctactcccctcatcaggatcactgcttagatactagcccccacatcagcaacctggggctgggaaaaggcaggtactcactctcccggtgcctgggggagcctcagagccatctgggcatcctgcccccttgggctgctcccctgatccttacctttaatcccaatgcatcagacccagtgtttgctgctttagaacattttattcaacagaactacaggccagtgatgaaaagatgtttataaggttgatgctttttaaggaagaataacaaaattttgttgaatatttcctctggtaccttctaaacagaaaggggagtgtctcaacccattgccccttcaaacccctgaaaatgtgaatctctgactcagcttgatgaccgtttctcctcaggcacctgaaccatgaaaagctgatgaggaacaggtgaaaacagaacctgtcagtgatctttgaatgcttctgaacttttcagcagaaacagtgccttgtcaatcactgtgttttgttttgttttaaacaacacagaagcaaaattctatgataaaaattaatatggcagacataatacagaaccagaacattaagtgggaaactgaggatacatagtacagcgtatttaaaggcagaattaaaattcttaaactatgtattattcttatatataaacaattcatgtcctgatttatagatttttataataaatatatatatatatgttgtgatggttaatttgaggtgtcaaatagttaagttgaggtgttaacttgaagatctgtccttattgcagtcaggcaccatccaatctgctgggagtccgaaggaaaaaaggagaaaaggtaaatgtgcccgtctatttgctgggctgggatatatccttcctctccaatccttgggcaacaactctaggctccagccctttggactccgggacttacaccagaaccgcctccctactccctcgccctgggttctcagagtaacgctattgtcttctccggttctgaggcctttagacttagtctgagcctctctaccagcatcccagaatctctagcttacagacagcctgtcgcaggacttctcagcctcgataagcacataaaacgaaccccttaataaatcccctctcatctatctatctccttttgattctgtctctctgaagaagcctaacacataatatgtattatcccaaacaagatacttatactgttacattatttattagaatatatattcatatatatatatatatatgtatctttaaggaatatatatgaattatatatctttaattaaaaatatatgtatatatacacatacacaatataagtgtgtgtgtgtgtgtgtatagatacatatacacacatagcatgtgtgtattcacagaaaaagaaagatgaagagagacagacagatattaaagacaagagaaactaggattttaaaccaaaagtggtgaatcagcccaatatcagactagaagccctatgacaggacagactgttttttcactgctgtgcttcagggcatcagtgcatagcagctactcaatagactaacttgttgaaaggctaaacattattatttcttccctttttaaagaagtctcacataaataatattaaagaagctgtaactccagtgagcaaatttattcttaataatgtggatatggtatgtgtaactaatgatagaaaactataaaactgcatcaggaaactactagattttagagtacaaccataagtatacaaatttgaaaacatcctttcctgttgctcaataattgtctaattaggagtctctgttttgaaccatatgttgccattttttaaaatacatactgtgagacaacttcatttattatggctaaatattattaacaattatacctcctgactaaacagctaagccaacataagatgtcaaccagagtatatttagcttagcctaataaggagttactagatttcaccagcacagagagaagtgctatgcaactgaaccaaagaagaactacctgagactgttaactttccaaataaaaaatgaaagtataaaaaaagctttataaaaatggatgattttatgaatttggatattttccttagtcaaacaactttatatatgtgtgtgtatatacagtcatgcccataactaaattttggtcaacagtggaccacatgtaccatagtagcctcataagattataaaccgtattttgactgtaccttttctatgtttagatatgttttgatacacaaatacttaccattgtgttacaactgcctacaatattcagtacagcaacatgccgcacaggtttatagtctaggagcagtaggctataccatatagcctaggtgtatagtaggctatctaggttctagattcatgtaagtacactctgtaatatttgcacaacaaaattgcctaacaacatgtttctcagaatgtactcctgtcgttaagtgatgcattactgtgtatatacaaagaaacatgccaatacatataaatgtgacattaagagaggaagttaaataacatggatcattttctttctaactctgcattttattgacttaagtttattatttgcaactactttgacgatccaaagagaaatgaacagtttctcaattcagagacaagcatattgtagaactttcagcctttggggggaaataaccaaaggtaaatagcctcagggcacaaatcacttcgctaatggtacagtcaggccaccaggaaccagtagtcaaatttctactgctggctttttgacttatcagttgttcaaaaagaactttagtgactaggatagtacatctgacatctttatgtccttcatattttctctagtaacaaaataagaaacattaaacacattttatattaggtatattctttatgctcaggaggctaagatatagtccagaggaaattccaatttgggaaactaaatttccattgttctctaaacacatggacccaaatccatggcttgcatccctgtatgttgtaagacagtggtaaaatccttctggttgtatgatccctataacaaggaaaactgattattttctccacattagtttctcccactgcatgctgttcggtaagagcaggttccttagtaatcagctgttagcggtgatccgaatttttttcttttttttcccttcttttcacaggtgttgatgaatttttgtccttttattttttgtaaatggaagtatttgagaatttaatatcaaaatggtcttaaacggagaaaaatagaagccactatcaatagaaacaaaggaatgaattatgaaaagtctttcattgatgactcatttttgaaaaacagtagaaacattcctacatctaataggttttgaaaatattaacagcaatctgtatattacagtcctcataaataattatggtacttatctcttttccatattacagtttatggaggtgcaatgcactgttagcaaaagtacaataaggtataaaaccaatacaactaagacttcagctctgtcttcaaggagtatacaatccagaagatattttctaaagtatatagaaaaagcagatataacatgtggtgacaatgtaatcagactcattttaaacaatgaacactcctcttcaaaacacccaaagaaagcattgttctaacaatgaagctgttgtttcacacactttggggaatttgagggggaatgatctttttgttacaaacagagagataattttatctgtctgtctgtctgtctgtctatctggctgaagataacagaaatgtgttctctcacagttcaggaggccaaaagtccaaaatcaagctgtcaacagagttgtttccttatcagagactctgagagggaaatcatctatgattctctcagtttctggggatttctggcattccttagccttctttgtcttgtagtttttggttttgttttattgtgttgtgtttttttaagagacaggattttactctgtcagtctgcctggagtgcagtggtgtgaacacagctcattgtaacctcgaactcctgggctcaagtaattttccagcctcaacctacagagtagatgggaccaaaggtggacttcatcaacctggttaatttttttatttttatttttgtagagatggggtctcactatgttgcctgggctggtcttgaaccccagggctcaagcaatcctcctgcttcggcctctcaaagtgctaggattacaggcatgagccatcgcacccaggctgctggaattatctttaaaaattagtgtacagacaactttaaaaatcactcacattacaatcacacttcataatatagaatttagagggaaaacatttaaattctcaaaaacaatcttattaaaaaactatgacatgtgaaaaaagaagaatatgtaccttaagagatacaatcaggataaaatagaaataaagtaaataataataaaataataaagtaaataaattaataatatattaggatactaggaagccagaggggaaattttcaccttttgggagttgattatgaaaagggaaacagtgattcgatgcccatccttgatgacacctgaggcacattgcacatgcctcgataaaacataaacactaatactgatacaacattctagatagttattttgtaataaagtaatgatcataattatttcagcacagaatttattatgaaatgctgcttaattaattaacttaattcaagttctgtagatttttttaatttctattttaataataacttatttaaaatacaaaagccatgaaaaaaattagtggcctataaaagctaaaacttattatcctctcctataggattaaaaacaagttatggttaaaaaatcttcttttaccaagattcattaaaaaactatataatattcagaaaaacactataaatatagctatgactttggggggcaaaagatctcctgtgactactatatcaaaggaaaaatatttttatttatgatttctatgcatggtaaagtgatatgacatgatatgttgcttttttccctatcatccatgtcttctcctttacgtaatttttcctttggaagtttatgctttcctagtaagataaaatgttatcttatcaatcaaagagtcaatcaaagagtaccacattcccttgaccaaggaatggatacatagcccaagaattataaataaaactctctccagaaagcccgacgcatgattaaacagcatgtgtgcacaaggtccaaaaactcatttgcctaaatggtgaaacctgaaaagaccatctactgcttcctgcaaccttcctctctagatctgctgtttcctcctcttctaaggtacttcccagatgtttgtaggtctttgcacacacaaaaatttacctctgcatggcacgctggtgttacaggactagactggtctctctgccccaaagctcaaccaactgaccttagccctaagtgatgaatatctgctgacatctgttccccatcttaagcctagcagcctgtcttggcacagctctacaaggcctcattcttcaggttgtcctcaaactaaaaactacaagatatctttctaaataaactgctccttaatttctgttgcttacaattaaattactgatgcagatgttgtgaggaaaacaatgtaaaagatagccatgatgattatgataacagtggtgatggggatgatgataatcattatgatgctgagaggaggagggggtgaagaaagagaaggaagaagaaagaaatctagactatacagaactttacaaacaacctatttaactgacttttgtttaaactgtgtgagagtaggttgtaacagtccaattaaatcttttatgcttaatatttatgttactcatttagtatctcttgtagtaagatagtatcagatttatacataactatactttgtaaaaatttcaatgttaagaaattaggtttagattattttaaatattattttaaacattatcctttcaaggataagtaaccatcttagatggtggccatatgtatgcaaagtaaatagctttacttaggttttagttcactcaatgcttttaaacataatctaagtttttctcagcattttattaacttcagaaaattaagtttggaaaagctattaaaataacttatgaccaataaccttgacaaaatgtggttttacaactaagacaccagtgaatggagaattaagttaccttcctctaattcttttataaatatgtttggttcaagacacagtcttattcattaaatgctaatgttgaaaatgatctgaatgatctgagcgataacattgtttgggcctgaatttctccagaaatctctcaatttgccacatcatttgatagaaaaaaataagtccagtgttgtatgaaggaaatttctgttactttaaaatgcaacttcagcatagactttgcaatcaggtggcttggattcaacccctagcacttctgctcactagttgtgtgaacatgggcaacttacttaacctgtctgagacagcttcttcgcctataaaaatgatgaagtaataacacccaaccaagtagtaaagttgggatgcttaaatgaaataatgcacacaaagctctcaacgtaatgcctacagtaagcatgctatagtgctagctattactttggcataaaattgagcctttcttctgtgtcaactcatattctccatttgtttatattagtttttaaatgtatgtgataaagtccccacagcagcagcaatgtccaataggttaataactcaataaaaaatttgtacacagctcatgttcaaagtatttttgtgtgttagatttgattcttaataacttaaatccctaccattaccttgaaaaatgagagaacaaaccagctgttgatgttggttgctgcaaataccatacacaaacagaaatacctaaaagaaaatgatggtctttcagaccctaagaataattttttatgagaacagagtatgaataatatttgaaagtttaggccgggagtagaagttgtctcttgataatacatgatcttcttggtttatacaataaacatatggcagaagggatgaattctaagcacagaacagacacatgatttacacccccttcagggacagactgcttggaaatgaagagcacttgcttacaaataatatcttaatacaattttgcctttttcccatatccctgtgacagactgtgttcactagacattttaaataagtttatactgtcctccaaccttgaacaggatgctttaatacctaattgtaaaatgtcaattaagtaatttgctccatttgcatggagagcaaaaacttatctgaaaaatcatagcattatttgtgaaaagcttcacattcccacggctatttagatctagcagatgagtcagaactcaaattagttaatagaggtattgttaacaacaagaggcctaggtttttaaacagcaaaacaaaatagaattcccaagcttaccaaatgaaagatcctcaacttcaacagttgtgaataaaaggaaaccagggtctacaaagttaaatgacttaactattaatactatctagtcagtagtgaagccaaacaagaatcctaatctcccgggacaaccagaagtacaattcttaaatagttatcacataattcctgagccaataaacaatctgtttattcaccatttaaaccatagcaattgcttctataactactaagcactttatatcataattacattaaatcttcataaccctaagtggacttcacagatgtggggttaggactagagaggttaagtgacttgccgaagtacatacatggaaccagtaattaagcttagataagcatgctgtatatccactgtgccatggactcttataagatggattcattcttaccacaggatagtcactccatcttccccctatgttgtataagcctggatgatcctaaacccaattctgcattcagtgataaaatgcagtttctggtttcaaaatgtccttagtcattccaatcaagtgacaacagaagtacacagaggaggcctcccaccttcctcagctctccagatatgactcttcctgtcttcaagatgaaaaacctcttctcttctctccctctcccttttccctcccatttctgtcaatcaagggctgtgatcacggtttgggaaggtaggaattggcctctgagcgtggactgaatacatgttgcaaaagctagaattcatctttttcttcttccttcatttgacagaagattgagacagaggctgggactttacagccacaattctaggagtcatataaaatatttaataccacaattttttgagagttaggagtaaatgccagaagtaaagattcatctgtgagaagtgataccaccctgatctaaactcctaggcttcagttatctcctcaaccagaatatcaagaatattggctgtgaggtggtggcagtggctgttggggaggccggcagaggtcagagaagaaggagagccaactaaaacaggatactaactactctctgaggctgcaacccagcccacactctacaccactgtgtactgtaacatgaaggaagtgtgggaggtggagaaagaaaagtgaagaaaatgggcaaaacccttcccctcacagaatctacattctataatagaataaataatagcattatttcagagcaacacacatacaggcaggtgcttacaacaatgccacaacttaccttacaaatgactctttaaaatctgagttattttaagaggaggttttcaaggtgtaagttaatttagcttccatggcaggtaattaagttacttttatattcttttgctttaaggaatttataaatgaagtttaaaaatattaagcactagctcttttaaaactttttacattcaaatcactattacaaaattcatgttcaccgcacttggactccaccctcttacctccaccccaagagtactctttgggatggtctgccttaaaatgtatttgacacataaagaagtgacagcaattcctttgaaatgactgagtcataactacaggctatttcactatttggagtacaacatgtcctggtcaccccttttcatttatatatcatacacatataaagtaaaacaaaatttaatttgcatctagcagctatctgtacttttatgtgcagcaaatgattttttttttaatggtaaaattactcaattgatcctccaggatggaggagtaaactgcttcctaaatatcagtcaggataactgcagacatgaatgtgtttttcaagcattctggaacataaaagttaatgtggctcctcccaaaatgctgtaaataaattcagagaagaacttattcaggtggcattatctagcccaaggaacatttagcaatgcttaaagacatttttggtcaccacaactggggatgaggattgggtgggaggaacttattagcatctagtaggtagaaatcaggaatgctgctaaacatcctacaatgcacagaacagccccacaataaacaaactataaattcatgttaacatggttaagaagttccagcctatggttgtcaatcatttttaaaactgtagtttccaggaagcctaccaaatacactgaagacatacacacctccacaccactatggctattctgggatgcacacacacaatacacatacacacacacacacacacacacacacatacacacacacacacaaacttccaaccagggtatctatctatagaaaaacatggcaagtctggtgatcattcaacagagaattcatctccattctctttcattcactcccttggcttcaattactgtatttatactaatgatacctagatctgccacttggagtgagagcctctctaaggtaccacaccagccactggataccttaaactttcccacatgcaaagctaacagcaattgtccatcatccactcattctgccccaactctcccttccacttcagctctacctccagcagtcccagccctggtgaatgacagcaccactgatcctgtagtcaagccagaagcctgggcattctgggctcataccatatcccagcaataccactgtattttgcacataattgtcacttgattcaaatgttgaacactgagtgaattaatcttttttcaaaccaatttataaatgataaaaataaaccctaagctcaaaaaatactagagaaaagcaaagtaaaacaaaaccaagcaacgcagaatgtagttcagtataaaaaagcagtgtatctggaactatatcccatgttcagaaaacagaaacaatcacagatccaaaaagaaccaaagaagccttaagacacagattaaacagtggaaaagatgctaagacaacagatgaccttggacactgtggtgctgactctgagaaaaatttgcttcaattaaaaatcaagctttatgaagatgaatttcccaaagcattgaaaagagagcaggaaaactagataagggagaaaaagagtacagtaagagagttagtaaaaattaataacaaccacctaacattcaaatagagttgaagtttgaaacaatcacatgtattattttgttctttcaaaaactctgaggcaagcaggtcttttaattaccaggcaataataattggaattcccactggcaaaacactgtagatttttaatagtaactaagcttcagctatggatcattctgaatgttaagtagcagaaagaatcaaaaccaccccaatgttaaagtggtcctcatcacaacatagacttccactaacgtggccattagcagcaattcacaatggtaattacctaaataaagagctgctatttctggactgaacaggggtcacctcaagaaccatttcccttcactgtaagtctctaataatgaatttagttggctgctgacaaccttccagaaagcatccaaaagtacagacaatatgctgcattgtcatagtgaattgttatgcctgttttagaaataagattttggaaagtttaaatgaatcgtaaagacatccaagtgaacaagaggaatcagaatttaaactttgatcaaaagtttcccttctacatctaatgttagctcacctgtaacatatctttgaaaaactaataattccggttataaatatgtgtggaaatcagcctgatttgttatgacaaccttaaggatgtagctgattgagtattcttcttgtgtgaaataactcaggtctaggtaataagatttaacaggataatatttttgaaatattatgtgatttatttttattcttactaatcttgttgctttacccagcaaagctgaaagctttggctttgagagacagacagatacagccaaggacaaaggcattattgttcagttataattttccaaatagcaatttaaaaattagctttgcagaagcaattgttttgcaacccacattctctaagagcttgagagagaaacggttttgttttgatggtccaaaaggactttgcttggaccatgcagaactgtagaattgagagcttatatgaaagttactcatagatatggcaaaaggagaatattaaagcagtttccctggctcaaagaaaagaaatataagtttgattgccttctaggatgaaataaggaccaaagtgtctaactagagattaaacattgtctgggcccttgaaggtgtgtctgtatgttgggggagaggggtgggggaatgtgtgagtttgtctatgtatgtgtgtatgtgtgtgtgcaagtgtgtacaagtgtgtgtcagcatggggctggacagaagatggggtggtaagatggtaaaacattcagaaagactaagggggtgtctccacaaacattaggagcttctgcccagcttctgaagccctctgggagagccattttggattctgtaagccagtgttgggtagacagcatacagctgcaatggtgaagaagtctgccaggttagaatgagctgaaagctttacactgccctgtctttccctgatttcagtaggatgtcagtgagataaaaaaacattctcatgtctcctcccaccaaaggaggtctggagggcttttgtagtagcaatggcaggaagggggctagtaagcatgaagaactgcagggccagccaatgaaacagcaaggagtaaccatggtttcattttaccttaaaacttcaaccacaagatgccccaattgttgtatagcaatgcaggataacatgaagacaaaggtcaaaacctaagcaagacaagatacataggggaggcgagggacgaccaggggaccacagactggatggacaccttccttctctcaatgcttcccatgcactgagaaactcacatttctgcatatccacaagtgtattttctctttattgcttaacaatttacaattttcacaggttagagaatcataaattattacaatatcaaggttatcctaaagtgtgattcttaacatattggtttaaaatgtctttctctcattcatccatttatttatttagtgagatagggtctcactctgtcacacacattggagtgcaggggagtcatctcagattactgcaacctcccccttccaggctcaagtgatcctcccacagcagcctcccgagtagctggaccacaggcacataccaccatgtttggctaatttttgtatttttttgtagtgatggtgtttcatcatattgcccaggctggtctcgcattcctaagcttaagtgatccacctgcctcggcctcccaacgtgctgggattgcagacatgaaccaccgtgcccggccctctcttttatttctaactggataatacttgcctctcttctgcttcattcaaattgacagagagtagaaaagaagggccatgacataaaagtgctgctccttcgtggtgttctaactcaacccagaagtcaatattttgtctaacagcacagagcactacactttggaatagtagtttgctattctggttattctaattccattagtctcaactagatgctgtgactgagagtacacatgaaaatagtatcagaacttaaaatgatctctatcgtgtttttaccaagtatctaaaaggtgaccagatgtagtgttaggtccagcaaggaaggaagctcaaaaagctacaaatgaatgtgttccagcctctcactttgtctactttttgtttcctgagcttttgggggattttttttttcctattgaaagccttttttgaattttattccagaaaactatccccctaaggtcgttttttcttcaattcctgggttcccatagcaaccttttgataaacatgttattggtattatcagaaaatactactgaaattgttgggtttcttatctgtctctcccactaagacagtataagcacctttcagtttccggtctctaattcagttgactttctgtgtgtgcaaaagtggcaaacagtgttctaagtactttacatacattaaaattctgtttatcctaaaaaaaaaatcacagaagataaagactactattatatctctgttttatagatgaggaaactgatagagaggtagaatagtagaaccaagaaccacactcaggccacctggctccagagtagatgctcaacaaaagtttgttgaattgaattcaatccaagctaggagaactatgattcagaaatcctaagttcctgtcttccagatactgcctttggtcagcatattttaaaccaatattccatgagaatccaattaaagaaacagttatcttttgttcaaataatttgttttgttacagtcatctttcttctgctgccgtactcctttactttttccaagctatcattactttattgagccaaaaatcattataatatgacttttgtcagcttccacaaggctaccattttgctcgaaaagaaactaatttcttccatgagctattagaagacattatctgttactattacaatagatgcacacatacataaagtataagccacatgagcaaactgcctgttatccatttttccctcagggcaacaacagttctgttctttatttaaataacaacaaaacaaaaaaattatgctaattactttaagggtaattttaactgtgttatttttttcttataattaagttggagctcctcacaatttgatttatgagcaacctcttttagaatctctatggaatattacctcaaaaggaaacttaaatttctaacatgtttttgaaaccattcattgcctagttattacttctacaacaacatacacttctagtcaggttgtgctgtggtttaagacatccacctacatgcgcacgtgtgtacacacatacatgcacacacacacacacagtccccagactgtgcccttccatctcctgcttcaccagcctttcttcactttcatctgtcatcaaacacctcagtctttcctacacatcaatacttaacatgtttcccaatcagtttcctaacattaaaaacccagtggcttcttctatgattttatagactcaggattatagatcagccctcaagaaatagtgtattttgtcttaggtactttgagagcttgtggcttcttattttcagtttactgaaataaaaaggtaagtgagctgttgattcatctttagataaattatttattgaaatagacaaacataaatatagccttcacaattctaagctctacacttacacagaaacacttttaaagtgagatttctttaaatgtaaatacttggccaggcacagtggctcatatctataatcccagcactttgggaggctgaagaaggaaaatcacttgagctcaggagttcaagaccagtttgggcaacaccatgagacactatccctacaaaaaggtaaacaaaaattagctgggcacagaagtgcacacctgtggtcccagttactcgggaggctgaggtgggaagactgcttgagctctggaggtcaaggcttcagtgcactgagatcacaccactgcactccagtctggatgacagagtgataccctcactcaaaaaatatagagagagagatatttaaggacttttctcattaattcttagctgttgtcaaacaatacttaatttaatatagttttatccagacattagtttaagatattctttctatctacattgaatcttcttatatcagctatatactgcttcagctttctattacctcatcagggagcaaagcatgtcaggaaccatagggctccccactccttccctcttccccctgattgggactctcctacctttgggtttatctccactgatattccagcctttgtgctggtgctgaagaatgaaacataataagcctttgcctgggaatgagctggctcagtagcattctcttgatatccctgtacttctagtctcagtaccaggtggtactcccttttactttgtctctctgtaccttgttttatcctattgtccagtctttcagtgactagattctggccatactgtccagttagtctgtggctgagatatgactatagagtcctgatgctctatgcctgagtcgtttcccgattaaccccaattgagagatagaatcctttgcccgatcgagagatgtcaaccttctctgcctgccaaaccagcctactgatggcaatctgaacactcaaactacagatttgcctttaacccaaacagatttgggtctctggaaacctacccaatttttatactttatctgttctcatctatttagcctgatgccccagtaccagtggactattataccccagatgtagcaaagatgttagtcaatagtccccaccctggttaacagccagcaccacactcctccccatgatgcaaagattaattaagaatacaggaaggcttgaataaataaagacaatccaatattcatggaaaggaataatcaatattgccatgatgtcacattcctcaaattatctataaattaaatgcaattcccataaaaatgtgaactgtgtgtgtgtgtgtgtacatgtgtatgtgtatgtgtgtgtgtcacttaacaattaatcttcaaattcctaaagaaaataaaaggactaaaaatatcacctctcctccctgctcccaccccaccaaaaataactgaagaagagcaagttcgggagatttgccctatcagatattcaaatttattataaagctatattgttaagatagagaggtattgtaaggctctaaaaagacacaaagaaacataaaatggacagcccatgaacaaatccacgtgtacatgaacagtggatactgttaaaagatgcagagtgtagggtcaaaaataaaacagagctcttaccttaaatcaccctaaatatatcaagtatgattaaaggtgactagagacctaagtttgaaaggtaaaactttaaaactattcaaaatattttaaaatatcttcatgatcttgtgataaggaaggatttaagtgagacggagaaagtagaatccataaatgaaaagatgaataaatttgaccacagaaaaatttaaaacttccgtgcatcaaaagacaacattaaaagagtgaaaacacaagccacagactgagaaaggatacttgcaatgtatatataactcataaaggtttcttagccaaataataaaaagaaatccacaaatcagtaagaaaaattttcccccaatagaaaagtggaagcaaatttacagacaagatgttcaacctcattagcaattacagaaaggcaaatttaaacccagtaggataccatttcacacaatcagattgatcacaacaggacatctcacatactgctggtgagcgtgtaaatggtacaactactgtaaaatcatttgacaatacctactaaagttcaaaatgctgataatgtaggaatgagaagtttcattcccaggaatttaccagaaatattgcctatatacataaagaaatatgtataaaaaattgctgttctgcaatatttgctgctctgcaccctccgctggtgatgcccaggcaaacagggtctggagtggacctccagcaaactccaacagacctgcagctgagggtcctgactgttagaaggaaaaccaacaagcacaaaggaacagcagcaacatcaacaaaaaggacaactcataccaaaactccatctgtaggtcaccatcatcaaagacgaaaggtagataaaaccacaaagatggggagaaaccagagcagaagagctgaaaattctaaaaatcagagtgcctcttctccttcaaaggatcgcagctcctcaccagcaacggaacaaagctggatggagaatgactttgacgagttgacagaagtaggcttcagaagatcagtaataacaaacttctctgagctaaaggaggatgttcgaatccatcgcaaggaagctaaaaccttgaaaaaagattagacaaatggctaactaaaataaacagcatagagaagaccttaaatgacctgatggagatgaaaaccatgacatgagaacaacgtgacacatgcacaagcttcagtggccgattcgatcaagtggaagaagggtatcagtgattgaagatcagatgaatgaagtgaagtgagaagagaagtttagagaaaaaagagtaaaaagaaacgaaaaaagcctctaagaaatatgggactatgtgaaaagaccaaatctatgtctgattggtgtacctgaaagtgacggggagaaaggaaccaagctggaaaacactcttcaggatattatccaggagaacttccccaacctagcaagacaggccaatatcatactaaatgggcaaaaactggaagcattccctttaaaaactggcacaagacagggatgccctctctcaccactcctattcaacacagggttggaagttctggccagggcaatcaggcaagagaaagaaataaagggtattcaattaggaaatgaggaagtcaaattgtccctgtttgcagatgacatgattgtatatttagaaaaccccatcgtctcagcccaaaatctccttaagctgataagcaacttcagtaaagtccgatacaaaaatcaatgtgcaaaaatcacaagcattcctatacaccaataacagacaaacagagagccaaatcatgagtgaactcccattcacaattgcttcaaagagaataaaatacctaggaatccaacttacaaggcatgtgagttgtattctccttgaagaggagaactcttcaaggagaactacaaaccactgctcaacaaaataaaagaatacacaaacaaatggaagaacattccatgctcatggataggaggaatcaatatcgtgaaaatggccatactgcccaaggtaatttatagattcaatgccatccccatcaagctgacaatgactttcttcatgattcaatgccatccccatcaagctgacaatgactttcttcacagcattggaaaaaatctactttaaacttcatatggaaccaaaaaagagcccacattcccaagacaattctaagcaaaaagaacaaagctggaggcatcatgctacctgacttcaaactatactacaaggctacagcaaccaaaacagcatggtactggtaccaaaacagagatatagaccaatggaacagaacagagccctcagaagtaacaccacacatctacaaccatctgatctttgacaaacctgacataaacaagaaatggggaaaggattccctatttaataaatggtgctgggaaaactggctagccatacgtagaaagctgaaactggatcccttccttacatcttacacaaaaattaattcaagaggaattaaagacttaaatgttagacctaaaaccataaaaaccctagaagaaaacctaggcaatactattcaggacgtaggcatgggcaaggacttcatgactaaaacaccaaaagcaatggtaacaaaagccaaaattgtcaaatgggatctaattaaactaaagagcttctgcacagcaaaggagactaccatcagagtgaataggcaacctacagaatgggagaaaaattttgcaatctactcatctgacaaagggctaatatccagaatctacaaagaacttaaaaaaatttacaagaaaaaatcaaacaaccccatcaaaaagtgggcgaaggatatgaacagacacttctcaaaagaagacatttatgcagtcaacagacacatgaaaaaaatgctcatcatcactggccatcagagaaatgcaaatcaaaaccacattgagatatcatctcacaccagttagaatggtgatcattaaaaagtcaggaaacaacaggtgcttgagaggatgtggagaaataggaacacttttacactgttggtgggagtgtaaactagttcaaccattgtagaagacagtgtggtgatttctcaaagatctagaactagaaataccatctgacctagcgatctcattactgggtatatatccaaaggattataaatcattctactataaagacacatgcacacgtatgttcattgcagcattattcacaatagcaaagacttggaaccaacccaaatgtctatcaatgatagaatggactaagaaaatgtggcacatatacactatggaatactatgcagccataaaaaaggatgagttcatgtcctttgcagggccatggatgaagctggaaaccatcattctgagcaaactatcacaaggacagcaaactaaacaccacatgttctcactcataggtgggaattgaacaatgagaatacttggacacagggtggggaacatcacacactggggcctgtcatgggatgggaggaggggggagggatagcattaggagatacacctaatgtaaatgacgagttaatgggtgcagcacaccagcatggtacatgtatacatatgtaacaaacttgcatgttgtgcacatgtaccgtagaacttaaagtataataaaaaataaaaaatatataaataaataaaaataaaataaaaagagtgaaaaaacaaaatcttccaccacttggctgcgctggagagtctctgagcctactctggtttccgaggctgccagattcacgagttgttatttgctcaactgaactctattaacttaatgtggctaagatttttcttttgactgttgtttactgaataatttaaagataaggctgggcaggatggctcacgcctgtaatcccagcactttgggaggccaaggccagcagatgacctgaggtcaggagttcaagacaagcctagccaacatggcaaaacccagtctatactaaaaaatacaaaaactagccgggtgtggtggcatgcgcctgtagccccagctactcaggaggctgaggcaggagaactgcttgaacccaggaggcggaggttgctataagccaagatcacgccactgaactccagcctgggtgacagagcgagactctcaaaaaataaaataaaaatttaaaaaagattaaaatctcctcaatactctttggaaggaaggaagcgaaggagggaggaaggaattttgctttataaatttatgccacccaaaacagaactttaaaaaacctatttaagttttataacacatttcaactagacatgaaatagttcctacacaacatccttgctctctttcctttccctaattcttctatttcattcttccttttttttatagcagtctgctccagctgatagggatggcctgaaccttttctacttatgtaaataacaaaagtatcatattctgagaaccttgtcatgttaattaccttgattttcaatttctgatctgaactagaaagttgaaaggttgtgcagtagttaggcatataggttttggagtcagaaagcctcgggttcaagctctggccatgccaacttactggttaatgtgaacatgggcacttctgaacctctcatctagaagacaataatagttctcactccagaagtttactgtgaagagtaaaaaggtaataaatgataaagtgcttaacaaggtatctgacacataataaacactaagtatgatgagtgaatttccatgagcttattatgaataattctgtaacaggcattattttttcgcaaccactggtattaatgatcataagtttcactagaaatcacctacatagtaaattaataaaacagaatcccttctaagttattagaatctttaagttgcaggtttagaaggtaacttaaatgtgatcacctagttcagttactcaatcagccgaatgcttgattatcctcagtgacatccctgttttcagcctctatctaagcatcctgatagaaaaatgctcattatttcctaaggccaccttccatgcaaaaatttcctccttaaatggtgtaaaatcctattgctctaaagcatctaccaaagactttaattttgtccaccaaaactataaagaacaaagccaaactctctcaatttctaccttcaaatatctgaaaaacacttgcagttcccttataaaattctctcagaatgaaatgtttacaatgtcttctacaatagcatgatttatatttccttattcttttgttggtccttttccaaacccattccactgcatctaaatgtctctcaaagtatatctacatgaaaatttttttaaattattttacttgacgttgaaagttgaccttagaaaactatacattcctctgcaaaattctgtatttttccaagaagtgataataacattcactataaaatataagataaagtctctttcaatctctctgtacatattgacttacatacatacacataacagataaatgaggctgcatagaatattggttaagagcacagactctggaattggactgcctgggttcaaatcccagctcaacccttgttagtatgtgtcttggggccagttactcaacctctcaatgactcagtattttcaatgtaactacctctgctaatgtaaggaataaatgagtaaatatatgttaaacatttgaaatagctgtacagtgagggctttagctttttacccatgtaaacaatagacagcctcagaaacctaaacttacatttattttcttagataaaattttcacttttccagctaaactataggttcagttaaatttaagtaaatgaatatttacattatgaacaacagagccaaacagtggactttcattttacagtacaaattagttcaacattgactgatcacctaaaagtctattacctgttaaatacaaaattgtataaaacagccctgccttcaaacagtccttggttaagctgggaatatgcatgtaatcaaataaccataatatatgtaatgcattcattatatggataaagtactttgggaacacagcaacacaaagttaaagagaagaggcaataattcacagtctgatattttattaaagaataacagcataccaaaatggctaaagaacaattgtttttaatagaattctgaataaacttgagattgaaaaattaattttacattttacaaccaaacttaaaaggctgcaaaagcagcctttccacatggagcacaggttaagttgcctggttgaccagcattgcctgatcttactggcaattagtcattaatatctgagtttcaaagctaatgagagccattcccatctgaatgatatgactgaccagttgttcccagtgccggtgctcactgaacaaagtttcactgctcagtcaagctgactgaccattgtcctgttgccatctgctgttcataaaactcaaagatgacaaaataagattgttcaagaaccaggccatgattttaaattatcctatccactacacaagcaactgcaaggagaattggtagaacacaatttttattccacacaaatatttctatagaacctaagtgccactggcctttggacataattaatgtggcaatcaagtgagaagaaatgtacctcaaagatcaagaacatgggtttaatatcagattaacctagatttttagtcccagctcagacactaattcaaaaataatctcttctactttgtagaagatattattctgggagctggcttctatgttttcagtgattatccaaaggttagttacttaacttgtctaaatacatgtttcctcaaaagtaaaatggaaatgattaacagcaactatccctttaggttatgaggttataaaaagaagcaagtatatttgtttgaccaatgcctgatattagaagaaatagctatttttgtttgttttttattgacacataacagttgtacatatttatggggcacatatgctatttggatacatgcatacagtgcatactgatcaaatcagggtaactgggacatctatcatctcaaacactgatcatttccttgtgttaggaacattgtagatcttctagctattttgaaatatacaataaattcttgttaactagagtcaccctactgtgttactggacactagaacttatttcttctaactgtattttgatacccattaaccaacctctcttcattctccactccccctactatttgctgactctggttaccactattctgctcactagctccataagatcatttttccagctctcacatatgaatgagaacatgtatttgtcttcctcggcctgactttccggccatgttactgcaaatgacaggatttcattcttttctatggctgaataatagtctaatatatatatatataaaacattgtcttcattcattcattcatccactgatgagcccttaggttgattccatatcttggctattatgaattgtgctgcaacacacatgggagcagagatatctcttccataagttgatttcttttttttagtatacacagccagcagtgggattgctgggtcgcatggcagttctatttttagttttctgggagtctccatactgcttcccataatagctgtactaatttatgttcccatcaacaatgtatgagcattcctctttctccgcattcttctcagcatagctattgttactgctgttagtataatctgctctgaaaactaaaacatgtaagcttaagacaccatttattattaagttcaaaacctttatcccaatctatatttatatacaaatataaactgccacccctccagctgagcacataaacattcctattctatctgtgataatagccaagaaaaagttaagtctctacctagcacattgttctaaactaaatagtcgcaatcttcttttaaaactattttcttggtttcttcatggaataataaggcaggagactgtggtgactgatactacatccattataccaggggtccccaacccccaggccatggaccagtatggtccctgccctgttaggaacctggccactcagcaggaggtgagcagcaggcaagggagcattactgcctgagctctgcctcctgtcagagcagcagcagtggcattcgattctcatagaagtgcaaacactattgtgaactgtgcatgcgagggatctagggtgcacgctccttatgagaatctaatgcctggtgatctgaggtagaacagtttcatctcgaaaccatttcccacccctccagtctgtggaaaaattgtcttccagtctgtggaaaaactgtcttctatgaaaccagtccctggtgccaaaaaggttgggaagtgctgctctatacgactatttttatttatgttctgtttggcttattggggtttggaatttcagaaactaaaaatcatagctccttttagaagtctctgaataaaacctgatgtatgtagatgatcgtgaaagagtactcagtctaacaaattgagtccctacagtagagctccatttcattgaacatttgacacgcaaagtagataaaatgcaaagattaagaactacaaataggtgtgacctttacctgaagaaattctaaataatccccagagccagggaggcctaattaagattaataaggttcagaaaaataagaagcacttgattctgaaaaccagcaggaaactatcgatccagagagaaagaatttagaggcagataagagcaatgatgtgaactttcccaacatataaaagaatgtgaatgtttagataagtcactaattttgattcttagttgggaatgatctcaagaaggtttcatagtatatttacagcattcattttgtaaagttatactaaaatgatttgagaaaggctactgccctagagacaactagggtaataaaaatcattagccactttaagaaatggattaaggtagaaatccaaacctttgaatataaaatggaatggaatttttatccgttcctggaattaggacattttaggcttactatgttaatgagataaggacaaaaatggtgccaaaatggaaacaatgattaagtccaaaaaagtctttcatacctgaaaatataaaaacaagcatattaagcatgagtattggacatgtcaattgtgcacagggagtactgagagaaaggaagaaacaactttaaaaacaaaagacagcagaaaagcattaaatgaaaatataaagtattaaaatctactcatgatattcctacatattactatgcaaattatgcattcacatagtgacatgaatgaaaatgaagataatggcttgattaaaagactcaagcaatttttgtcttggatttctgttatttttttaatatgcttgccataaagaaagagaacgcacaaacacacatacacacactctcatacatatataacacagatatagatgttatatctataacatatatcatatctctatatagaacatacatatctctttaatataatattaaatatattaaatatttacatttatatttatatttataaaataattttatttacaggtgatttacatagtaaccataccataaggagaatttaatacatgtagtatatatacagtatatatatacacatacatatacaaatgtatatgtgctatagagagaatataaacatgtatgtatataactgaaaagggggattctactattcaaaggagccccacagtaaatttctctgaaaaaagatgagatgtttggaaaaatactgatacatatttagatttataaaatagatctactacaaaatcataattagtttattaattgtaaagaatgcctactttcctctctctgttaacagttctatggttgatcttgatcgattttagctctctggtttcccaatcagaagtagagattaaaaaaaaaaagggttaaagaaagtgctatagtgcattagactaaacagccagcacagggaagtgacaggtgacagtctaccagtaaaggagaaaagagccactataataagcaggtaggatatatccaaaatccagggatgctgtaggaaatatccctatactttaattctctgaaagcattttggtattataacctacaccaaaagattatgctgtaatgacgctaagttgaaaaaacagaataaattttaaaaggtttattggaaaaggcagtgaactacatgtactctgtttttagaaagtttgcagcagtacagtgatttccagacagactctcgccctgtgaccctggctggagtgcagtggcgcaatctcggctcattgcaacctctgcccgctgggttcaagcaattctcctgcctcagcctcccaagtagctgggactacaggtgcgtgccaccaggcccggctaatttttgtatctttagtagagacggggtttcaccatgttggtcaggctggtctcaaactcctgacctcataatccgcctgcttcggcctcccaaagtgttgggattacaggcataagccactgcgcctggccccaaccactttcttatactttatttgtatgatttgatttaatccttccaacagcactaagaggtgggtactattactatcccattttacaaaaggttacagcttctatgatactgagcatcttttcctacagtcattgcccacttggcttttcttttcagaaactgttctttgccctgtttttactaggtcatttctagaggcacactggatgtaaagaaaatagccctttttctgttatatgtgttgcaaatatttttcacagaataccatttttatttttgtttatttttgtttataaatgtttataatacataataacattccttttttatgtagccaaatatctatactttctttatagcttctatattttctgccttgtttaaaaactttgcttcaacactaggttataacaatattctcttaaatttttttctattgttttactatttggtttttatatttaaagcatcatacattaagtatgtataattaagtagaatttacataaactgtcagcaccatttattcagtaaactatccttcccaagtgacttgaaatagcactcttgccatatattatctatttctgagcactattttgttttaagatctacatcatgaattggccaaccactggcaatgaagagatccagtcacatccactgatttatttattacttacaactgcttctgcgcttgcattggtttgaatgtgtcctctggagttcatgtgttggaaacttaattctcagtgcaatagtgtttggtgggactgttaagaggttattagacaaagccctcatgaatgaagctctcatgacagagccctcatgtcactacagaatgactttatcacgagtgggttcttgaaaaaggaggaatttggcccccttccttctctctcttgcacgtgctctcttttccttcatcatggcacagcaagaaggtccttgccagatgcaggcacctcaaccttagacatcctagcctccagaaccgtaagaaataaatctcatgctttgtaaactacccagtcagtggcattctgctacagcaacacaaaatggactaaaacactgctttaagggcagagttgaataattaagacagaccatatagcccacaaagttgaaaatatttactatctggctctttatagaaaaaaaattgctaaccccctgttccatatgtcaaatcccagccatagcttgtttacatggcactgcagtaaattttaatttcaggcaatagaaaatcttcttcactgtttttttcttggctatttggggcatgtattttttatatatagttttaaatatttttaggtagtttaaaaaaacctggccaggcgcggtggctcacgcctgtaatcccagcactttgggaggccgaggcgggcggatcacgaggtcaggagatcgagaccatcctggctaacacggtgaaaccccgtctctactaaaaatacaaaaaattagccgggcgtggtggtgggcgcctgtaatcccagctactcgggaggctgaggcaggagaatggcatgaacccaagaggcggagcttgcagtgagccgggatagcgccactgcagtccagcttgggcgaaagagtgagactccgtctcaaaaaaaaaaaaaaaaaaaaaaaaaaaaaacaacctaaaaacccctttggaattcaaattggggttgtattaaatggtgttatgtgctactgtttaagaatacctaagaacacagtatattttagtctgattttaacagccttcctaagattttattcttttctttatgtatccactgtctttctttcttgtaaaatttattctaaagtattttatagtttcaattataaataggatatctttgtcattttccatttctggctatttcttactaataatatgaggaaaacctatagattttataaacagtcattgtatttcaagcttcttctctcaattatttcattgattctaaattatttagtgaaagtcttctagatttcaaaagcataaactcatgttcactaaaatacaaataattttactttttctttttttttaataacaactcttcaattttctagtctaattatttagactctccagcataatgttgattactaatgataagaatggacatccctattttgttccactggttacttccatgacttcatctcttacaatctttgcttacccgactacaaccacaccaagcttattgctgttcctccaataggacaaacatattcctgcctcaggccttttgcacatgctatcatgctgccaactcttcttctcagataccaagtgtctgctcaaaaggcaccacctgagagcagtggtcagtgacaactatcatctaaccatctatcatagcccttcccttcactctgctatttctgtaagctgcttcatttttcttcataaaatttattgggatctgacttaaatatgtattagtatatctgtttactgattgcctcctgcaatagtgtctaagctccaagagggcaaaatattttctactctgtttactttgttctccatttctagaacacatggtcccagaaggtgctcactgagtatctgttaaatgaaaaaaacaatggaaggaatacacagttttaacgagaatgccttcaggagatgctagtttggcaggatgtcttctgttgtgtttcagtggccagtccttgctatagactactgggcatgttcaggcatacctgaggagttcttagtctcccaagcccagctctccctggaaggttggaagtccaggccctcacactggatctctccactgctatactttttaactcccatcgagcagagagaagaacaaacttctgaaaccttctgagagcccaggctggtgacaagttgggtcagtacacctcaagtctctacacacatgcctgcacatgtggctcgggtatggtttgagagtagtacaagcaccaaaggctggctatcacaaaaccccccaccccaagcccacctaaataaacataaaacccatctcaaagcactgtctgtgaaaaacaaaatgccatttcaagacaagttctctagctatctcccacttcaacacccatattcatcctcacagaaattctgaagctgctgttttaggcacctgagaggaagctcagaaaataaaggtgatttagattgccacctttcaagaatccccaggaactggtgctgtctctattagatgtaaagtacaattcaatttacaaaaattagatctgttactacacactcagggagatgtccccacacttatctgagtaccatctgcttaaatgtttttgaatattggaagcaaaaatgcaaagcaaggttcaaacagttcaaatagacttttagttcactggagttttttggttttatccatgcattttctaagaaatcccagaaatcacaaaaacaaaatttaaatgaaccatcatatattctcacctgaaaggaggaaaggagtttgcttatttctaacagcatgactgccttcttggtccatccaggcatttcccaaattttcctgtgggaagtcactttaaatttattcctctactattgaagattacatctggctgggggaaacgtcttacatactttatttattataagttatttggaagactgttgctgtatgctcagtgtgtaccccaatgtcattctgaaaagcctaatcaccacatatggtggttggaaaaagcaaccactctttcatcccacaatcataagaaaaaatatttctaaccccctacagtgggttctttctatggctcacaggaataaaaagcaagggaactaaaatgagtcacagaattactcttattagaaaacatctctaccattagtagattattataatttttaaaccctcacataagatgttagccccactgttacctcaagctcaacactttcagattcataaacacaggactccctttaaggaattttacggtcacatacctaagaacagattgtattattaacttcagattgcagctcaggttactcaagtatacagatttatagggcactcaaatatgagaactggagtgttaatgagctaactgaattttaaagacatagcatacttctgggacacaaaactggaattaaatttatgtaaactggaacccaaatacttttcagagtgagcataattcatccactagtttttttaaaacatagcaaaattaaattgaaaagtaaaaaagccctaaagagatgaaataatcccaatgcaattttaaaatttgggaaacgagataatttggagggtccacatgaatcaactggactccctaaagggagtttaagggtttaagtgactaaacaattcttcagtgtccccagaagttctctaatgctgtaatacaacttacagggacaacataaataactacattgctttcctccaaaagaaactgaaataacttctacaaattagacacgacttacatcttttatttaatatagacaatctgtaatacatgttaaatgcatgtagagtattttgtttaatttactgtagtaatccaagaagtaatcctatctatattaactaaagtatccagagaggtgttaacttactcaagaaactcttgtttaccctttatatttaatggttgcaaacttttttttaagactagagaaaaaaagaaagtctcagttttacaaagtggaaagaagataaagaagaggttgactcacttgcccaaggtcatccagcaaccagtagaaaagccagggccagagatccctctccatgcctcagagctcataaccagactacggagtccgacttatagcctggtggcctgcctacaaaaggcagcataatatgcttaatggtagcaaaagaagaaagagtgtatcgtgttatcctcaaaaacgctgaaggcaggcgcctgctgcagaaaaaaacctgacagctacagctggaaacctttctcacccattcactaaaacaagttaagtaatccaagaaaattcagcttcttattgtatatttctggtgagtgaatttagagacacaattggtaaaatcaagaaatgggaaatattcatgactgtcactcaacacttacttgtcaaagaacctaatctattgtccatccactcctaccattttcattttcaccagtgggccaaaaagggatgcaaagttatcctacttttgtagctctggcttgataagatggctagaggcttcagtccaacaagacaatgcatgctctctctcaagattaatagtcatggaagtttcaatgcgccgcccttccccagggatggaattgttacagaccacaatttactgagagattctggttttttaacatcctttccttgtaacacaagaatcttctcgttgaatgcccctatatggaatgtattactggactaaatatctctcaatagccctgtagttttaaaaattacctcatggaaaaacaaaataagactctacacaatgcagtgaaatgttaacatagtcactgaagaattacttgacataaaatagataccatcaaaactctcactgccataatttgctgaaatctatcagttatacagccttaaatttacagtaaggtcaacagacattccaaaggattaaggattaagagtaaactttaggattaagagtaaacaatattccatttacaaaaatgtcattggtaaatatctgagagcatctaataaagcacagttaacattatcctaggaaaggaaacaggtgaatggttggtaatggacaaaacaatgctaataacaatactgagtagggtttttaaaagtttctaacaatctagttgtattgcaccaaatgttaactctataaagaacaagtaaacactgcctcaaaggaaggagcagaatgaagaaaagtggggaaaaaaataagttaacaatgtggccaaacattgagaaaattaaagcactatcatgttgctgtgaagggaaaatgttgatggaatttttgtgaaattgaaagtttttgacaagggatgcaatctttcacagatacaaagtactctaacaagtttattcaggaattgttcaaaaaacaaaagcacctaagtgaccttctaagaaaagaatattcactcagacattattaccaacattatatactgtaatatgccctatattttatagttgatatttcataatagtgctgttaaaaattaacagccatttaaatttattcttgtaaggacaccaccctcccaacatactttttattcactttttgtctacaacatccctaacatatgtgcatctgcttaacatatccaatgccaagaaactatcttttcaggtattccaaaacagaagtatagaaagtatatatctccttctaggaaaacagctctactaggcattcagctactcaagccatatctaaaggaccattttaatgccattttaagttaaaggccatcagagataaagactatgtccaaaaaatggtagtcagaatagtggtgcatctgcaaaccaggagatttaaataacacctgaaaggaacggatggaatgcttaacctagatataagaggactatgaggaggctgtcttcgaatattcaaaggcaagttacatacaagagggaagaataagaatcaataggtggaagttagagaaaggcaaatttcagttcaacaatggaaaactgtaacaactagaaccgcacaacaaaagaactggttgcctcactttatgggaaaaatccagtgggtgctcagcaaccatctgtcagggtgtcaccttgaagtgcacagggagatgaactgcgtggcttccaaagtctgtgcacttttggctacttcaaaactttggctagatcaaaggatcttgggcaaaactgactcagttgtaaaactgtggcaatacagtagcattataattttatggtagtataaaagaggaagaaaatatctttttgggggtctggcacagtggctcactcctgtaatcccagcacttaacttgggaggctgaggtgggcagattgcttgagctcaggagttcaagaccagcctaggcaacatggcgaaagcccgtctctacaaaagaaaaatacaaaattagctgggtgtggtggtgtgcacctatagtaccagctactcagaaggctgaagtcgggggatcacttgagcctgggaggcagaggttgcagtgagctgagattgtgccattgtactgcggcctgtgcaacacagtgagaccttgttttaaaaaaaaaaggaaagaaaaaaatctctcttttatagataatgaaatgcttgtagacatatgtctgtggtaaacatcaaccaacctgattaaaatgcataaatatgagatgaaatatggttatttcatcagtttattatacatgatagaagaataaacctcatgggagccttctgggccattgggaaggaaggagcattagagtcccatgaacagcaccctaaacggagccactgagacctgaaagtggaaatatgagttaccctgtatctaactcccaaagaacagcttagccagtggaaaatctggctctaactcataattgtgaaacatttttcagctgccaaacattttcaatcacatggaaactgaggttgtcaggcttccttaaaattccattcttccaaataagcctctcatccctagagggactaattaaaaacaaaagtccacatttccaaccatctattcttctggtcagaaatactaatgagaaactagactcacagataaaaggctatttaacagattagtcaatccccctccaccctttggcaccaccagcccaagctcccctggaagagtttaaccacacggagagacatacgaaacatgtctcatatgattcacaacaagattaatagtttcaagccccagcacagggatttgcagtactgttactacatatcgtatctgtcacacctcaaaatctcaatctacagaaatggaggattaatcgcctccttttttcctgcccaccaatccagctaaagcaatgtctagaaaatatcacaaagagttaatgcaaaatagtatcagaattaatggtatactaaggcttctaccagaaaaattcataagtagttccatgattaaaataattaaagaaaaaatagtaagagccaagagaaaggggtcattttattattttccaaaactgacataagaaattagaaatttatagaaaaatgccctaacagaagatgacttaatgacattattattaatgtgaatgtaaccaaaggaaaattaatgattagaagcaaagcaccagtaccctgcagcttttagaaagaaaccaacaagaactcatttatctagcactgtagggggctgagttattcaacacatttgagagttcaccccactcataccttaagcaataatattgtatttcaaacacagcatatagaacagaaattaatctcttcacaatgatagatataatttggaacatcaattataatactatgctatcaaggtagatgtttaccttgtttctatattaaatgaatatgaatggctgtgatttttaaaactatattcttttgtacttttaacagatttttcttttcccatcagttatcttattttcaggctatcaatatatcatctttagatcttgccaacatccctaccttcatcaacataacttttccccatcttctaatgtgttgcttccaatctaatgtgggctaagaaactaagtaaaaagtttgttagaattctatgtaaagtaacagttgatgggatatgattaagggcctagtagccactcttatagactaaatgtatgtgcttttatacatgggtttatggtagcacctcaagctgcttagaagtcttctacctacttcacgattcttagccacatcctaaaaaactgagattccaagaaacccaatctcttagagagaaatagataaggatattaaaaattacaacactaagggatatctactctgaaacagatggatggaaaatgccacgggaacactaagaagacaactccaaggcagacttaaaagacaatgggaaaaaaagatcaggaacagctccatgaagaaaaaaacctgtaaactcagtgttgaaagacttatcagatcttagatccatccagggaaagaagggacagaggaaaaagcaatgagtctgtttttgcaatgagtctttctttagctgtcaatcaggaggggcatatttttcaaatgcaggtatctttctagtaatcgttgtttcactggatctttattggctttagagttgaagattcatagctgccaattaaatgacttgtttttaactgacttattgcaataacattaatcatgttgcccaacagtgatttgccagctttgtcatataaaattaggtaaacttttaagtgaactaactcagtaacagaaaatcaaatactggatgttctgacttataagtaggagctaaacaataggtacacacagacacaaagatggaaataatagacactggggactccgaaaggagggagcctgagagtggggaaagggttgaaaaattacccactgggtacaatgttcagtatttgggtaatgggtacatacactagaagcccaatccctaacagtacacaatgtacccaggtaacaaacacgcatgtgtaccccctgaatctaaaataaaataaaacgttttaaaaaataataataaaattaggaaacgccattggaaggatacactgttttaggaagcccaattctgaattgtggctattggaaaaagaaacatataagatactcggtatttggctgtaagtgccaaattcttttactcaaaaacactaattatgcagaaaattgctgatacatttctcagtaagccagaaatctatacaatgaagttgatactttcaattttctacttaataattcaataagttcaaattgggccttataaatatcacatttaatgtctgctatcatttttttcattcatcatcattcagtcgttctagacaaatgagaaaaaataagaatatagattagaaaagaagagatgaaaataggttttacttacagaatatgattacccacctagaaaatctcagaaaaccaataaagaaactattagaataaataagattttggtgaaatgacagtacacagactaagatacacaaattatgctgcctattaaaaaataagaaaatgcaatagagaaaactttccagttcaagatgacagactgagtatacgctttcatgtcccttttctctcaagacaggacatgaatacaaaaggaaaaacctgtaacagcaaaaacaacaaagtcgggaaggggtagtgattattagacaagagagactgaacaagtcttttgtgggtgtgtgatgaaaatataaacaaagagtagaggaagccaatgcggagataaatggaggtacagtggaagaaacagctaatctcccagagagaagatgagctcatgagcaggtagagaggtgagtataagaattgagaataaaaacaacagaattaaataacacagttgtatcaattgctccacttcccccaaataaaacccaaataaaaagcatgatgccagagataatcaggcaaatagccaggtgcggtggctcacacctgtaatcccagcactttgggaggccaaggcaggtagatcacaaggtgaggagttagagaccatcctgaccaacatggtgaaaccctgtctctactaaaaatacaaaaagtagccaggcatggtcgtgggcacctgtaatcccagctacttgggaggctgaggcaggagaattgcttgaacccaagaggtggagattgcagtgagtagagattttgccactgcactccagcctgagtgacaagagcaaaactccatctcaaaaaaaaaaaaaaaaagaaaaagaaaagaaaaagagctagtctctgataaaaagcattcaaattgcctacaaagacaggcttatcctatgagcactgatgtccaagaatcaagagtatcccatttgctaacctagtggcaaccccttctgcctaaggatgaacttctcattcatttaccctaaagcaatgtctcatccatgtgcacagatctatgcaactttttccatagtggaaaagcctagagaagaaagagacataaaggaaagctgcaccagtcaggtatccagaataatcaacaatcacaaatgaagaaaagaactatgaccaaaaaaaaaaaaaaaaaacactactaaagaaacagagataatctatagaacataacttgaaaaaaatgtatatacccgtaacaactgaaggaaaatacatgacaaaaaaaaaaaaaaaacaaatagcatgatacaaaaataactgagtacaagggggaaattttgattgatgagattgaaatattcaaaaaaaattaaatgatacaataaaggaaatatgcaaaacactgtaaaaacacaacaggacaaaaactaggagagaagaaatgagaaacagaatcaacctagcaggtctatcatacaactgctaagagttttttgaaaagaaaatatacaaaaaaaagaaagaatataattatccttaaatatgtaggccattcccagaggaaagtcatgagaggcaaaacaagatgagtcaaacagactcatatttagattcacacctgtaatatttcagtataaaatgtatcaaaaaatcacaaaagcttccagaaaaacaaacacacagagagatcatgtataaaagaataagaatcagggtggcatcaaaattttctaccccaatgtgacactagtatataatgaagcattatcttcaaagtcctaagtaaaagttactgtgaacctagaatactatacgcagccaaatatcaagcaaatgttgagtccaaataaaaacattttacctaacacaagtgtcagaaaacctcctgcacccaatatgccctttgctttaaaaagttaattatgaatgtactccaacaaaatgagaaagataaccatggaagagcaaatcgcaggacccaggaaatggtgcctttaagagtgaagtggagaaacatccctggtgattgttgtgcagcaggtatagagaagggtagtcaagactggaaaaggaaattagagaactaagagtaccctgggtgcggtggcttatgcctgtaattccagcactttgggaggccgaggtgtgtggatcacccgaagtcaggagtttgagaccagactgaccaacatggtgaaatcccgtctctactaaaaaatacaaaattagtggtgcatcgtggtgcatgcctgcaatcccagctacttgggagtctgaggcaggagaatagcttgaacccaggaggcagaggttgcagtgagctgagatcacaccatgcactccagcctgcgtgacaagagcaagaccctgtctccaaaaaaagaaaaaaaaaaaaagagtaaattccaaaaaagaatatgagtgatcttcaagatattttaaaggcttgtcttgatttttcaaagagaaaatgaaaggtaattaaaactaaaaaatccaaaaggatctaaaagaatgccacagcccaaatatgaaacattcagaatgtggcaagacattgaacagttaatgcactaatttaaaaggcaaaccatttgatctagatgccaagagaatctccttttagggtcccaaagaccaagcactggacctcaagtgaaaaataaaatcttacccccaacagtggtgaaaaatatttgttatcataataatattaacagtgtgtactgcttttcaacttttaaaatcaagggtttaattatttcatttcggttataaaacaatgtaatgttctcagtcttggcaatgtaaaaataatcagctgacagaaaatgggaattggaagggaggaaagaacagtggatataggagtagagggcattaacatcatcttcttacatagtgagaggtcaaaagattctaagcaaagttaatggagtaagatatagaaattaaaataaattacaataaagaggtaatcagtagaaaaaataaaatacaggtaatatcataactcaaaactgaggaaatatgagatgaagacagcagggaatgcaagcccactaaactgttatgtgtcatagtggtgaataaattatgttaaaatttataaatcaaaagttacagacattgaaacacacacatacgtgtgcgtgtatacacctatatgcatgtgtgtgcatgagtgcatgtgcgtgtggtaggcttctgattcctgaaaaatctaaaactttttaacatattctccacattttgatagttctcctaattatgaattccactttcccaaggtagaatataaaaaaactatgttttccagcctccattatagccaagataaagatgtgacccaggctccaccgacaaaacctaactcagcagtgaaacacatgagggaatggactgagcaaggaaaagtccattttcctggcacaagtatgaaatgtgtttccagtgagaagtggcggcaaccaacctagtcgtgttggcatatgtacaatctgccccagcacattgttttatgccacttaggaacaaagcaaaacgcaaagcagagccacagcgctgactcaagcctcagagaaatatagtaccatgcactatgtctcttggctcaggctggcccatctgctctgatttagaagtgtttattacatctttctccccaactttgatgcatttgccctgaactccataaatcaacaggctcaatccttcctgactctggttaaaaacccttcttcgctctagttaccaagctgttttaagtggtttgctacacgcactttttctttccataaaccctgttatttttagtgagcatgcatggagaatccaatttactctgcagaaatgtatatactccattatagcagaaatatctgtgcaatgtattgctagagatatggaagtggccttcagaagaataaaatacagaaatggttaaaagtggctgtgtttagggagtaggggcagggaaggaagatgatactttgcattataagctccattgtactgtgtgttttagtgctatgttaatggattgcttgaatttttaaatctcttctgccacattcaaaaaagaaaaaggaaagggaaatacagaaaaaactgtaatgatatgatcacaatgccaaatatagaatattaaaagataaacttgagatgtgaaatagttatgtaagaaactatataacttaattaaacacataaaagaaaatataaacacgtaaagaaacaaaccaagttcctagaagaaaaaaatgaaagcacagaaagtacgtgtttggaaagattgactattcatggctggtaagagtagccccagttttgttttgtttttttcttttttctttttgagatggaatttcactcttgctgcccaggctggagtacaatggcacagtctcggctcactgcaacctctgcctcccgggttcaagagtttctctgccccagcctcccgagtagctgggattataggtgccagccaccatgcccagcaatttttgtatttttagtagaggtggggtttcaccatgttggtcaggctggtctcaaactcctgacctcaagtgatccacccgcctcaggctcagtgctaggattacaggagtgagccaccatagctggccccagttttggaataaactagaaaagtaatatccttttgttaaacctttgtacatcacagtttcaataaatttttaagttaaattatcactgctcagcactgcaaagccagggtgttataatagaaaagataagaaattcttaacgattacagaataaatacaatttcgtaaaaaaagcaccagtttaatgggagagagttaaacgccatcaaagaaagaacagaaagtcaacacatttagatttcttgtattacacctaaaatgttaaactaagaacataatgtacctataatcttttttcattatgaaatgaggtaacggatttctttcttttcactgctattcgtaacagtgaaagcaaacagtttaaacaaaatgaaaacttgagtcaaactcaaataatttaagtgtataagaggacaccaaaaacacatcaggtgggatgtgaaatggaacaatataattatataatttaatcttgctttctccagttccatgtggaaggaaaaaaaatgctaaatgaaagaaaatatggtagtgtgatttacaaggtgtatacaggtcacatttgcccacctgtaaaacacatatctttatattataaaggtgggcaaatgtgaaagaaaattcctgacatatgataaaatatgttctaagctgacatttagaagcatttgatcagcaaaactctcaagtgacaatttttattatccagcaacctgggttgaagccagtgctgtcccccactggctgtaagctgctccaccttccccaaacctcagttttcttccctataaaataatgacactgatgtctaattagaagaactgtttgaatacaaaaggaaacatgcataacatatgtagttttaacttttttaatttaccatttaccaggaactaagtcctattatgtaagatacattggccgggcacggtggctcacgtctgtaatcccagcactttgggaggccgaggtaggcggatcacgaggtcaggagatcaagaccatcctggccaacatggtgaaaccctgtctgtactaaaatacaaaaaattagacgggcatggtggtgcacgcctgtagttccagctactcaggaggctgaggcaggagaatggcttgaaccccagaggcggagattgcagtgtggagatcgtgccactgcactccagactggtggcacggcgagactccgtctcaaaaaaacaaaaagtatatatatataacattaggtcagaacccatagttattattttaatcttctttaaaatgtacctaaaatgtaaatcataataaaaatagaccccatggcatgactgataatctcagtgtattttcttcctagaggatttaccagttctttaatttctttcactgaaaaaccaaatgccacgttatttttcagatggttcaacaaatatttactgagcatctactatattctaaactcttcaggactcttgcagatatagcaatgaacataatacacaaaattccctgccctcatgggacttaaaggaagtggccaagggctgtcaggcaggacaatcaatgtagtagccacatcccaatatagcatccaacagcctagaacttgttccaattagtacaacaactaactagttgtgatcatgacaaagaaaatcctacaggaagaatgacttggcaggagggaccaactttcaaattgtcagccatcctgttttggaacagagaaacaaactattctcatctgagaggagggcaccgccctacctgttttctctgcaaggtcaaaccatatccaaaataattccaaactcacacaaaatgagaccatttttccctatgcctaaggaaaagcatttaagtctaacagatctttgaatcatttcttagtttttttttatattagaggcttattataagcatgaaagaaatacacataatttttaacatatgacttaaaatgactttattatagtctaccctcagaaatataaactactctcaacaattaaacacaacatgtaacaagaataattttaaacccatatatccttgtacggtcaagaagacatataattttacctagcaatagtctttgattacatttttaactaaaggtttagagaaaaagaagagagaaaataattctaatttgttgttttcaattcacgagatcatcagttattctgatatataagctaaaccatttaggttacattataataatgccctagaataaaactactgtcatactatttattcagaattataacatatgtttaatttacaatggcagagccaggccccgctgtggaaacctagtggtattaaccatgaaacttggcctaagagaggcctctagtggttataggtagttactagctccctttccatcccaacccctcaactgtttgagaatgttcttgatttcattaactcactttctgtccccctctgctcccctcaaacagacacagcctcaaacaaaatagctagtattcagtcacggaattattcacttaagttcaagtaaccaatttttaaaatgtatattttaactggcaatacttaaatattagagattctctatagacaaattcttcaacttctccataaaaccagtttaaagctattcagtctaacaaatcagaattaaatttccaatttaatctatgggtcttcagaacatcttctgcaccattcacaaatacttggtgattaacacccaggtgcaaatgcaaagagtaaacaaacttggtccttcatccaattactaaggtttgactccttccccattccagctctacaatttccctttccttttttgctgaagacctctgctccctgatcgtctccattcccactaactctgccagccttagtgcctgtcctgctattatccagttcccccagtgaagtcttctatagcaagaatggaaataattggggtgaaaggatgggaggaaagaatgctaaatctaagaacactgagccctccctcccagctactgtcactccctcatgccacagctgaattacttctagctcctttcccctaaggccttatcctgctcctatgatagactacccctaaaatatcttgagactagagatgcccaatatgtacccaaagaacaactattcatttctatgagtatgtcttcatcttctactacataacctatgtttaaaagagaaaagaaagggaaagcaggaaaaagagctggagagaaaaatggagggaacagaaatgaagatattttctctatcattttctaattttgttaaaattaaaaaaaaaaaaacaaaaaaaaacacttcccaagaacttcaaaaaggtaggagattgctttgggcagagagtgagggggagggaagactgggagacagtatcttgtaacagggtgtatttgaacagagaagaaccctcatctaaagcagtgcacagtggctgtgatggctacgaaattcaggacagacccagttttaaaagctgctatacaaatagtaactcccatctattcagaaaatgtaattatccataaaactcatgtcttagaaattaagaataactgaagtttactgtacagtcaatttcactttgcctttcaaagtagataaattgttcctattctaataagaattcaaataaataatttctatatgccattatgaaacatagacaaccattaagaaaagtcaaatgcaaggtcaaagcaaaacttaaaacttttaaataaatatttcaatttagaataaactaatgtatttattcatagaatactgttctaaagttactttttaaacttttttatgagcaccaagaagaagcaccaaattgaaaacattttaatattacaacagttttcatagcattgttaaactttctcttgctaatatttattacttttcagcaagtatttattgagcaccaatcctatcacagtcattgttgcaggtactgggaatttttgaaccaaaagacaaaaatttctgctgtcacagaacttggaagaaagatcaacaatgtaaataacaagagtacgtaacattttagctcatgctaatcactacagagaagaggaaagaaggaaaaggtgaaaggaagtcttgataggattcagtatcacataagctggtcaaggaaggccttaatggtatttgagtagtgcctaacagaatgatgttgcaggaagtcagggaacccgaatggaggggccagctggagctgtggcacaggaacataaattgtgaagatttcatggacatttatcagttcccaaataatacttttataatttcttacacctgtctttactttaatctcttaatcctgttatcttcgtaaactgaggatatatgtcacctcaggaccactctgataattatgttaactgtataaattgattgtaaaacatgtgtgtttgaacaatatgaaatcagggcacctgaaaaggaacagaataacagtgatttttagggaacaagggaagacaaccataaggtctgaccacctgcggggtcgggcaaaaagagccacatttttcttcttgcagagagcctataaatggacatgcaagtaggagagatatcgctaaattcttttaaggaatattaatattaataccctgggaaaggaatgcattcctgggggaaggtctaaaacagccactctgggaatgtctgtcttatgcagttgagataaggactgagatacgccctggtctcctgcagtaccctcaggcttatcagggtggggaaaaactccgccctggtaaatttgtggtcagaccggttctctgctcttgaaccccgttttctgttgtttaagatgcttatcaagacaacaggtgcactgctgaacatagacccttatcagtagttctgcttttgccctttgccttgtgatctttgttggacccttgtcagtggttctgctttttccctttgtcctgttccctcagaagcatgtgctctttgttagacccttattagtagttctgctttttgccttttgaagcatgtgatctttgtatctactccctgttttacaccccctccccttttgaagcccttaataaataaaaaacttgctgatttgaggctcaggtgggcatcacagtcctactgatatgtgatgtcacccccggtggcccagctgtaaaagtcctctctttgtactctttctctttatttctcagccagccaacacttatggaaaatagaaagaatctatgttgaaatgttgggggcaggttcccctgatagaataacagagtgaatgaaggggcttgctggagaaagaacattttctaaagggtggatgggtggtaggaggtggaaagcgatgaaatcaggtaaattcttgtaggccatggtaaggaatttgacttctctctcaatgggaaatcactgaggctttttgaaactagaaggaacatgatatgactcagattaaaagtatcaactctgcctatggcaaggaaaggtcagaagcgcaagacagttgttaggtggctatggccaaaacccaggagagaaatgctagtagtctgcagcaggatcaagcagtggtcagattttggacatattatgtaggcaaagccagcaggatatgctttggaatttaatctgggaggcaggacacaccagaaaaagataaattaaaaagactgtacggtataaaggcaaattcttatacattttaataattagcataatttaatcttcaggtaaagtttaaacatgtcagaattataagtgtcagttttttcttctctatagatatgtgaaaatcacctagaccttgtaaatgattgtgcttcagttctttttttgcagtgttgttatgtagttgattctagattaaatgacaacgatgcttgagaatctgagtttctttcaaagccttttgtttattctcctgccaaaatcaagttcttatttttgaaggcaccttctctgaatttctccttatttaagaaaaatcttcctttcaagcttgacagcacctcaacagctattcggcctggccactgttttgttaacacggcagctcactttttaactcattttgaatgtggtctgcatgtcagcaggaaagtccattaaagcccataaccctaaccactgttcttactcctgggaaggcttgagagagaacagccctacttatgagctcctgtttcacatcagcatgacagctgagctgagttgcagggagaaactgaacgaagggtgtggacagagctgcatgataaaaggaaaatcttcctggctaaggacaccaaggctctctctccctgagtccataaaagggctcactacaatgtgaagtaaaggaaatgaattaaacagaagatagtgcttctttttatttcttttttaaaaattttgttcaagtttaacatatatacaaaaaaggtgcaccaaatgagtgttcggctcagttttcaaaaatttaacctgaataatcagcactcagaacaagaaactgttaccagcaactcatagcccttacacactcttccaattattaaccactctcatgataatcactagcctgacttctaacatcatcaattagttttgtctattttttacctctatataaaataaatcattcagtatgtacttacttgagtctggcttctttgtgtttatgagatgaatatacattattccattacatttttagttcatttattctcatcgctgaacaatattatacttattattgatccattctctagttgatgagtacttcggcagtttacagtgtggggctactagaagtaatgttcctatgaacgcttctggtttttttttttttttttttgtatatttcttcacatatacacatacaggattggaattgctaggttatagggttcaggtagatactgccaaacaattttccaaaatggttgtacaaatttatgttaccaacaatagtctatgagagttgaattgctccacattattgccaacacttagtgtaccttttcaagactgttacccatatttctattggatattggtcttttctttttgattgtgtaagtactttatatttccagatataagtttccttgagtttctccaaatctgtaattacctgtttactctcttattggcacccttttgatgaataaattttcttaaatgtaatgaagcacaatgttatcagcccttttttaacgttagtgttttattagtgcacaagatcacatgaacatattcacctatgctttctcccaagagcattattttttcctttcacaattagatctgcaactcagctgtaactgatgcttgtgtggtaagagttaatataattatttttcatagtacccaaatgaatcaacatcctctattgagaaaactacctcttcctctcaaaattgcaaagtcacctttgtcctgaatcagataaccagcaggtctgtttctagactcttattttattccattggtctatttgtgtatttttatacctatataatgttataattactacagcactaataacacatctcaacatttgataattaagtcctccagttttgttcttcttcaagattgctctggctcttcttggccttacaatccactaacatgctatatgcttcagtttatgggcctttaattttcctaaataatattctgtgattttctgtgtaaagttctgacatacgtatcacgaaatttttccctagacagtcctaatatcaagaggaaagctgtcaaaatttcactaggaattataatttttgctgcaggcattttgcaactaatcttcaccagagtaagataattatcttccatttctaggttgctatgaaattttaatcatgaataaatattgaattttaataaatacttctcttgcactaccaaggtagtcaggtttttcttcctgttttctgttaacatgaggaattgtatcaactgctttgtgaatatttatgaacattatgtgctctacatttattttaaaagctgtctataattttcctttcttatactgtcctaaatacgtttgatattaagattatgctggccttataaaaagaatttgaaagttttctctttgattccactctccgtaagggtttgcataaggactacattttagagaattcaccaataaagccatttaggcctggggttttctctgtatgagagttaataacattaaatttaattttttaatagatcatgactattcagattttctaattcctcttgtatcaatgttgaatgacttatatttttccagaaaattgtcaactttactcaaaacttatttgtaaaattattcataacatcctctttgtcttaccattgtctgtgggctcttcatcatacaaacaaatatttgtcctttgtttctaccctattttttccattagttaaaagtttatcaattacattaatctcttcaaagatctaaattttactttattaaatttctctacagattcaatttcagtaatttctgctcttaattacttcatttcttctactttctctaggtttgattttctttctggagatggaaattcagatcattaatttttttaattcttattcctatttcctaaatttatatatttacagctataaagtttcctctgagcatggcttaagctggttcttgaaacttttgatatattctatcttcattaacattcagtccagtttcttttctaatttttgagtttcttctgtaatccacggttatttagagtaaggtacttaatttgtaggaagtcgaggcttttctagttgtccttttctttcacttgatttctaactgaattccactattgttagagaacataatctcaatgactccaagcttttggaattttttaaggttatatttatgccccagcatttggccaattttgacaaatgctacatattctattgatagtttggtgcacaattaggacaactttacaaattgctttgttcagatcttctatacacttcacgagattttgtctgcttgattaagcaagatttaagagggatgtcttaaagtctcctgctgtaactgtgaatatgttcatacctcttctgagttctgtgttttctttgtttagtttatggctttatttattttcaaactatgttattaaggatgaaatagacttaggattatgatatatttaaggtggactggtccctttggcataatgaaatgctccttttcacttctagtagtcctttttgccttaatgctttatttgaaattagtgtatctacaccagctttctttttccatcctttcattttcaacattttgatgtccttatatttaaagtatgccttttttaagctacacatggtggtggtagttgtttttcatgaagtctgaggatcttagacttttactaggtttatttaatctttttgtatttaatttaattacttctatatttgggtttatatcatcttatcatctgttatctattgacccatccatttttcatacttatttattttggattaaccaaatatttttattaatttatagttctcttattaacttgctagatatgcattcattccctgttatttcagttgttacactggagattataacttgtatccttgattataacctaaccagaacattacacttcataataatcctagaacaacagaatattttaactccatgtaagaccccctagcttttgtgtttttattgtcttacatttcaattccatatatttaacttaaacttcactaaacttaaactttcacagaaaattatgactactgtttcggataatcaatactaagctatagtgtatgctctcctccatattttcttttagaatcattttccttctgccaaagggagctcccttgcagtaccttcttttagtgagagcctgctagtgataaattctctcaatatctgtttgcctaaactatttttatttcatcttaatttttaaaagatattttcactgaatatagaattgtaggctagcacagtcagcaatttaagatgttatgccattgtgcatacaggtgtggttttctttgaatataatcttaaaagttaacaaagcttgtgtaatgatgttctgaaatcttcatgagaatttttttttagatactgttagagattttctctctcttctttttctggaattcaaattgtatataagacagatcttttgaccagatcccaaatgtgttttatcctcttttctgacttgtgcttcaatttggacattttctattaactagccttccagttcattattgctatcatctactgagtccgatatgttataagcctattcattgagttcttattgtcagatatatatttctctgatggctccacaaagtttacttgatccatatacatacatgtacacacacacacacacacacacacacaaactttctagggtaattctccaccctcttacctcttttgttccttattttctctatgttcctaagcataacaatcaagatgttcttgtctgctaactccaatatctggatcagctgtgcttctgctttttattgtttctttcccctttgttattgatc

SEQ ID NO: 24187 - DNA, 1808 bp, Homo Sapiens
tggcacacacacacacacacacacactagttagtgccttggatgaggcggggcagtgtgtatatggacccctggacttgctaccttcagggttccatactcgtccctcccctcctggctctgctgtctggagtctggcaagcggggtgtgttcagaaggtcctaggcctgtgtcgcatgtccaggcactggcctgaccatccggctccctggcaccaagtcccaggcaggagcagctgttttccatcccttcccagacaagctctatttttatcacaatgacctttagagaggtctcccaggccagctcaaggtgtcccactatcccctctggagggaagaggcaggaaaattctccccgggtccctgtcatgctactttctccatcccagttcagactgtccaggacatcttatctgcagccataagagaattataaggcagtgatttcccttaggcccaggacttgggcctccagctcatctgttccttctgggcccattcatggcaggtactgggctctaagctgaactggggagagaagagatacagagctaccatgtgactttacctgattgccctcagtttggggttgcttattgggaaagagagagacaaagagttacttgttacgggaaatatgaaaagcatggccaggatgcatagaggagattctagcaggggacaggattggctcagatgacccctgagggctcttccagtcttgaaatgcattccatgatattaggaagtcgggggtgggtggtggtggtgggctagttgggcttgaatttaggggccgatgagcttgggtacgtgagcagggtgttaagttagggtctgcctgtatttctggtccccttggaaatgtccccttcttcagtgtcagacctcagtcccagtgtccatatcgtgcccagaaaagtagacattatcctgccccatcccttccccagtgcactctgacctagctagtgcctggtgcccagtgacctgggggagcctggctgcaggccctcactggttccctaaaccttggtggctgtgattcaggtccccaggggggactcagggaggaatatggctgagttctgtagtttccagagttggctggtagagccttctagaggttcagaatattagcttcaggatcagctgggggtatggagttggctgaggatcaaacgtatgtaggtgaaaggataccaggatgttgctaaaggtgagggacagtttgggtttgggacttaccggggtgatgttagatctggaacccccaagtgaggctggagggagttaaggtcagtatggaagatagggttgggacagggtgctttggaatgaaagagtgaccttagagggctccttgggcctcaggaatgctcctgctgctgtgaagatgagaaggtgctcttactcagttaatgatgagtgactatatttaccaaagcccctacctgctgctgggtcccttgtagcacaggagactggggctaagggcccctcccagggaagggacaccatcaggcctctggctgaggcagtagcatagaggatccatttctacctgcatttcccagaggactagcaggaggcagccttgagaaacctgcagttcccaagccagcgcctggctgttctctcattgtcactgccctctccccaacctctcctctaacccactagagattgcctgtgtcctgcctcttgcctcttgtagaatgcagctctggccctcaataaatgcttcctgcattcttctgccaaaaaaaaaaaaaaaaaaaaaaaaaaaaaaaaaaaaaaaaaaaa

SEQ ID NO: 24188 - DNA, 2480 bp, Homo Sapiens
tggggttttctctcaataataagtgaaccaatttcaaatgtgatcacaaagtttggaaagcttttattcacagaggttgggtagtgttgggaggggagtttaattactcagattggcctgttatttgatttcctcctttgggaaaagaattatgtagataccacatggagacagggaaacaattgtggtaaaactgtggatcctgttgctatttgcccagtgagaaaacagattctggtatttgatttggtttttctctttgtttccagaatggatgaaagtccatgaacctcctaagttataatttaaatttgtttggggcaaggtgattttatagtcgagacagagccctaggtccttcctgccccatcactcacttacgacatcacttccattgtgtgcatgtttgttatagaggaggttttaggctacaatatttgtttaacctccctaagaactttcaaggcatctgtcctgaaagctgttaatttatggtctagcagatttatattatatgcagataataattaactggggataaaagaatggcaaggggtgacacaaagtagcaaactgaatacttctccaatagcaaccccaagctacctcctcaccctgcatcttggagggaggcaggaaatttcttttgaaataaagtgctggagctgaattctgcattatttatcgttgctgctgaaaccacctataaaagacttgctggctaatgtgcattgtcatataatgtacactgtcacatctttacagtctcgtatgttatagaatacaaaataagttgatggttttgtttggtgtgagctttttgtttgtttagttttgccttcataggttatatgccaagatagtatttgataagtcaatgacatttggatgttttcttcaaagaattttatttgacccagatttcttataaagttatcttacattaaggatgtcattttcatcagaccttctttctacatattattcatgaagcataatgttgcatttctccaaattttatgcctgaaagggtagtgttgcttcctaaggtatcatgttgtctttgtgctttgtccatctcttccgtggcgaagctttatatctgttcctaaaacagttaatcctgtgaaataaatattgaacataatccagaagaatctctctatttcccttggggaatgccatatttaattcaccagcagtaatcctttaataactggcagagcactttattcttctggtgagctccctgaatatttatttttctgattataaattttctatattagtagcattttttaattattacttcttcactatagagcatttacttttagtctctagatgtatattttggaatgctgtacttggcataacatagattaaaatcataatgcatgactaaaaactccttggatttatttcccattttaaaatttttagcggtaagttcagatttataatctttctctagacttccatggtctgaatgttgcctgctgaagtagcaacctaaaaagtatcccctgcttatgcttctccagttggccctccatgtccataggcttcgcatctgtgattcagcccactgtgggtcaaaaatatttggggaaaaaatggatggttgcgcctttgctgaacatgtacaaacttgtttttgtcattaaacaatatagtataacaactatttacaaagcatttacattgtattagctattataggtaatctagagatgatttaaagtgtatggtaggatgtgcacaggttatatgcaaatactacaccattttctataagggacttgaacatcatggactttagtatcctagggggttcttggaacccatcacccataggggcaccataggacaactatagtaccgtgtttatttcctattaattcaggttccgtttagagtctaaaactaaaacctaatcatttagtcacagtgtaaaaacaaatggaaataacagctcaaatcttcaaaatattaccatagcattatgtttaaaataatctacaacaaaaatgtaccattttcaagcagtactacattaggagcccttttatagaaaataatttcttctttacccccgttccagtgtgaatctagtattctgttaacatttgtgtggcatttggagtttgtcatccccattgaagggagagccttctcagacatgaagcaagggaaacatactgaatagttttacacaaatttgatctggcttccatttgtccccctcatttcccaaatgtttaaatgtattggatttgggttctcaatgtatatgttgccttatctgttaatgtctatcttctgtctctttaattttgtatatctgctgttttgcttttggatacattttctaattagaagtcacatgataaatataatcagtatagtaataataccataatgtgcacatactcaataaataaatgactgcattgttgcaaaaaaaaaaaaaaaaaaaa

SEQ ID NO: 24189 - DNA, 2315 bp, Homo Sapiens
tttttttttttttttttttagcaagagcaatacaaaggggttatataaatttatttttcatgtaacaattgattcagttagaaaaatttcccattttcaatgttaattccatctctcgtttttggaaaaaaatcactaaaaggacaaaaacccacagaaaaatacaatctgtatctgttctatatttacagataaccagtcattattaaggcgcagattaaaagttaacatttattcaaatcatcaaaatattttgtgcatcatataacaacaactctgtatactgtagtgtcatattcccttcattgcatcaagagaaagtgagagaaagaatttccagtgtttttatttattcttagccaccctacttaatctaatttaagtgggacagttttccctttggcatatcaaagcactgttcataaatcaacttaatactgcatattcattacttcttcctcctgttgcaaatgcatggtagacagctgggaaaagagctccaagattattatctgggaaggtcttattaaaagcataacaacatttagagtactgagttgttgaacaggacataaatctggtattgttaacctgtactacatgtttagcatgatgcattaatacaatcaaataagatggatgatcatcacatgatccacatgaccatttgtacacatatgcacaggatgagtaaagggagtgattcagttcaacatccttaagcagataaggcttagtttagcttaaaaagggcagtccctcggtgccagttataattgataattttatgacaggcccattatctatgccttcaaggtaaccaataccattttttaaagtgagaatgtttctgtgtgcaaaatgcctcttcaattcttgttcttactgtaatggtcagactcagccatggaaaagtgtcaggcaagtatttcttatcccatatttgtataaaagtacccaattcttgtatatgcttatctaatgccttctgctgagagcacgtgagagtggtttatgtccatgtagaaaatcttgactactgaacataaataactctttacagtacaggtaacttgacaacatttcctatgggaaagttttctaacaaattaatatacttggaaataatattgctttgaagaaagaaaggcactttagtgtttcttcatggattaaaaacacttcataaatctataagatctctgaaaagacccaggaaacaatgttgcctgatttcttggactttcacagtataagattgtaataatgactctagccacttaaaaagatatattttttttttccttcagaacttagctgtctttatgaactgccaccctggaggctcaaataagcctgttcattctcaacaaacataagtctacttcaagcagacagatacggtttcaggaaagtcctgtggccatacggaacatagctaacgtgtacatgataaggattgtaatctatttctccttataatggcaacagtgctgtcttgtcagatgattatttgtctttttaaataaagtgacaatctcgggctccagttattgaatgtcgtccattctctaccataaatctctagtaaatatcaatttcatcaattatgtactgtatgcttataatatctaaaaataaaagtttgatataaataaatgtcctttagtggcaatatactaaaaaacagccctttgcctccagacaaccattaaaatcattttagcattacaggcagcagctaagtatgacgactgcaaagggttaatactgcaaagtccatttggtctttctttgcacctattactgtgaactaggtccattgctaggtgtttctaggatgctaacatacatgaaacagaattggtccagaagcaagtggactcacttacatttcccaaaatcacagaatattctgcacagaaactaagatccagtaccatttcaaataaaagtttgatgcagtcagaaaaatgtgactaactcttatctgtaccaacatattaggtgacacaaaaatgagagagatggagacagcgagaacttccataggacaggaaattagaacgtgtaaagtgctgaaagaccacaataattattttaaagcagtaccagaaaattccactttgattattttttaaaaatccccaaatacccaaacaaaacaagcaaacaaaataacttctaagtcttctggcatcccagatgtcaattcatccttcattttaagtaaaaaaaaaaaaaaaaaaaaaaaacttatcgataccgtcgacctcgataatgatgatgatgatgatgatgatgatgatgtcgac

SEQ ID NO: 24190 - DNA, 1785 bp, Homo Sapiens
gggggaattatgttgatgactattctctctattctctctctctctctttttttttttttggagatagagtcttgctctgtcacccaggctggatcttggctcgctgcagcctctgcctcctgggttcaagcgattctcctgccttggcctctcgagtggctgggattgcaggcacctgccaccgcgcccggctagtttttgtatttttggcagagatggggtttcgccgtgttggccaggatggtctcgatctcttgacctcatggtctgcctgccttggcctcccaaagtgccggaattacaggcatgagccaccacacctggccactgttctcaaattgtattatggagtttttttttttttacaaaatatggatatattttaatttactcaaatgggaactactgataagcagttcttatttttccagcataagcaaggctacaataaatatctttgaatatatgtactgatgctttttgttttttgttgaagctatatcccaataagtgataagtacggtctaagagagaacatgttttttacaattttgattgatatcatattgggccacgcatggtggctcaggcctggcatcccggcactttgggaggttgaggtgggaggatagcttgagctcaggagttcaagaccagcttgagcaacctggtgagacctcatctctactaaaaaaacaaaacaaacaaacacaaaattagctaggtgtggtggcatgtgccagtagtcccagctagttgggaggctgaggtggaaagattgcttgatcctgggaggttgaggctacagtgagctgtgatggtatcactgcactctatcctggacaacacagcaagaacctgcctcaaacaaatgtatttggttgatattgtatcagatttcttctgaaaaacgttttaatggtttagactttcaccaagtgcaagaaactggcattttctttgtaactggcctggaatgttaccactcttttaaacttttgtcaagatgatcgtgagaaatagtatctaattacttcaatttgcatttccctgactcctaatgaagttcagcatctcttcaaatctttattgggcatttggattttctcttcagtgaattgcttcatcatattctccatttattctaaagttgtgttcctatttgtcgctttcaaatctagtttggtggaatccttgcatgttagaaaccttaaccctcgtaatatgtgttgtagatatttttccctcgcctatgagttgtctttcatccttgagcatgagttttagagtcagaagaacaacagtaggatttgaatcatgttacgttattttctagttgtcgtattttttatttcttcagcctcttagaatcttagtttcctttaaaattgagataatagtatctactttattcaaaaaaattttttggctggacgcggtggctcacgcttgtgatcccaccattttgggaggccaaggcaggcggatcacctgaggtcaggagtttgagaccagcttggccaacgtggtgaaaacccatctctactaaaaatacaaaaattagccaggtacagcggggcatgcctgtagtcccaggtactcgggaggctgaggcaggagaatcacttgaacccgggaggcagagatgaggtagtgagctgagatcgcaccactgcactccggcctgagtggtagggcgagactctgtctcaaaaaaaaaattgttttttcatttatttgtttgttgagactccacttcaaaaaataaaaaaaaaaaaaaaaaaa

SEQ ID NO: 24191 - DNA, 1155 bp, Homo Sapiens
gggataccgtggatgttccacgccagccttacatccgtccccattgcctgcccatgtccagtggccctgcgcaacaaaagtaagggcttgtcttaccacaccctccccagcatctagctcaaggtagatgactgactgggaaattccggttggataaaatggcttttccacattgcaactttgcatctctattaggaaaatttagattgaacctttcctctacttgatgcttagttagagaacagttttcacaactttagagggtctctctcagagtatgttatactgtaaccttgaagtttgagatgaaacaaggtgtcagaggttttgaatctttcaaaggaattgccttttacagatttttttttttattccctaagaagggaaaaagagagggaagaactacactaatgttagagataaggtatgttttggctcaaaatgtgtcatgaacctaaaggtaacttgatgggcagaaatgtctcagccatgtgaaccaagaagtgggaccacagtgcaaggctgtgggtggcagcactagatacggtggtggcaggagtgtgacatgtaggcactccatgggggacagctggacggtgtctatcaaaagtgcaaatgcataagctctttgaactagcaatgctactcctaagaattgtacctgtgtacaaggtacttgtgtacaggagtttttgttgaaacattgtaatagcaaaaagttggagagtgccaccaatacaggggaatggttaaatacattatggccagcttaaacaatggaatagtttgtagaaatttaaaacaatggatcctgtgtgtgtgtactaccatagaatgggccccaagatgcatgattaagtgaggaaaaaagcccatggtatcctaatgtttggaatggagaaagtgtgtagatgtatgtgtgtgcatatgttttcacacagacgtatacacgtgtatatcatatgtccacctgcatatgcctaggatgtctctgggaggatatctagcagcccggcagcctgaattgcctctgggaagaggggtgggaatgacttttcaatgtacaccttttgtaccttttgaattttgtaccatgtacatgtattatctattaaaaaatagttcttaatttttagaaaaaaaaaaaaaaaaaaa

SEQ ID NO: 24192 - DNA, 1309 bp, Homo Sapiens
tagagacagggtttcgccatgttgcctaggctggtctccaacctggtctcctgggctcaagcgatccgcccgcctcggcctcccacagtgctgggattccaggcgtgagctaccgcgcccggcctatttacttttcttactaagctggggatcaccgtcgccctcggcttggcaggaaggcgggggtgcaagaagaaaagaggtacagaacacccagaggtgccctcgattccgtcttgcacttgcccttctcccaccgtccagcaataaagcgagagaaacaagtgcaggaaactggccggcagtcatgggagaagccaaaaagacaggagttcagtggcatgaccagggctcactgcaaccttgatctgggctcaagtgatcctcctacctcagcttcctgagtagctaggaccacaggtgtgcaccaaccaaacccgactaatttttgtagagatgagatcccactatgttacccaggctggtcttgaactcctgggctcaggtgatcatcctgccttggcttcccaaagtactgggattataggcttgagccaccgtgcctggcctgtgatcagaattctcatttttttagtcactaaaaatgctgggggggcactccattctccattatgtgattagttcacattgcatgcttgtatcaaaacatcatatataccccacaaatatatacaaaaaactttaaaattttaagtattaattgctcaggaaaaaattaaaatgctggggtgctgaaatctcaagggccccattacaaaactccttaggaacctcgccctctctctgctgtaaggactggttccagaatgagagaatttaaaagacattccccgcccaaaatgttcataatgtcaccccggaaacctgcgaatatgttatattacatgaccagggagaagtaaggttgcagatggcagtaaggttgctaatgggctgaccttaagataaggagatgatcctggattatctgggtggacccaatgtaatcacaagggtccttaactgtggaatagtgaggtggctgagtcagaggcagagtgatgcaatgactgaaagacttaaccagccatcaccggctttgaatacggaagacggtcatgagccagggaatgcaggcaggctctgggagctgaaaaaagcaagaaaatggattctcccctggagcctccagaagggatgcggtcctgccaaccccttgtcagtgagccatttcagatttctgacttccaggactgtaagaaaataaacttgtcttgttttcagccacgaaaaaaaaaaaaaaaaaaaa

SEQ ID NO: 24193 - DNA, 1790 bp, Homo Sapiens
ttttttttttcaaagaacaatttgtaaccaaaactttaatcccaaggattctcacaaaacatattacaaatgacagcataaaaaaaaaatcttgcacagtaactcaaagttcggctctacaatgtacccttaaactggcaggacatttttgaaatcacaaatttgcacataaagaatgtcacgaacagccatgtatccatatacagcaatcaaataaggaacttatgacctaaagcaaaggtaaactttcttgaaacttaacattctataccaactaggcaacctctgcccaggatgagagttggatttttcaaaaacctctaatttaatagtgcagcatttcgttttccctgatggcctgtgtttcacagcagtttttaaagactgcttgttcaactatagctgcagcctatatcccagctatggaaaaaaaaagtaaatcttagttcaatttttgccagttgtttctgtatttaaatttaaaaaaaaacacacttccgctgggcaggtttagaggtttattatcagtctgtgcataactaaaagttcaaagcaaattcaattttgcttaagggaacattgtaaagtaacaattcttggtattacatgcctcgtatgatccatttcaaaccatagagaattacacctttgtgtcactgtttcaagagacaaacagatttgaacagctaaaacatcttaaaaaatgcaccaagcttatgaagtctcaaacaaaacttgaattttctgtacatactcctgtcaaatgaagtaatttcctgtactccacttctcttgcaaactgtcttctatttcctttcatttgacctagatcgactaaaaaaaaaaaaaaaaagaaaacaaaacattacatctgtaacttggtgacactttagtgacatatcgaaatagaactttaaggtaaaaaatttatggcttagaagacaggccttagcatactatgtatgcaaagtcttaaatacaagttatcaaagatcttacctacgagacctagagaaggatcgggacggcttgtgatttctctcccgagacagcgatctctctcttctcctatctctagaaagggacctaaacaagcaaaaaaacattaggaccaatgaggtatgataaaattatacataaatattttcttgatctggcatggtgactcatgccaataattcctatattttgggaggcagaggcaggaggctcacttgaagccaagagtttgagaacagattggacaacaaagtgagatcccatctccacaaaaaataaattagccaggtacggcagtacttgcctgtagtccaagctactcaggaggctgaagagggaggatcactccaaggccaggagttaaaggctacagtgagctataatcacaccactgcactccagcctgggtgacagatcctttttttaaaaaattaaatactttctaaaaagcctttgaaaactcaaagaaagctgactcatccttacaacttgattcactattaaagccaaggtttattcccattaactaagccacctggaaaagtttaggaatagcagaaacactgccatttctaagaacgtagccaaaaaaggtagtcatttacctgctccggctgcgagagaagcttctccttcttggagatctagaagcagaaacaggaaaattaggctcatcatcaattagtatttatggcgtgaggcatttcccaacttttcaatctcactgttgggcccagtgaatgtgccgaagaactggcacccatcgtccaaaaaaaaaaaaaaaaaaaaaa

SEQ ID NO: 24194 - DNA, 2071 bp, Homo Sapiens
actatcgttcattgaagttgttgatacaaatgttgaacaggagaaaaaccagtagcttgccaacttggcacctcattctctagcttgacagtaatctcttatctagtagtttttagatatggttatttaatcaaatatcactagcttctaattttgttataattcattcatgtatacagacaatgaagaatcatctttcttcattcaacacatttattgggaaccaatcattgtccaaggcaatatgctaggcattgtgtaatagaaagcgattaagcttttacccctgtcctctttggcctgcaaagagcaggtaagattcatgcacagacaaatgtagtaccaggtaaatagtgaggccaaacacaagaggcaggtcaaagggctttggattcagaggatggagaagctctttctaggctggtgaaatatttgcagaatgagtaggctcataagtggaggtgaggtacaggctaagctgctgtaagaaagagtccaaaatgcaaaggatttaccacaatgcagttaatttttctcacaacggtcgaggtaggcaggtggtccaagtccagttaatcagccctcctcaacacaaggcttccccttgtaagctcaggatgaccgctccagttctcatcatctcccaggcagaaaaacgggagaaagagaactagacgtaccacccagtcattttaaggacatagccaggccaggtgcagtgactcacatctgtaatccaagcactttgggaggtcggggctggaggatagcttgaagccaggagtttgagaccagcttggataagaaagcaagaccttgtctctacaaaaaatttaaaaattaaccatgtgtggtggtgtgcacctatagtcccagctactcaggaggctgaggtggaaggatcacttgagcacaggagttggaggatacagtgagccatgatcacaccacctcactccagcctgggcaacatagtgagaccccatctctttaaaaaacaaaacaaaaaaacatcaccaggaagttgcttacatgtcttctattcctataacatcggcctgagcttagtcacatggccacacccagcagaaagaactctaggaaatatggtcttatgctaggtaaccccaaacccagctaaaactgttgcttttgaagaagggtgaaacagacaatgtggaggagaattaccagtctgccacaaagagaaagaattctatgtgaggaaaacgctctagaagagggagctgattaattagttatatctcagccgagaggatgttatgagaaacacagatttgggtttaatagaaaaacttagaacccttcaagaaggaatgggcggacttgagagtgtcctccgcttctgaaaatgatcaagaaaaatggtaagaatgtacacctcaagggtggatggtaaaggtcagcctttaagcctcaatggcggtgtggttgtaggtggggtgggggtggaggccccgaagacaggcagactaccacagtagccccgatggaagcagtgagaatgaactggaaggagcggctgtgggagcgacaacgtgatgagaataaacccggcttggctctgccctgtgcacacacaggtgagctgtgtgctcccggatgtgtcagctggtatatgcgtctgtcagaaggcagctggggagcactgttagctcagagactaagaggcagacccaggaagcccttctttgcattggtcagggtttgctgcattttcccaagcccaggaaatggaacccagttcttcttctttctgtgtaaaataataagcatcacaataggctgtgctcatgagaacgcattttgtttccacagaaatgttttttctcactctgtcctgattttgatttctgttaaactcagtaaacacattaccaaattttaaaataaggtgacttgttttccccaactcacagttcaccaaaggtatttcatctgtttgttctgaaaatgcagctgctgtctagatttatgtgtgctctgacaagaaatgttttgtgtaacaataaaaatcatttcctttgatgaaaaaaaaaaaaaaaaaaaa

SEQ ID NO: 24195 - DNA, 3011 bp, Homo Sapiens
taacatgattcacattatactttctcttagttaataatacagtaggccttttgtttattaatggaagagtactccccacacctaagaccagattcttatatctccctggttacagtgcaatttggagatttttttttttcctggatggtaagatttgaaatatttacattaacataggcaaaaaaaaaaaaaatacaagatgctgctttattatgtctgtcaccatgaaaacttagctgcatcttttgaaatatcaaatatgaattttctctaaaatattctgaaataggttaaatcttatataaatattactttgtgcaatattgttgtgtagttaaatgcatattagcaaagtatagaggtcactgtgtaaaccgatagaaaagtaaccatcagcaaatactgcagtgattagttagaatctgtattattccttatatatatgtatatgtatgtattctctgttacaaaggatgaagacaaatagggatacatttcaatgtaaaccatttatgaattggaagtgatgttggctttagttatctttgtaaataaggtaattagaatggtatgaaaggtaatgtgattattgcaggggtgtttttaaatcttgggtataaattctagggtaaattccagtttatccagactagtttttaacgggacctgcctttgagggtgttttttgttattttgttggggaggggtttaatcacaaagtgtgtgggtttgggttatttcttgtttttatttttctgtccagaagagctttaccaggctgtgcaaagtaaaattcttctcaggcaacatttgcttttaaaaataatcatgaagagaaggctgttaaagcaaaaattttttttttttaattttttcttgtcttccaagatccgatttccccatctcccacttgccatccagcagatgccatctgtcatccaagctggtcattgctaataaacaaggagtctgtctcctgacggccagcactgtgtattatcactcaggaaccagcggatctgcaaagacctacaatcaaaagcaaatccccattttcctttataaaacattctaccctcacctccaatataaacacattaaaagagtacaataaaaatgtttaaaatcatgtactaataaattcattgtatgttagaattgcaatagaatgaagagaaacatttagctagtaacgtgatctgaaaactgaatgtcctatgtgagtattagattttaatagcatgctttaaagactgatgagtataaaagcagaagttttgcgttttttactgctttcaaagctgtatcctagtttagtgatacaaatgattgcaatttttctaaatcattaaattatttggtttggtggagtgaggcatggagcaatctggcgtcttctgatttgttaaagtagtgatggcagtgaagttgtaactgaaatttaagctgatcttcctttttggaatattatccgttgtgccagctcttgagattacttgcacaatgtggctataagttttaatattttgtggagcagagggatggtttttaaatgtgcttatggaaaggacccaataaatgaatattcctaacttagtaaagtagaataatttcatggtattcattaaaaagcataaaagtcttcctcttgccccagaagtaattctctataccaagatatgctaggagtaggatgatgattcaaagtggtaacccaaattcataaagcaataataataaaaacctatatagtatgttctctcctccaaagttttaactctaaaaattggttcctaggtttaattgtacctttaatttgcttattcagtacttagaatttgtttaactggtacttttattattttttagtgaaagacttttgaaaagtgccctttccccttaagagacagttggaataccagttgactaatattacaagctcttgtagggggaaaaaggagcttattaaagttgtttactaaactttaggaaaagatgtcttgcatcagtcttactaggcataaaagtcacacttaatgactggaaaaaacttgcttattgcctttccctatataaatattaattgtctagaatgaaagctaatataggaacaagactcccaaatccatgaaaacgcttagtgaatatattcttaatcattaataaattagcccattatattttcatctgtatttgccataaaaaatttatttgcatttatgcctttaggataattttgtatctttctaatctgttttatcattgctacaggtttttaaaaaagaacctttcactagctagcacatgccagaggttcacatctgttttgtttttcaaacaggtcgtagctgtatttattggccatgcaagtagaggaaatgcacagtacaaatgtttttctttagcacgtaagggacctatccttgtcttgaaagtttgttgctttaaaagcaagtatctctccataaatattatggccttccattttcttcatacattttttaggatccacttgtgcatgtagttgagaccactgtctcttaaaatatagcacttttcaattctctctaaagaaatacttatgtactactatcacatgttgtaaattttcatgtaatagtgttttctgtgagtaaactccattttgattggcagctaagactttttttcctgtggcttttatttatctaagaggtctttgcatatagatgaaatgtatatttgcctggcggactatttgcgttgtgtggccttagtttgtttattgacattaacgagtgttttaaaaaggtttttaatgaatagtcttaaatctaaatttgtgtgaataatccttttaacacagtgcttttttgtagctgtctaagtgtgttaaattgttaagctatttctttgtaaaataggacaatggaatgcatagttttttttttcctgtaaagtatttttttaataagaaaagtctgatttgtcctttaaaaaaaaaaaaaagaaaaaaaaaaaaaaaaaaaaaa

SEQ ID NO: 24196 - DNA, 3352 bp, Homo Sapiens
aggggaacaaccaagtgccgtggaggcagatgatcatggtctgcctcaactgtctggtttcctgtaaaataaacacattgttttatatttttagggaacaaaaagtgctgctatagggttcaaagttttccttctgaacacttttccgaaacaaattaccccaaagacacattttgaatatcctggtcacatctttggatctgtaaaatataccttttagtatggcacctgttaaaatgcaaagcaaatttctttggggcagaaaaacaatctgacagtagcagtgtagaatttgttcattcaaatacatctgtgtaaatgcaaaaagtcataaaattcacctccgagctgcttgcttttgaacctgcagcaactagtcttagccggcccggtttgaacatcgttctttcagaagtgctgaaaatgctgcaaagttggataagtggaaatgtggctgcccctctcctcactacttcctctctgatcgttctgaagcttgcattgggaatggctgctttctctaaccattttcagcttgagtgggtattgctgaagaaatccaacatcattccagcagttgaaaaaggaagccttcgggagaaagtgcttgtcaaaattttgttctttgtgcttgtgtatgagtaagttgccatgaataagttattattttaacccataattggcgactgtttatatgaattctttctttggcaccaaataggtttcatcttcttaggcacaattagaaaaaatccacatagatggatattttacatttagttattgctttatccaaatacatgaatctaaagctgaatcaacccttacttccagttgtgcttattaagaagatcaatttccaagtagtaaagttttcagggaaactgactgtgctgctatttgttttgacaaatttgggggtaagtcaatgacaaccaaaccaatctcggtggaaactcctatcctatcatgttgtgtgcccaagatgagtgagctggcactgtgccctgaagctttcaccactgtaatgaaatatatgccaggggagactttgggcttttctcatgactgtgtgggtcgaaggtagctcaagtgtgtgtgtgtgtgtgtgtgtgtgtgtgtgtgtgtgtgtgtatgtgtgtaaagtgctaagaactgtgcattgacatccaaacatttcttgtacaaaatttccctagcaaagcaaacctgctttgacttaatttatttgttaaatgttgcactttgtttatgtatgttttgtttttggtggggaataaggagagagaggacgacaaattctattgaagtatttattttgtgaagatggcaattttgcatttgtttaaatttttttcattctttaattttgttatcagtgccagcccaatatacctgctctaccattatttgcggtctgataaaagggtccttgtggggcaggttttgcaaggcttatcaggtaataacatatgccacataaccttgttgatatgtttgcttctgatttgggaagctaaacattggtgtttgagaggattgccaattattaattgtcattaccactactctccattactttttgtttggaaattgaacaaaggtcagtaatggtttttggctcttgttaatatccatcataaaatagattgttttagattctttccagggtgatttttccctgggtaccccgtttctacttctaaagaattgcttggcactttcatgtttcaaagggaaacattcgcttgtagttccattttacttgatctctacaagggactgacaacatttgctttacttttattcacagagaaagttggctttgatgtctcttaaagataattctgctagttgctgatcagccagtcagttcacctagcttcaatctttataggacttctaatctaattttcctatagtgtgactaaaagggaggcaaattattggaacggattattcaaatggatccttaaatattgctatgtataataagccagttattatatcaggaccatgttctctgtaggccactttctaaaaaagccacatatgtgcaattttcaggtttttagactattgctccctgtactttaaatgtaaaaaccacacttctgaacaactaagctcatgaatatgattttggttatatgcagcttttgactagcatgtattgtgtctttttctcctctatgaataattttatatttcatgctacttcttgaaagtttactctttgatgctctaagagaacagccagatggtttatatgaataatctttatctgcaggatggtggattggtaaattaggagaatgttgtttgagatatcaagatttatgtctgggaactaaaatatataatgccaaatgtgtttttgtcaattactagagaattctgtgcaaacatatcatctcttcaaatgctgcacactttgcttttgttaaacagcaggtagtagacagaacaataacagtttcgcgttaagacttttaaaggaaatagaatcgtgattaagaaatcagaatttatagatatattgggataaatgaagaaataaaaatgcttgtctagaatgtagcatctagtgactttttaaagccctaacgtttacataaagaagctctagttcttatagaaataacaaagcaaataaaagttcttaacaatcccctctttcgaagtgcatttttttaaagcagggcaggagacatttggactctagctatatgacatactgggaaaggcagagggtggagggaagatttcacttcattgtctagcccagaatcttgagcaagctaaagaaaccatcataatctaaaattgcttcatttaacactaacaatttagactttttaaaccaagcattgaataatggctggataactgccgaagtaagcgccgctccatgaagtctgcttacttatttaaaaattgtgtatcagttttaaatactgttcattgtgtgcagatataaggggaatagggcattctgtagaattatacatgtctagtttgtaaagtgtgtcctgtgtactgcagatgtgtgttctctgggctttatgtatctgtacagtagctttcacattaaaaaaattgtggacaaacttgtccggggggtttgaggggagaatggtggtttatatcaataacgatgctgtactatagtccatgtaacaaaagatctggaagtcaccctcctctggcccacggaaaattttggtaatcttctaggttctaaaatgaagatgtatgggtactctggcagactgcatgttgtataatttgaaaaatactaaaagtggaaaataaaattgaattaaactttgaaaaaaaaaaaaaaaaaaaa

SEQ ID NO: 24197 - DNA, 5047 bp, Homo Sapiens
atgggtggaaacatgattcaaacttacacaatttttcttgctatttttcaaatatgaatcttactatatattctcggtgaacaccaggagactattaaagaggtctgctgttaactgtaaagaaaaaatgctcgtagctatttgcttcctggtattggagcagttcagttgtttagtttataccattggattcaattcattgcaccatggttgccaaaagtgcctgaggtcataatggattgttaaaataactaaattccagtggttggaaactctaggtttgtaccattttttctgctgtgggaaaaaacaacaacaacaacatgatcaaggtaacatcacatttgatgtataatattatactattaatggaatatcagtagacaactgttaacccattagtagcatgagtataaacagtacacctgaataaattggagacattagccactaggtttaacagtggaatcttgatttgcctaggtgacttctgggattactgtttgacaaataagagtaacattttatttcatttcagaatttacgtcactttttagctacaagagtaggaagaaggtaatcggcaaggcagaagagtatactctttgccttaggatagcgtaaactcaggctgagacatacccggcttatagagttcttctagatgtgtagactgtaaatgcccaaatcctctcaactaaagttttagtgattccacaaagcctctcatgtaaatttccagtgattccaccattgcacttgtgaatatgtatccttgttagtacccagggatgtcctcgagcaccagttttattttatctgccattgcatctggattccattacagcctctcagctgttactgcctgtggacagttacttctgcttactgcctgtagagagttacctaacttctcttctcagttcttcctcaggtcctggctattttggcctcagttgaagggagtcttgctctcatctctgagggttttaagtttgtttgatcccattgttgtcttttctagctttgagcatgtttttcagtattcatattttaacttactgagaacattaaagggaaatgataaactcgtggtggggatatggcagacaggtgcttgtttgtttgagagaagtagcagaagagataaaatacaaagtgctatatgtttcagctggagaggaaagagagagaatttattagattatatacttgtcccatggcataccacgtatatgtttaaatagggacacatctccctatgtttaactatacttataaacaactttgatacacattgcgtcttttattctgtcacctgatattttagtgtatctcaagttacagattacatgtgtccttaaactatttctgaatttggacttagttccatatacagaaagaactttagaaaattcattaatttggatcttctattgatagccataaatattatgtttatgtattctaaaacctctttgtttagttagtactgttcatgaatgtaacaagcttcaatttctcatttgtgagtagtacatttgctttttgtttgtttgtttgtttgtttttgagatggagtctcacgctgtcaccaggctggagtgcagtggcgcgatttcagctcactgcaacctccacctcccaggtgcaagtgatgcccctgcctcagcctcccgagtagctgggactacagacacccgccaccacacctggctaatttttgtatttttagtagagacggggtttcaccatgttggctaggctggtctcaaactcttggcctcgtgatttgcccgcctctgcctccccaaagtgctgggattacaggcgtgagccaccacgcccagccgtacatttactttttaaagcagcagactaggtacactaattctcactcaaatattttcatgggaatgtagttatcaccaagtcctaaagtattatttatgccaaaaaaaatttcattttaaggactacaaaaatgattctaattaaacattttataatcaatagtaggttgggtctttagccattatatgtgtatatatacagacacatatgtatacacttacattttgacagggtcttcattgagtcttgatgcactttaaacccagctggctaccagagatgcgaaggtgggctctttgaagattagcaatggacgtttctgtcacttgagaaaaggaaagttctttgcctttaaattacacagttttcatcatgcccacaatctatattattggctggttaaacagcactgccctattagcaatgttaacaaaaatgaaattatttattggcggttatagattatctaattcaggaaatttctgagctcaacttttacagcaactgttatgccttctaatttagcaattgagttatgagtaagttttgtgcttaactcctagaccctattgttgataaccagatcaaatatagtctgtacagaggaaaacactgggaacatttagtatttctaaagcctcctttggagttactactgattgtaatttggaactgataataggtagagattgctaacactgttttttttcctggatcttttttatgccagaaattaaacaggttctgctaactctttttttctcttggttatcaccagaatgaaaatatttaaagtgatgactctagaaaagccatctgtgcctggttaacattgagtttgagtctcttcaatatatattgatcatgtattgattaatctttattttttcatattttggctagacaaattcagatctatataatggaataccccttcttgagtgaactatactactaatctacatgattatatagtaaggaaaaaagaagaaataactgtaataggcatagtgtttgttgttggttgtcttgtcattcatgtgatactactcatttccaaaattcacacaaacttacatgaggtggattatttgttttgttcattatttagttcctatatgttttttctttagaaacagagtctcattctgtcacccaggctggagtccaatggggcggtcatagttcactgcagccttgaactctttggctcatgtgatcctcccatctcagcctcccacagcaggtgagactacaggtacatgccactgtgcctgactttttaatttttttgtagagacgaggtttcagtttgttgcccaagctgatcttgaactcctggtttcaagcgatcctcccacctcggcctcccaaagtagtgggatttcaggcatgaccacctggcctagttcctatacttttcttaattcttcagacttctcacatttagtatagtgcattcatttcatcttgctgtttattagcaccctttgtggccaagggaaataaaaggtggtaaaattcagttttcagtttagttcttgaaagctctgggaaatggaggaaacacaaaactatgaattaaactagggctgttgatttctgaacccccagataaatcagttgacccacattttcattttaggtgttaggtccaaattagcataatgtcttgcattattattaggttcagtgtgaaaccttacagtgctgcatttgaagtttagtaactggttattattaatcatttgggaaaaatgaaaatgtgttgggactttctatgactaggcatttgttgattatttttcatgattgctttttgttttctcattgtgtaggatttgtgaacttgtatattacaggaaacaagatactttgtaaaatttactggggaaaatccatttggagtgcatgacatttgccaggataagaaagcagtaatatgtttgtattataaaattacaccctgccagaaaactttctttcctagtaaggtaaatgtagaagggacttttacagcatagtaagttgattaggagccaaaattttattccagttttttttgaactaagaatgttttaaattctgtaatgaacttttatgtttacccattactcatgcattctttcacaatatgtttaatagcctgaggaaataggaaagctgtgaagctactaccattctttacttttaataagaataataggaaagaaaagtcaggtcagtaatccaaatccaaatatgtatactgcaaatgctcaagaagtcacattttttgataaatcgtattgagtacagaagaacttatatgaatttattatctgttaataacttagttttgacaacagaataacatttggaaattgtgagaataatcaagctgtttttccattaacagtgtaaattcataacatgtccttcaaaaggtgatattctaagctgtcttaattgtctacggttgataacttttaaataaagtacaggactttctgaaagtgtttggcatgttatgctgccaaaaacaatctgtgttttgaaataccaattaatcagttaatttctgaagactttgtataggacttgatatatgagtcagaatctgtctgtactcattctgtacattgtaactttgaacacttatgaaaaactgtatctgttggtgtgttttgattagttagtgtagatttgtttgcgtatttgaattccgattttagtttaggaagactaaaagtagccatttttgtaaagttcatatgctattttttaatgtcattcttgtttttaatatttatacaatagtgatgttactagtaaaaaatgtttatagataacacgtagagctattaactgttcaaaagcctacatgataggcatattttgtatctcgtgttgcactcgttctgtttcatattggactttttacatcccttttttagcaaaaaaaagagacacatttgaattctctttagcataaagctgtgcattggaaactatgtgactgtatccatacggttagcaaaatactctttgccaccaaaggtaaatgaaactgtaaaatacctctggatatttgtgccaatgaacttttcttagcatattaggattaaagcaaaaataatcttttcagtatgtttcatctaggacttacaataaatgtttaaaccatgaaaacttaaaaaaaaaaaaaaaaaaa

SEQ ID NO: 24198 - DNA, 2655 bp, Homo Sapiens
gaaaatgtatacctggcagcaggcactgtgtatggactggagacccagctgactgagctagaagatgccgcccgctgcatccacagcggcactgatgagacccatctggcggatctggaggaccaggtggccacggctgcagcccaagtccaccatgctgaactccagatttcagatattgagagccggatttcagccctgaccattgcaggattaaacatagcaccatgtgtgcgcttcacaagaagacgggatcagaagcaaaggacccaggtacaaaccatagatacatcaaggcagcaaaggaggaaactgcctgctccaccggtgaaagctgaaaaaattgagacatcttcagtgactaccattaaaacatttaaccacaacttcattctccaaggctcctcaacaaacaggactaaggaaaggaaaggcaccaccaaggatttgatggagcctgctctggagtcagctgtgatgtactgacaccatggaattccactgccagtgacccactgcctccggccgtacacgacagtgccttgacccaacagccatcgagtactgtatgtatttccacctgaggagaaggcctggggaggccacagtgcaccattgcacagggctgtcctgatacctcatccagaaagccgtctcagacttcagcactgcggtcttgcccactctctgccttaggctcccaggggaatccaagacagaaaatgaagacactggcttccaacagcagcgctccatgtttaagatacatattttccctgtttgctttgctactgtatgttgactttaagatctttttttaaatacatttgattcagctagtattccatgtcaacaatttgtccaaaggaaaactgctggagggaggtggagggaggaaggtgggaattattatttaatacatcattaatgcttattaatctctcacaagcatctttgtcttgcaaatcctaagggaaaagcaagtccctgcagtgagcactagggacagtctaatttggggattgctcaaccatcaagactgcaggtctcccttcagccacctccttcctgctaaaagcttagcctaccacactaccagtcattcccatcgctttgcaatcacaagccacaggatgagaagttctgactcactcatgccatgcccagggctatctgaaacaatgtctcattaagaatttagggttcttccatgggcttactgacagttgcccagatctgaaggggaaagggtcttgagaaagaccatcactggctcaactttagggcactgtccagagtcaacatgatgtggtttagcagtgatcacatctaaacaaagtttaggtaaatgaattatcgcagagaaaaaccacatgagaaaatttttgtactccaaatttacttcccaataaatattcagcaaagtagtaaaatgaccttaaagataaaaatgattagggaatagccttagaaaatttataggtataaaaaattcaaggacaaactgtgcatttaatggacacaagaattgactctaactccatgtctgtggtttctttgaacccatatcaaatgtatgactatttagagtgtttataagagataatggaactgaactttcactcaattaattgggcattaacaaccttcttttatgtttgttcctgatatagtctgaatcttaggaagaaggtaaaagaaaggaggcaagagaatagttatgatgaatatgtgttaagtgcctgctctgaaggaggcaatgttcttctcatttgaatccttatggcaaccttattcaataggttttcccatatttcagatttaataactgaaggccagagagattaatttgccaaagccacacctttatgctaattatgattggaatgcatcacaaaagcctaactctgttgttttcaacctctacgttattttgctgctatgtgcatttccagatctgattttctgctaacttgtgtgctatgatccactcctgatgggggtctacattaatcttccagtactccttgctgatgctgtgttatgtgtcatctaacagaaatgactcctttgaaataagtaaatctttggctttttgttctgttggtgtgattcaaagcaaaacaaacaaacaaaaacaaattttaagaacacaacaaaaaagatttgacttccgaatagaatgttttctttaagaggcatgaaaagcaactattgttgtgttacagtgttaaaaatattcagttttctttgacaaaaatgtgtactgtgtaagccttgcaaacaaaaaacaacaaaaaagaagcagcagcagcagcctgctgtgtggcatctgaacttttataaaggtttccttgtgccaaataagtgcaaagatttaatttactattaaaaaccataagcatatgttatagttccagaagaattattttgtcatcaagtgattttgatctttagtgtcaatatttatatttagattaatttttataaatgaaaatattttaatggtttaagaaaatgaggacaacaggataatatctttgatgacttctgaaagttatgcttcccttcatgttatatgcacattgccaagaattactgtcaagagaaatgataagtaaaagtcatttatgaaaataaaaaaaaaaaaaaaaa

SEQ ID NO: 24199 - DNA, 3134 bp, Homo Sapiens
gagaaaaaatcaccacatggcaagaccctaggaaggcgatgaatcagcctctgaatcatatgaacctccaccctgccgtcagttccacaccagtgcctcagaggtccatggcagtatcccagccaaatctcgtgatgaatcaccaacaccagcagcagatggcccccagtaccctgagccagcagaaccaccccactcagaacccacccgcagggctcatgagtatgcccaatgcgctgaccactcagcagcagcagcagcagaaactgcggcttcagagaatccagatggagagagaaaggattcgaatgcgccaagaggagctcatgaggcaggaagctgccctctgtcgacagctccccatggaagctgagactcttgccccagttcaggctgctgtcaacccacccacgatgaccccagacatgagatccatcactaataatagctcagatcctttcctcaatggagggccatatcattcgagggagcagagcactgacagtggcctggggttagggtgctacagtgtccccacaactccggaggacttcctcagcaatgtggatgagatggatacaggagaaaacgcaggacaaacacccatgaacatcaatccccaacagacccgtttccctgatttccttgactgtcttccaggaacaaacgttgacttaggaactttggaatctgaagacctgatccccctcttcaatgatgtagagtctgctctgaacaaaagtgagccctttctaacctggctgtaatcactaccattgtaacttggatgtagccatgaccttacatttcctgggcctcttggaaaaagtgatggagcagagcaagtctgcaggtgcaccacttcccgcctccatgactcgtgctccctcctttttatgttgccagtttaatcattgcctggttttgattgagagtaacttaagttaaacataaataaatattctattttcattttctgcaagcctgcgttcttgtgacagattatacagaattgtgtctgcaggattgattatgcagaatacttttctctttcttctctgctgccccatggctaagctttatgggtgttaattgaaatttatacaccaattgattttaaaccataaaaagctgaccacaggcagttacttctgagggcatcttggtccaggaaatgtgcacaaaattcgacctgatttacagtttcaaaaactgtattgatgacagtagtaccaaatgctttaaaaactatttaacttgagctttaaaaatcattgtatggatagtaaaattctactgtatggaatacaatgtaattttgaatccatgctggctctgatggctcttattagtctgtatttataaaggcacacagtcctattgtagcttatctttcgttattttactgcagagcatctagacaacttagtccctccagcgtgaaagtagcagcagcagcattagtcacagttcttacactacagatcttgtgaaagagaccagtttggtactaattatgagcattttattcaaacaaaagtttttgaaatattacaactggggatttaaaaaattgcagcttagaatctgatggttttttttttttcttgatgttgtttgtttgtttttgagatcgagttttgctcttgttgtccaggctggaatgcaatggcacaatctcggctcactgcaacctctgccttctgggttcaagcgattctcctgccttagcctcccgagtagctgggattacaggcgcctgccaccacgtccggctaattttttgtattttgagtagagacggggtttcaccataatggtcaggctgttctcaaactcctgatctcaggtgatccacccatctcggccttccaaagtgctgggattactggcgtgagccaccgcacccggccttgatgtttattttataaagcactgtaattttgtagctgatgacaaaaggcagccaaatgtttttgataaatcagtggcaactgtatttttgtcttttgaaataactctgaaaacatcaggacaacatagatttcaacctgatagcacaccacacacagtgagctgttgctttttaaattctgaagccttgtcaggtttgcttcctagatttcaagtgtttaaaataattctatctatgaaactgaaggatgaagcagatctctgactgacatgtaaaaaaaaatgccctttgagggtgtatggtggagataaatgtttctgaattcagtaaaattgattcctaagtatattatcctaatcctgtttgctacagttggtataaaaaggcatgaaatatgtattcaatacctcttatgtaaccaaaaccatttttaattagcttttaaggactgagagagcatcatgttcaactggcatgcagtctgcctgcattgccaatgaagtcctcaactgtttaatattttgaactaatattatttataatctatgaatttaatcttttttgaaagactttaataatttgagtctctgagaggatactttcaatttccatgggggacttatttgttggggatcttaaataagattccttttgatctaccggaatatacatgtacagagtacattggatcatgttggaaagaaggcaagtgaaaaggtcagagatgaagtagcgaagttatggaatatcgtggaaaggatactagttgtgaaatggaaagagacaagttatagtaccccaaaagcaaaacaagcaggagatgcaagagatgccccaaaaggacaaagcaacaattttctgttgccacctttataccggaagactctgttgtagaagaaaagaaggctttggtgcaccttatgtgggaggaggaggggcagggcatgctgatgctgagcgtacaggcagacaagagcgtagcctgctgttgcctccatcactatgaaatgacttattttacctgaaggacccatggtttatgttcctctaattcctttcactctccctaagccctctgagagagatgaagatagatgattttattgctactaaattgaagggagcactatttctttttgtcttttgttagcaaaaaattgcaaaaagaattgtacattcttgctaaaaataaataaataaataaaaaaaaaaaaaaaaa

SEQ ID NO: 24200 - DNA, 1703 bp, Homo Sapiens
gcttcattcactcttggatgtattttcactcctgatacttaatagttttttatttttatttttttattttttttgagacggagtcttgctctgtcccccacgctggagtgcagtggcgcaatctcagctcactgccacctccgcctcctgggttcaagcgattctcctgcctcagcctcccaagtagctgggattacaggcagccgccaccatgcccagctaatttttgtatttttagtagaggcggggtttcactgtgttggtcaggctggtctcgaactcctcacctcaggtgatccaccctcagcctcccaaagtgctgggattacaggtgtgagccaccgcgcccggcacttaatagattttaacctagtaattggggcatggtttcctccgcggatcaagtgaaatcctacatggtacactggactttggggaattcggtagtggcggggaggttctccaaagttacaattcaaagaccaacaagtttactccttgatttttttttttctttgagatggagtctcttgtcacccaggcaggactgcaatggtgtggtaacggctcaacgctacttccatctccgaggttcaagccattctgcctcagcttcccacgtagctgggattacaggtgcccgccaccatgcccggctaattttgtttttttgtttttgggacagagtctcactctgtcacccaggctggagtgctgtggcgcagtctcagctcactgcaagctccacctcccgggttcacgccattctcctgcctcagcctcctgagtagctgggactacaggcgcctgccaccacagcccggtaattttttttgtgtatttagtggagacaagggtttcaccgtgtcagccaggctggtctcaatctcctgacctcgtgatccgcccgcctcggcctcccaaagtgctgggatgacaggcatgagtcactgtgcctggccagtcctgcacaatcttgaaatgctgaggctctcagcaagctgagtgttggagataacttcatagacaataatacatggtggcatagctgtttttaagagaatcctgccttgtgggtactatcaaaatcacagttccagttgggctcagtggtttacctctgtaatcccagcactttgggatggtgaggcgggtgaatcacctgaggtcgggagttcaggaccagcctgaccaacatggagaagccctgtctctactaaaaataaatgttagccaggcatgatggtgcatacctctaatcccagctactcgagaggctgaggcgggagagttgcttgaacccgggaggcagaggttgctgtgaggtgggattgtgccactgcactccagcctgagtgacagagccagactttgtctcaaaaaaaaacaaacgggggtggtggggggccagactcggtgactcagcctgtaatcccagcattttgggaggccgagatgggcggatcacatgaggtcaggagttccagaccagcctggccagcatggtgaaaccccgtctctactaaaaacacaaagctagccgggcgtggtggcatgtgcctgtagtcccagctgcttgggaggctgaggcgggagaattgcttgagcccgggaggcagcggttgcagtgagctgagattgcatcactgcactccagcctgggagacagatcgtgactccatctccaaaaaaaaaaaaaaaaa

SEQ ID NO: 24201 - DNA, 2884 bp, Homo Sapiens
gggaagtgaatttaatattgagggtaattgaatgatgttgcaatggctttccctcctgctggcttggtaagaatattaaagcctgcagaggtggaaattggagcccatggagaaatggatagaaagcaatttgttgcaggcagcctttggacaagttgttttaataggaaatagacctgctgcttcataggtttcctcaaccacctttcctcagctttcttaaaatgggatctacattggctcttcacacccaaatagcagactaatcgtttttctgcttagcaccgtctggttcattgtcttgaactctgccttacagcagcaagaaaattttcctcgacaagaacctcaatctttagttccattgagctccccctctggattttggacttaccagaagtaggaggttctgataccattcaagatggtctttccttcaaagcaggtctgaagaggagactaccaaagcagtgtttacaaacccagagtccacacaaccatattgcatagaacagcacttggctttcacaagcctcctacaggacctggtgtaattggagtgaaagggcagagaccctggaagtggaggtggctgtgtgctgcgatgggaagaaggcagaaggcccaggggctttggacatagagcagggtggaagctgcaagtactgggaaggaagagagtttcacagaaacaaagctttgtcacacagaaatgagttctgtctcactggtgacttcatccctcaggctccagctgagcagagattttaatcagcttccttaatgggtattgacactgctcaggaagcagtagaccctgtcagggacagctattgatcttttgtgttctgattagattggaaaatagatcaacttcattgtagtccaggaactgttggtcacagctactaggaatgaggtgatttctgagggctgagaaaaaacacagaatcttggccagcagccagcagctgcatggtgaaagatgcattcacttctcctttgagagttggggttgagggcaaacatagaacccaggtttggcttacaacccagtgtcccggaagccctccttcgggagaactgtaagtaagaggtgggtgtgtctaaagacaataccattaatgaatgttctggccttacctaaaaaggtttagcaatttggggataactcttggatctagcttatgtgcgttcacatgcacatttgctagcccagagcttttaaaatgaggtctggcatatacttgattacaaatgaaaactcagaaaccaattttatttattaaatcatatcttttgtttttccccctcccttctaatcccccaaaggacctatttgagctgttccccaattcatctgcttattttggaccatgaatctgccagagtgatattttctgttatttctcctccaaatttttccctgatgtttccaataaagatttacttgggtggccccttaaggtgacatcaggatgctcttatgtccttccagaataagcatacacttcactcctctccctttcatctccctctgcattcttaattccttgcttttctcacttggagccgagggtgctttagagaggtggttttccatgaatcagccaagattcctgtagaagttgggtataccaaccaccaccaccaccgccccctattccagtttcaaagctcctcggctatgctaatgtcccctcagagatgaggtttgacttttaggcccgtatgactcctccatagcctggccaaggagaccatgagtagccatgtctggtttactctttatcctgagactgtttatagcttaaaacagaagtgtgtcttcccagcacaaacctaatcaatcagtgtatcagtgcatctggtggcaacagctcagcccattcaaagagcaaggattcaggaaaggcacactgatggtggggagcctcttaagagcctctaatgttctcccaaaaccagagttgagagtcggagtgccagtcgtcggggcccactattcctgaataagggacatgcaagggccagaagtagcttgactctcgcctaaatatctgtgcctttgcctgtcctttctcccactctactgaaacccggaacagattcccgcttgccttctgatgaagagaggttaggtaaagagagtttggaggaaaaaagacaccaggaggcaggctgcggggtaggagagggttctgagaggaggcagcaatccagaatacctccttttctagccagcatcccttgaacttttgaaaggttgtgcctaccactggctggcacaccagggcaatgatttccctgcagaaggaaggaaagaatgtttcacccttgcatccttcttggagaagctacagcctgtgctcagttgagtggttcacactcagactttggctttatggttttccttcctccttgtctttgccctgaccttgatcaacaggggtgaaaagaaccaccctgaggtttccatgcctctcccattttagtggtagcattttgtgtctttactccacccttcaccctagttccaccaaggttcacacaccagatgtaactgtttttcagctgagttgtatggattaacttcagtccactgtaaatacacctgggacggggtggggttggggttgtttagggagaagcagccagacttgctttgtgaactgaatgtatttttatgcaattttgagtggcctttcaaccctaagatgaatggttttgttttactggttgttgttatatagttttgagtattctgtgtttgaaagtttgggaataataatattcacttctatatgatgcctgtaaacacaacagtatttataaatgagtaaataaaactgtgttttaactttgaaaaaaaaaaaaaaaaagg

SEQ ID NO: 24202 - DNA, 2871 bp, Homo Sapiens
gttctgagagtccagaaatgggcccagaagtaaccccagcacctcgagatgaactggtggaggcagcgtgtgccctgacctgtgactgggcagagcggatcctgaaacggtccttcagttccatcgttgaggtcgcccgcttcctgctacagcagcatctcatctctgcccgatctgcacatgcccatgtgcttaaggccatggggcttgctgaagaggacgaacatgcacctcgggaacggtcatctaaaccaaagaatggtttagagaacccagagggtggagcccacaagaagccagagagactggcccagcctcctaaggatctggaagcccgaactggggccggtcctctcgcacgtggagagcggaagaagagtgtagttgagagctcggccccaggagccaataacctgcaggttaatgccctagtggctcggctgcctctgctccttccccgggcccctcgctcactaattccgccaatcccagtctctccacctattctggcccccaggctttcttcaggtgccctgaaagtggctacactgcctctgtctagtagggccggggcacccccagcagctgtgcccatcattaacatgatcttaccaactgttcctgctttgcctggacctggacctgggcctgggcgagctccacctgggggactcactcagccccggggcacagagaacagagaggtaggcataggtggtgaccaaggaccacatgacaagggtgtcaagaggacagctgaagtacctgtgagtgaggccagtgggcaggctccaccagctaaagcagcaaagcaggatatagaggatacagcaagtgatgccaaaaggaaacgggggcgccctcgaaaaaagtcaggtggaagtggggaaaggaattctacccctctcaagtcagcagctgccatggaatctgcccagtcctcaaggttaccatgggagacatggggctcaggaggggaaggcaactcagctggaggggcagagaggccagggccaatgggagaggctgaaaagggggcagtacttgcccagggtcagggagatggtactgtttccaaaggaggaaggggccccggttcccagcataccaaagaagcagaagataaaattcccttggtcccctcaaaagtgagtgtcatcaagggcagcagaagccaaaaggaggcttttcctttggcaaagggagaggtagacactgcaccacagggtaataaagacttaaaggagcatgtgcttcaaagttccttatcccaggagcataaagacccaaaagcaacacccccatgatacaggtctgtggggaagagtgtttatatccctacgttaactttgcctagtagaggcccttctttgcacttgcttctcatttggctattcttttcctaaggaagtccattctcctctgtacagacagctgagtcacccagtctacttagtacctggttgctgcctctgaccttttcagcttgataccctgggctttagtgtaaccaataaatctgtagtgaccttacctgtattccctgtgctatcctgtgggaaggtaggaatgggctaagtatgatgaatgtataggttagggatcttttggttttaaatcacagaaaacctaattcaaactggcttaaaataaaaaggatttattggttcatgtaactagaaagtccataggtagtgctggctccaggtgaagacttgacccagtagttcagtatgtctctaaataccggactgacttttttctcactgttgcatcttctgtaggaccatttaagtctgggccacttaatggctgccagcattcctaagattacacttttccccatttatgtccaatcagaaaaagaaggcatctttgtaccagaaatctcagcaaaagccctaatattcacactgattaggcctgggtcacatgtccaccctgaccaatcactgtggccaggaggatgatacatgctaatttgcttattctatatcatggacaacacctttggggaaaagggtgggggtcagcctccccaaaatcacatggattccccaagtggaaactaggagcagggagttgcttgggtggccgctaacaccaggctactcttattttagcttgctaagttgagatcagctagacctgctttcttttctcctcagtcttgcatttccctcaatacaagctgcagcctctttcctcgtttctagtctcagaaggaaggagagggaagccattctcctctagggactcttcagtctcatttagatgatagtccctttttttctacctccatattagagatggagctccttccttttcctgtttcttaatttttgtcttctcattcctgcttccctctcaccctattgccagttccaccaactagagtgaaagacttcctagccatttcattaaatctattctgtatccaccaggtggcagcatcttgtcatacgtgtcaggacttaggactgcggggtttaggttagatgtcacggaaaaagctagttctgtggtcaggcggcaccaatgagaaaggaatgcagaccctccagatgtatccttgggaaaagcagtaaaccaactaatatttattgaagacctactttgtcctctacatagggtagcttctgtcagggaatcttggttcttcccaagaaacactgattttctttcagggagacttcatgtgttcatttatttccaccacagcagattttaagaaattataatatgtaatatttgatatctataaagagtatatctaacgtgaataaattatgaagcatactaatgagtacctatgacccataacacatatacattaaaacattttaaataccaaaaaaaaaaaaaaaaagg

SEQ ID NO: 24203 - DNA, 3492 bp, Homo Sapiens
cacgcgtccctcttgcaacttgctgagtttccctaagatcattattttgaattccttttctggcatttttatagatttccttttcttttgaatctgttactggagaattattgtgtctctttggaggtatcaaatttccttgctttttcatgtttcttgtgtccttacattgatatctattcagctagtggaagagttgcttcttccaattttatggattggctttcataaggaaagacttttttgtaggcatatctgtagttttggttgtgattaggatgttttggctttgattctggtgagcacaggagtgtaggctcaatgatttcttcagctgtaaccaatgtaactggtgtcatgtaaccatgtcactgtgagtcctcagtggcttaagttgccattgttagctgaggctgttgtgaggcttttctggggaaagggatgccagaggggccagtccctgggccttttggtggcatgggcaggctttagctgtggtggcgatgggctgggcatgctagtcctcaggaccccagctggtgtaagtgctggtagtggggggcccaggtgggctggtcctcaagcccccaggcagcatttatggtgctggcagtggcagtagcagcagtgggctagacactggactgtcaggtggcaatcatagctgttggcagtagctgtggcaggatgaatgggacagtttctagccccctaggtgatgcacttgggtgggcactggtggtaggtggggcaggcctgttcaggccttgggattgtgtgcgtgggcaccagtggtgttggatggggtgggccagtcgtcaggcccccctacagagcatataggcaccagtagtggcatgagggaaagatagcgctggagaacactggtgacagtgggtggagcaggcctgtctttaggttcttggatggcacatatggacatactggtcctcaggccccctgaaggtgcacacaggcatgctgttgccctgctgagaggggcaaggttctgttggtggcattggtgttgggaagatggctcccaggttctgggagcttcagctccctttttcctggggtagcctccctggtgtgctatactgcctgttccctgggatataagacacttcatgggtcagagtactggggacctggctgcactgctgggtgattgtgatactgcaaccttctggatggatgtgggaggatgttcttgggggtccagggatgtggactgcaggggcttattggaccccaagtgggcaggatataatctggtgggggctagcctcttaaaatggtgctgtgccacagcagcatgtttcttgggatgtgagtaggatccagtggaattccctttctggaagaacgcatttgcatggattccaggcagctccgtatactggactcagggcctgtgaaggctgacggcatcccctgtgggtgccagcatctgtgctgcgaatgtggaccactgcagttctttgacttttcttttcccagaaatgggattcccctcctgcttctgagccagtccaagacatgctggctgctttatttactgctccctttgtgcctcagaagttccctgttgaatagtgttctgtctttggtgctctacctgacatgtggttaactacttgcttttttggtcctttgttgtgcaggagttgagtgccaggctcacggttttttgattaccatagttttgtagtttttgaaattcagaagtgtgagacctccaactttttctttttcaagattattttggctgttgagtcaattatgattccatatgcattttagatggatttttctatttctggaattgtgccattaggagtctgatagatactgcattgaatctgtagagtgctttgggtagtattgacatcttcccactattaagtcttccagtacatgaacacatgcattttcctgatgactaatgatgttgtaccttttcatatgcttattggctatttgtagatcttcctgggagaaatgtctatgcagactttttgccaattttttaatttgtccatttaaaaatcagggttttttttgttgttgagttgtaggagttctttttgtattccttatactagtcccttatcagatatatgctttgcagatattttctcccaggtgggttgtcttcacttccttggtagtgtcttttaatacacaaagttttaaatttttatgaagtcaaatgtatctacatttttctttggttgctcatgcttttggtgttgcatctaagaatccactgccaaatccaaggtcatgaagatttactcctatgttttcttctaagaattttatagtttttgctattacataaggtctttgagccattaagatctttgacttaacttttgtatatgatgtaaagtcactgtcaaacatcattcttttgcatttggctgtcactgggttactgaggactgggtagcttagttgagtagataatcttttgttgtttcctccttgtaatatacaagccttggcttctgtgacatcatactctcctagatttccccctgtcactgtggcttcttctcagtctctgtccatccctggtgctcctgaaggttctgttctcagccttacacacattacctgggtgatctcattctctgccatgacttcacttgccatatatgtgctgattttccccaaattcctatttctcccgacctttacatctattttatttgcaggtcatatatctaataaggaattgatatccagtgtacatgtagaactcctgtaattcaatacagaaaccaaacagtccaattaataaatggagaagagatttgaatgaacatttttctaaagaacatctcaagctcaagatttcccagataacttttctttcttcaaaatctgcttctgtgtttcctcatctgtaggtggcacagcatacatctgatttcccaagccagaaacctcatagttattcttgactccaggaagaaatattattgagtttttaaaaactcagcttattgactcattgttttatataataaaatgcaacagttttaagtgtatatttcaatgagttttaatacatttatgtacttgtgtcactatcctcatagatagagacaaaacatttctatcacaccggcaatttcctatgtgtcccatcccaatcaatcctttcccctttgctggctccaaacaatgactctttcctatctttttagaaagattagaattgcttttctagagttccagtaatggaatcatacagtgtctaagtctgtttgtggtgctgtaacaaaatacctgagactgggtaatttataaattataggaatttatttctcacagttctggatgctgaaaagtttatgatcaaggcactagcaggtttggtgtctgagggcccagtttctaatttgaagatggtgctttaaacactgtcctcacatggtagaaggggcagatgggcaaacaaaaaaaaaaaaaaaaagg

SEQ ID NO: 24204 - DNA, 3030 bp, Homo Sapiens
ggttgctttgttaagttccatctaatgatcattctgacgtaagtctgtttttcttatttccttggaatgatgtctcctctggtttcagaacttcctcctctgcttcctgtatcctgaggctggcggggccagttgtctttagggcttgtgcatttttgtaaagagcttgcacgtgtggaaatcaagtaggccagtagtgggttaggggtactgagccagaagcctctacaaggaataacaggagcacaaaggaagaaggtggtattccagctggggacccaggagggaggactttgtggagaacctgatgcttgaactgagtctaaaaggtgtaaaagtgtttgttgcttctgcctccctgtctgtctggcagggtgaggtaggcgcatctagggaaatgtcaagtggcttggtgtagggtaaagtcagtgaggcccatggagaaaaacgagcaggagccacatcacatgggtgtctgataggacctgggaggcgctttccacattaccattgtcgcttcgtgatctggacacaccagaaggcgtgagactggaggcaggaagagcagccaggcttatccctaccctcaggagagctgaaaagggcaggtatggtggggccagagctcaggagagtttcggaaccactgagatcggtccttgatttgatgagaggcttgaggggagagggaggtagctaggatgccccgcaagcttctggcccagacactgggcagacaatgaaaccctttgtaacacatgaggcaataggtttggggcagatgggaggggaagcagtggtgggggcagtgagtgctgaaggtgttttaagaagcggctctgggccaggcacagtggcttatgcctgtattcctagcattttgggaggccgaggtgggagaatcacttgagcccaagaatttgagaccagcctggggaatatagtgagaccctgtccctacaaaaataaaaacaactagctgggtgtgtggtggtgcatgcctgtaggcccagctacgcgggaacatcacctgagcccaggaggttgaggttgcagtgagctacagttgcgccactgcactccagcctaggtgacagagcaagatcttgtctcaaaaaaaaaaacagctctggatgggaagggaggccagttgctttaagtaggggagatagagttaaaggaggctttgttttatttaaaggtgggacaaacttaagcatgttaataaaattcagagaagagaaagagaatgactatcagagccatgtttggaagaaaatggggtccagagcacaggaaggggacctgtgttcagagggtgcctcactgctgaggccacaggaaagaatctgtaggtggaggggaggccgaagaggggaagtttcatgcttgataattaaaattttctgagataggaatgtcatatttacctatttaagccaagtttttttagataaaaggtatggaacctgctttccccttggctagttcagcgtttgggctccggagtgctgaagatgaggactggacttcgagctggtgtgatcccagtattcagtgtcagtactcagtgacaaaataaatgagagaaacgggaataagaattgtcgcctacacaaaaataccagcaactgttaactcttcccagaagattttcattctgaatgctcctgtagctaggaaccctaaaaagtctttgaagcaactcaagttttaaaaaaggggaggaactcctggaaatctcaggatggggccaagatgtggctggagagtgtgtggtgatggagggcgtgtcttttgccgagcacactcagggcccacgggaagcccatagacttcaaggacatcaagccccaaggtggtgggattttccccaccagtacttggcagcctagggggaaggggagggcgggagaagataatggggatccctggctccaaacataggaggacacatctgtgctacagtgcgcacatgcctggatgtacactctgtctttggagacactggctaagattctctgctccatgtttggacagggtcgtgcctgatctgagataaatggacaagaacaactgaagcctgtcttctggtgcatgtgtcacctgccgataactgcatcttgtgataaagttgggtgatttacagtctccaccaaatgctaaactctggggtcttacgcctttataactccatgggccccagcaaaggttcaggctcaaaacaggtgtcaaatagataactgttgaatgattgttccccagttgcaggctctgccacctggcgttcatactgtctgtgaaaggacccagctcacctttccctctttatctcccagtccttcccaacagcgccgacacctcatggaaactgattgcaaatgtgctacttctcacttctgtgtggcccgaggaggctgggttaatgctgggcttggtaccttaagcaccctttctcccttccccatcttcattctcagaattacacctgtctgaagcaggcattttccaatgccctagatgggaatataagtgtaaggagatgtgaagcatttgcctgtgtgtcagaacattcactgaggatcctcataggcacttctagaaaccaaatccttgaagatgactaaccagaaatgcccgtcatagcactgtttacagttgcaaaaactgaagccaattgaaatgtccatcaggaggggattaaatgaattatggtacagttacaccgttgaatattttacagccattgaagatgatatatagctatattcattgacaaggaaaactcatattttttagtgaaaaaagcaggttatagaattgcatgatattcacatttatataaaactttatatatgggaaggatgttgattgaattgttaataactatggtcacctctagagatggaagtttgcattacctttaatttttaataccattttgtattgcttaaaatttgtatgtattatcgttaaaataagaaaaatcaaataaagctattttcattatgggaaaaaaaaaaaaaaaaa

SEQ ID NO: 24205 - DNA, 1885 bp, Homo Sapiens
gctgaagaaaaaggatgaagctgatctgttgaaacaactactttcccaactcggaggcaaaaggggctgatagaagataacattcacctaccatttcatcttgtgacccccagagatcacgtttgcgtgttctggctgagttttttattattgtttgttttaaatgattaaataatacacaattaaatgtcaggatagcatctcttgcaaagtgaccagtgcagcagaattgtctttctatccatatttgagcttagagaaacatttcccatgtcctaagttcttagaagcaattactttagcgttggggagcattgttctaccagacccatttatgcaggggagatgaagcttaaaagacgggatgtggggtgggagtgtgtttcttaagccgaagctgttgcaggctgggggatttttgcattttctttttgttttgtttttgactgcagattctgtacatctgtctgtgggaggagagttgctactcaggacaggatttaagagacacattccagtgacctttaagaatctgcatggcgggaggtccttctccaggagtgtgggttggtccactctgggacccaccacactaagaagggggagatgataaaataacattaaaggaagaatggcctccagcctgcaggttttgttggaaagaaataaaaagggagtcattaagaccataaattcagattgaggcctcttgaaaaggttgatgtgggctagcaacctgcctgtcgaaacagtccttggttcatcagcagtgtgggaaggcagccaaggctcctgcagattcctggcatcgaccttggaaagcctctgcgatacttgtgtgtacgaatacagcagaggacagggaggtccttgttctgtggtctctgtttagtgactgaaacttaaacccaaaggcaagcccagattgtctggccgttcatccccatgctttgataggggttaggaggaaccctttccgtatgaaagacaggccctactagggcttacaaccaagccaaaggaccatctcttctttcttccacctcccttcacccctgccccgcagcagagccgagatgtgagacattcattgtcacggagcaaggagacaaaggcaagttcaagttgagaagcatatggcagcaaacagaaatgaaaaccatatgtcccagcaaggggaaaagcagtcatttccagattataaaaatcaatgaagtactctccacctaggtcagctgaaattcgagccctcacagtcaggcctgtcagagaagttaagcagaaacatctcggggggacttctaaaatttagtgaagacaaggccttgcaactccaaagaaactttttttcccccccttgaaacagggtcttgctctgttgcccagcctggagtgcagtggtgcagtcacggctcactgcagcctcaagctcctgggctcaagcactatccccacctcaacctccttagtagctgggactacaggtgcacaccaccatgcccagctaaccacagaaactttcatctcttcattttttctttgggcaccattaatacctaagacaggtagaaagggtcccagaaagacaccattggtaatggccgattgccggctgcagtcatcgcccccagatcaggctggtacaggatgccttaaggtgatgagaggtgagggtgcatgaagaataatgagcacagggaagagagaagcaggacaaagtagcagataaaatgccggcaaagcacagatgaatgtcttcaagaagctcttgtatttctctgcacagtgtaaatatccttgctatttcaggatggcggctggcctgctcagtaacatacatgttccaaataaagattttgcatgaaagtaaaaaaaaaaaaaaaaa

SEQ ID NO: 24206 - DNA, 3174 bp, Homo Sapiens
aggacgcagtgccccccgtgcccgcggccctgcaatccatgcccaccctggacccccggctgcaccgcgctgccacggcagggccccccaacgcccggcagcgcccgggcgcctccacggattccagcacacagggcgccaacctccccgactttgaacttctgtctcgcatcctcaagacagtcaatgccaccggctcctcggccgcccccggttccagcgacaaacccagtgacccccgggtgcggaaggcccccaccgaccctcggctgcagaaacccacagactctacggcctcctcccgggctgccaagcccggccctgctgaggcgccctctcccaccgccagcccgagtggggatgcctccccaccagccaccgctccctacgacccccgcgtgctggcggccggtggactgggccagggcggagggggcgggcagagcagtgtgctgagcggtatcagcctctacgacccgaggactcccaacgcggggggcaaagccacagagccggctgctgacacgggtgcccagcccaagggtgctgagggcaatggcaagagctcggcctccaaggctaaggagcccccgttcgtccgcaagtctgccctggaacagccagagacagggaaggccggtgctgatgggggcacccccacggacagatacaacagctacaaccggccccggcccaaggctgctgcagcccccgctgccaccaccgccaccccaccccccgagggtgccccaccccagcccggggtgcacaacctgcccgtgcccaccctcttcgggacggtgaagcagacacccaagacgggctcaggaagcccatttgctgggaacagtccggcccgcgagggtgagcaggatgcggcatccctgaaggatgtttttaaaggcttcgaccccacggcctcccccttttgccagtagtgtccagccagagctgcggctccagccacccttcctagggtggcattcagggcagcacccagggtagggaacttgggggcaaggggaggcaggctgggtgttccttttttcttttctttttcttttgctttccgtctcttttatttttttttaaagtagtactttctttgagatttgtaaattgtatataaccatcttaagttctggtcagtgtggcgggctcaggggctcctgctgagcaaaccgactcatgcccgcaaacctgtgaactttcgccagtgcctggcctcagactctgtgggctctgcgtggccgggccttgctggaggcccagtgggttttctgggcaaagcatggccccttttccccaggacaaagggaacagttggtgtctgggaaggtattgaacgctcctcaccctgtgcccgaagagacccggaaccaagaccatggcagggcctgcgtggaagcaggtccaggcgtttctagaaccctagggtgcaccatcactgtcttttcagtgcaggctgtaacagcccactcaggagacagtgagagtgaaaaggtattaaggaaaaagcccccagcggcactatgggggctccctggtgcatgcctgctcctgtccctggattaccacacgtgccctccctgccaccctccgtctagagcaagcggatgccccccagcctgcagcagaagcctccacagtgagaactggacccaaaggtagtgggggccggtgtggggcagagtcctgaagagccacctctaggaggcagcccctaggagcacgcacgttctgtcagtattaccccacctgtcctatcaggtgggccacaccctgcttgcccacaccagggtctgtcctggtcctcaagccacgcacccgctatgcctgcactgcagcccagccccggacagctccaggatccgtgcagtggctgcgccgccaggccccaacaatggggaccctggggtggctcctggccaagtgttctctgttttcctcgcacctccttacactgtgtgacctgcagggcatgaggtattgatgtgttcgggtttcctttcccaagccagcagatgcaggtgttccaaggtgtgttgctctgtgggatttgtggacacttaagaaacggactgagtgggaaccctgcagccaggggatggggagcctctgctccccccatgctcccaccctggctgagggccagcctcatctgcagagccctggaggaggcccacctatggacacagcccgagagatgggcgcaaggggtgctgggggaggcctgctatcctgcctctgggccacttgaggggcctcaggaagtgtgtgcttgtggctgcatctgcccgtctccctggcccaccatgtggctgcaggccaagctcttcattgctgaccatgaagagacctagttacctgccaagggattccccttccctcctcctcagggtggggtgaacaaggctcctatcccaccccaccccaaaaagagaaaaatgaaaaactcatagtttggagccaggaggcagggtgtcctacagggctgcacagccctgaggggtcagtgctgggatctggttggttggtttgtctttttgtctttttttttttttttttttttttacacaatcattaatgagatttgtcttcagccaccagtgttggccttgaagcagagggcacagcccttggtgtttgtaaaataagtatgaatacacagtgtggcagtgttgtggtttttgttgttgtttttcctctccttttgagaattttcttttgtaaaagaaaaatattttttaaaccgaaatctgtggatgaaatagaagctggagccctcctcttggaatattcagcctaagaacctcataggactatgaattcacccgaaattctcatttgccatcaggccgagcttttaaagaaaaattgttctctaaccaggattgtaacaaaagtgtaaatactgtttcagagttgagagttggtggtgcaaatatgtatataatgaactgtatttttacaatgatcgccgcatgactatttcacaccctttttatactccatatctgtcttccagaaacgtcacctgcctttctcctgtggtctcttaatccagtaattgtattactgccattaaaggatgcagttattttaaaaaaaaaaaaaaaaaaaaaaaaaaaaaaaaaaaaaaaaaaaaaaaaaaaaaaaaaaaaaaaaaaaaaa

SEQ ID NO: 24207 - DNA, 2671 bp, Homo Sapiens
aatatgtgtgtgtctgtgtgtgtgtatatatgtatgtggcggagagggagagagtggggaaggagagcagtgttatcatacatagagaggctaaatgtgtcccatccctcactgtcagctttataaaggagtttgactccatccacagaagaatgttttataagactaggaaaacacgttgaaaactaggataaacagcaacaaaaatcaactaaatatgttgttactgttgctaaggattttctccttagaataatttaggatttttaaaaatttctgtttgccaaatgctgtagataaatggccagattcttcctatccctaggattcctttattattttttttcacagattttgagaacaagggggagagatagtatggaagattaagattccattaatcttatagaactgtgttgtcacccaaattcctgcttgtttgaacatggcatcttcatagattcaggattcactaccctctatagctggatcttgaaaattatctggccagataattttgcatctgcttggatgattgtagactgagatgtgagtggaggataaagtattagacttttgctgagtaactgccaaccaagaagtatttatcggacacttactaggtgcctaggattgtatcagagggaatatgaaatgtgtccctgccctacctagttttaacgacagaatatctattaaaggctacttagctgaagggtaagggtgacaggtctaggggaagctttgggaggtggtgtgctgtgacagaaaaagtggcagagtagggacgagagacctgcattctagccctgtttctgtcacttgctctgtacacttagacaacagcttgacctcttgagctttagtttcctcctctgcataatgagagggttagactactgaattgtatgggaaaaaaatacaaattcctgggtcctaggccatgcctgctgaatccgactgttcaggaagaggcctaggaaatctgtgagggaatccccaggggaatctcgtgaccagccaggtgtgaaatctgctaactggaagatctcaaagcttccttcactttttgtgattttgtggtcatgtaacgttactgtattattctacgtaaatgtgggtacttggatgtttatcatactgtttctctgtgtttacatactaatttgtgtaagaaatgcattttagtctgtgtacctcaacctgctgtttgtttcctagaggtgttagtagtctttaaatacaagtaagacttaagaggatatttgatgttatttacctggatattttcttccccttttatttatttagaggaaattgagattctaggagccaaaaaaatgaaaacaaaattctaaggcaaagttaaagaaaaaaattacattatttcttaccatttgctactttataatgaaaatttaaaaattatatgggaagatttttctctgggataacaaatccttgtcataaagtaagaggtctttttaaagtaggtaggctataaggcctgtaatttaaaataatactcctttctctagggtttggtgcaattctccattaatgaagataacatttgaattccccaaagcaggtgaggagtcggggaggagaaagcgatgttaaaatgaaaactcactgcaaaagaggaggcagaggaagaaggaatgtaaaccccttaaagcagatgtgtgtggggccttatgaagaccaggattctgcgggtgtcaggggattgcccctcttgacagagactagggttttagactgaggcttcctgcagggtgttcgcattgcccttctccgttccccttcagacctttctggggagaagaggtgggaggaggggagaaagactgttcatcttattctgaatcctggagcagctgaaggttttctcttgagtcaggatgcagtggtaatgcattaaccagcaagtgtggccaaggataatgaaaaagtgggaaaggaaggtcctcctcctccctgattgtagcatccagcagtctctgtagccaggttactcaagaaccacatttgatttcctggccctttgccttggcagtgatggcatttttatttcactgtgttttaaagtcttcatttatttttataacatgggttagggagaagggccacaaatggagggattgtcctttcaagcaccacagcttcagataaaattagtactttcaaatattgtccactttaacttaaaaaattctagagggattatattggagactcaactgcccttggttttagtttataaaatggcctagtactgtggaattttaattttagaaagtcttagcatcagatcataaacattcattaaaagaactcacatcccatctgaaacttcccaggggagttgggattcttagtagattggtagaaaggggctcattttctactgcatttcccatttttggtatcttgttcagcatgttttatttttatttcttgtctgcagaacatcctatatttatgagaacattctttaagaagaccaccacatagaataccccttcctatcagctcgctctgatttagccttaattttgttaaattttttagagatgaatgaagtgctgctgtggaaagaaatgtacatatactatttctgtatcattaaaattacatttttatggttcaaaaaaaaaaaaaaaaa

SEQ ID NO: 24208 - DNA, 2019 bp, Homo Sapiens
atccctttaattaaagggagcaaaggggcgttccacatggacagaggcttggaccgaggcctggtcacagcagcgagcatccagggtttgcagggacgatgttacagactctgttttctgcctggcgtttcacttgtgtctgctcctagcctgtgctctgccagcagcacagacatctgctccatcagacctcttccattttgcacagggagtgcaggaggtgaatgttcactttctgttctccagtgtcactgttctgtttccacgggatggaaagcgcatgggcctgtgtccattgtagatttccttctagatttctgtgtacacacacttgattgttctggatgaatgtcttttttaatactccgaaaatttcatcatctaagaaaatgattccatacaaataactcagcacacaagtgacccaggacatatgcctgccaaagggatgtgttagaaggctgccttctcatgcgcattgtcacttggatcttgtggtgaggacggccccatctttcttgccacagattgaggccacttttgagcaagggagatcctggagttaagacaggtgttgggggcagcctgtattttaccctaggggcaggtctgcatggtgaccccacattgcactggtaaaccatttgagtcccactcttcatcctggaagtgggaactggagtcccacccacagtgcattcagaaagcatgctgtgtgggggctgcttctcaggaggccaggcccttctgagcggaaccgtcctggagagagcctgccctcgtttccaggctgcagccgtaacgcactttctcccaggctgagggcgggtgttctggggtgtctgccctctgtcggccctgcttcctgccaggacgtggcctcttccgatccttttctctcagacactggaggtctcttctgccattgtgctggtcccatcccaagaattgtaggacagagaccacactgggtcggcggacacaaagtccatccaggacccaggccgcagagggagcaggaagagatgctgatagtttgatctagaaaccagcagctactggctcaaattcaggttctggcgtcaaatagcgacatttccagtttctcttaaaaaccgtgtttggtttcagttgggataggcttgttttgtctgttgaaaatgtttctagttttttttctttcatttttctctcattccatttctgccttaactttagtttgttcacagggaggcaaagctgacatgaaccttttgtcgtgggacttcaggccacattggcttgaaggcattcgtttccttctggggtggggacaggccctcatggcaggcttgttcccgtggctctgagcgaggcctcttcctgctgggctcccagactcctgcatccaggcccccaccttctcggcttctggtttttctttctttttggtagaacacaacatctaccattcagttaaaccttctttatctcctcctctggcatccatttttccaaagaagagtcgagtcctctgaggtctgtgcttgaaaaccgtccgaaggcattcttgttagctttgcttttctccccatatcccaaggcgaagcgctgagattcttccatctaaaaaaccctcgacccgaaaccctcaccagataaactacagtttgtttaggaggccctgaccttcatggtgtctttgaagcccaaccactcggtttccttcggattttcctccctttgttcggggtttggtttggctcctctgtgtgtgtccgtatcttgttcggtgtcctcgaggttgagcttcactccactgcggcagaggcagcgtgcacactcggatttgctacgtttctatatatcttgaagctaaatgtatatatgagtagtttgccatgagataacacagtgtaaacagtagacacccagaaatcgtgacttctgtgttctctccatttgagtattttgtaatttttttgaaatatttgtggacataaataaaaccaagctacactacaaaaaaaaaaaaaaaaa

SEQ ID NO: 24209 - DNA, 2114 bp, Homo Sapiens
gggtcacccaaatattaaaaagctacatctttagtctagttctgtattttaccagaggcacatttagaagaaaaacaaaagggtcacccaaatactaaattgttttcaaccattacagtaaatagagccaaacctagaaatttcaaaaacaatccattttatattccagaaatctcctttatccatgtgctaatcatccagaacacaattttctaaaaatagtaagacaacagtttcacattaatcataacttttttaattaacaagtagtgaatcggacactttaagatattgtttactacatactgaaataaacagatctgtttaaattcagaaacccaaacatttacagtaaaatgtgcttacacataaatatgaccaaatttatttaaagcccctattagatagatcctaagtacatgcaattaccatgtaaaaacaagaccatgaagttgatgtaaaaaatgacaaaatcactaagtcaccaaaactagaaaaaaaaaaatgaaatggaaactgagaaaagacagttaataaaacataaggaacctaacaaagcagctttaaaaataggccatactaatccttccattttcaaaagttcttatcaagtaattccaaaaactgccatttataaaatgacattctaaaaatctacacttggaatttcaaagtatctcaattcagaaagctttgactactgtttctccccagcccacaatttcaaataatgcaggaaaagtattgacgtaaggaagaaaatactccaacagaatgttatagtttttagaaaaatgaacttactgctttccagaaccttttaagacccacagtcagcattaacaatcatttttcctattttcatccattattttccaatatcatgttagagatgaataaattctttgagcccataactaaaagatcaacaaacctggttttattatgacaccatatttttgtcattggtactgcacaaaattatatacaaagaaatatatacaaaatgttcaagtattagttaaatttcaattcaaggcttctgtttcaaaaaagctacatttaacatatttcataaagatagcacaaattagtcatttcaaataatctttccaactacttttggtttatatatatatatatatatgtatatatatatataattcagtaggcactaaaaacccatgcagctgcattgtgaggggcttgctcctgcccttaggtataagcaggttcatcactccaatttgtgagtttggctactacccattcatgctcaagtgcagtagtagatgattttacaaaatatgctgtgatgcactggaaaccaaagaccaattcaggtctcaaatcgtattatctagcaacaaaacatttacagttgtgcaagaacaaggattccattttcataaccaaataacaaaataaaacattttatgtgtaagataacttacatctttggactgctggaaaatactttttaattatgaacatgttaaaaataaaaaacagcagaagccctgatattacctctttttcctcatttcttatactaccttttaaaataaagcaggaaatgtggccagcagctggtcccgtctcttctgccccaacagctgtatccacaggttgtgaggcgggaacgactgttctgtaacccctacaacggagcctggcaggaaggaaatcacctaaaaaagaaaattttaagagaagacgacgccttccgggcgcacgccgagcagaactccaccgacaccttatccttgtccacatggagacagactcctcccgccgagtcgtcctcttccagcaggtcctgcttctgctttcccaccggcagagcgtagtcgtggtcaccggcgggcgagtctctgaagagcgaggtggtcagccgcagtcccacgccgctcagccggctcagcaagcgagccagtccagtctcgttggctaagactgcccgtaggtagcgactctcctcctgcagtgcctgtacgcgtttgcccagctcccgattctcggcccgcagctcctggttctcggctgccagaccccggactcgactctccagccccatcacgtactccttcttcttcagtcgattaaggcgggca

SEQ ID NO: 24210 - DNA, 1826 bp, Homo Sapiens
ccccgcggaaagataataaatcatcattgatcaagatgtcttcagcacctgagcctccaacattcaaaaaggaaccacccaaagagaaagagtttcaaagcccagggctcagaggggtgcgcacaacaaccttatttcgtgctgtgaatccagagctcttcattaaacctaacaaacctgtaatggctttcggattggtaactctttcactttgcgtggcatatattggttatctacatgcaatacaagagaataaaaaggacctctatgaagctattgatagtgaggggcacagttatatgaggcggaaaacatccaaatgggattagtagtgctggttagtgcagatggacctttattaaaggttctgaaatcttcaaatgaaagaccttgtgagtgtacagtatcatgtttcttgttctagaacatgctaatgaagagagaagatagcagttgcaaccagacaactgtcgtaaattttgtcctttcacagctgcagccattatctcattctttttccacagagtgagcgtcataatatttttctttccttacctcttataaaagtgccatgagaatggaagttgtttttgttaattattaaattctgtataataaaagtacccatgctgttaaatttgcatgatgttttaaatattttaagatgaattatgccggtgcagctgtcgtgaaagtttacttgtgttttgctacttgcaaaggaaatgttcatgttctccctggcatagaacctatatttttaaagaaagataaatagaaattttaaggcctgaagtcaatattaaaaatatgagatatgagaaactgagttggctctgacaagtagtttttatagtgtcacaaatggttcatatatttcagtttccattttagctatttttgggacagaattttattttaatggaaaagatccttccactcagctactaaaataaggattaagaatatcccagagtaattggagtttttctttaaaaaaaaaaaaaaagtatgttttactgaggtatgatgattttgactacaactaaatgttatctattttagtgtttatgttaattaatgttaattaattttgtttatgttaatttgtgttaattaatgttactgtaatgttataaacataagaccaagtgttcttatagttatttaaaaactacaactactcaatggataaggaatagataaggtctccttattgtaccttttttttcttttgaagtttatatgccagcaggcctttttgtttttttccttttcagaatgtttcttattctctgaagcatcagcattttgaagtgtcttttatggaagtggggacagaaatgggggtaaaaatgagtgtaaacaaagcctagccctacggtcagcacccactggaggtgagaagcagaatggccttggttgtcctggcacctggcccggggcctaggacagaggtcaaggctaggcccctgtgtctggccagattctgccttatagaattcaaatctttcttacaaggtttctggacccgtttcatttctagatatatacctaattctccaaatcattgtcattgggcctcagtagtaaatctcacctctgaagtcttgcttcagtcgctattaatattaccaagtaataataacagcacaggcagagtttatcataatgttatttttaatttgtcatactttattatggttttgtaaggtacatgaaaatgtaattatgtgtgattggtaggtattaaagaacttagctaattgaatttacatggaactaaataaaatctttactactgagccccaaaaaaaaaaaaaaaa

SEQ ID NO: 24211 - DNA, 1655 bp, Homo Sapiens
gcgtggcgacgcgtggaaattctgcctttcctctttttctatttatctgattattattattattattattattttctttgagacagagtctcactctgttgcccaggctggagtgcaatggcgcaatctcggctcactgcaacctccgcctcccaggttcaagcgattctcctgcctcagcttcccgagtagctgggattacaggtgcccaccaccacgcccagctaatttttgtatttttagcagagacggggtttcgccatgttggccaggctggtttcgaactcctgacctcaggtgatccgcctgcctcagcctcccaaactgctgggattataggcatgagccacctcgccagccctatttatctgattatttaagtaaaactttaataaaccatgacctacattttctatgcaattttaagatactcagagttaatattttaatattgaggttcttgatttttttaatgatcagctttcaaattatatttcagtatatactctgagtctacgtgtatgctacaaaaggtgaaatgaagttagcttatttttcagtgagtttaggctatattaagagttaggtaagttaggtaagggtgaaactgctttggggcccagactgcgctggaatgtactgtttaaattcaaaggtaattgatggccagtgttcagttgctctatttgtaacgtttgcatgttggtctggctgaagtatcaggaaaacacaaaattcatgaaaatagcaccttttataattttatacttttataaagcacttgttaaagaagtatagcaaatttctatgtattttaacatacaagtcgctgcattttaatgttcatttttggtatagctatggtaacttataatagtcatttttatattcataacttgttttctgaaagatatagtcattattaaaataaacattcatgtaaatggagtaaatcataggggaatcaatcgtaataaataccttataaattataaacttgtttagatactagatttctataaccataaattttatactgtaaagtctgtttaaaatagggtttaatgaagttattttaatttttagagactcccctctaaataatttactcctacattgtaaatacattgatgccaacaaaattccaactgctactaacaaaggtttggttggtgataagctaataacagctactttgtgtaggaggtaaatatgtgtactggagggggtaaaaatccatttaggttatggcaaagatgggaatcaaactgtaaaactcatagccccataaaattaatattctttgttaagtgccagagggtttaagagaacttcttgcttagagtttattgataataataatgcttcagaatatcccatttaaatgtacagtgtaaatatgtaaaatattttacttcccaggcaagtttgtggctgtattgccacttagtggctctttgtgactggcagttctgtatatctgaaacaaataagctgtaagcacttttgttaaaactttgtcaaataatccttttatgtacttgttctcagacctgttctctggttatgaaatgtgttaaagacaaggtgcaaatttaaaacaatgcctgtattgaaataaatgacttaaacagaaaaaaaaaaaaaaaaaaaaa

SEQ ID NO: 24212 - DNA, 1503 bp, Homo Sapiens
cttaacacccttcctgaggttcccttcacccctctctcttgccttccttccctttccctttcttcctgactagccccaagtcccttcatttgcatctgctatgcaatagtccctctcctttccttcttcttccctcagatttagctgatccttcctcccaccctggccttcctttcctctttcctcctcactctccccgtcatgctccctctgccccgccctcaaaaaaaaaaaaaaaaaaaaaaaaaaaaaaaaaaaaaacaacagcacctgtccaggcttccttaggtacatcttctttgtatccattgggaggctctgagactggccccacttggtcctaagaatcccaaggtctttgggagcgtccagcatgttaattagcgtatcattacatactgctatccctttccatttctttttgttccatcactcttctctcaacctgtgtttctttttttactgaggagttagtccccattagttcttgtatcacattttcatttgcacgacattactcgcaggtggtggggagcctgggcttttggggaaccaggctgctctggtccccagcattgcctcctcctagcccctctagtccagtttgcctcccttaccctcattttccaaacctcttgtaccctcctctccctccccagctggtatgtaagtgtcttgaagttcagtatgttatgatggaccaataattctgccacttcgggtttctccctacattcctgctccccagttttcatgtggggtactcaactgacattcccatggggtttccctcccatctgcctgatccacctcctcctcccaccaggagagttgggggttggccacaattgatctcttgtgagaggggtggctaccagtgtgtgtgtgggggtcatcactgccttggggaggagtggggcagggcagagaatccccccaattcctgcctgaaatctctggcctcacccctgctgggggttggactgaaaaccctcctccccaatttggggggtgttgccccatcactgcccagctcctctgactgccccccctgaatttagggtgggggtactagtcactgccaatgtgtgtatgggacttgctggaaaacggggatgcttgcccctctccaggactattgagcccagagagagctgtcctctcattgggtgaactgattgaggaagggtctattgtctttttaaatggcacaattttaagggtttgagggtacagtcccttaacctgccacgggagggggcccccaaactttcttccccccacacttctggttttctgtgtggagggggagcagggatatctaagctgtggtgtgaaagggtaggagagatgctggaggtgggggtgctgtgttctagaccccccatattatcccagtgtcccctgcccccctcttcccccaccccatgcccccaattctgtggcgcatccagattgtgaaaatgtacaataaatgtgtaatgagtaaccaaaaaaaaaaaa

SEQ ID NO: 24213 - DNA, 3565 bp, Homo Sapiens
ccggccacggtgcttccgggttctggtgtaggagcggcgtcttctcgcgcggatggtgaagctgaatttggtacgctggaccctcggacagacagcaagagagagacaagcccgaggcctgacttctagcactcctgagtttgagccctatgagcagtggaacctagggaccaccaaggatccagatataattctttcctcagtaatagaaaaaagaatctgggatctaagaagatacctactcattttctaagtgactggccatgtcattgtcccacttataccgggatggggaaggccgcattgatgatgatgatgacgagcgggagaactttgagatcactgactgggatctccagaatgagttcaaccccaaccgacagcgccactggcagaccaaggaagaagccacctacggggtgtgggcagagcgagactcggatgatgagaggcccagctttggaggcaaacgggcccgtgactactctgcgccagtcaacttcatcagcgcagggctcaagaaaggggcagcggaggaggcagagttggaagattctgatgacgaagagaaacctgttaagcaggacgactttcctaaggattttggaccaaggaagctaaaaacgggtggcaattttaagcccagccagaaaggttttgcaggaggaaccaaatctttcatggacttcggcagctgggaaagacacacaaaaggaattggacagaagcttcttcagaagatgggctacgtccctggacggggcctcgggaagaatgcacaaggtatcattaacccaattgaagccaagcagagaaagggaaaaggtgctgtgggggcttatggatccgagcgcaccactcagtccatgcaagacttccctgtggttgactcagaggaagaagctgaagaggagtttcagaaggagctgagccagtggaggaaagacccaagtggaagcaagaagaagcccaaatactcttacaagaccgtggaagagttgaaggccaagggcaggattagcaagaagctcactgctccccagaaggaactttctcaagtcaaggtcatagacatgacaggccgggagcagaaggtctactacagctacagtcagatcagccacaagcacaacgttcccgatgatgggctgccgctacagtcccaacagctgccacagtctggcaaagaggccaaggcccccggcttcgcgctgcccgagctggagcacaacctgcagctgctcatcgacctcacggagcaggagatcatccagaatgaccggcagctacagtatgagcgggacatggtggtcaacctcttccacgagctggagaagatgaccgaggtcctggaccacgaggagcgggtcatctcgaacctcagcaaggtcctggagatggtggaggagtgcgagcggcggatgcagcccgactgcagcaaccccctcaccctggacgagtgtgcccgcatcttcgaaaccctgcaggacaagtactatgaggagtacaggatgtccgaccgtgtggaccttgctgtggccatcgtctatccactcatgaaggagtacttcaaggagtgggatcccctcaaagactgcacttatggcaccgagatcatctctaagtggaaaagcctcctagagaatgaccagctcttgtcccatggcggacaggacctctcagcagatgcctttcacaggttgatatgggaagtctggatgccttttgttcgaaatattgtcacccagtggcagccaaggaactgtgacccgatggtggactttttggatagttgggtgcacattattcctgtgtggatcttagataacatactggaccaactcatcttccccaagctgcaaaaggaggtggaaaactggaacccgctcacagacactgttcccatccactcttggatccacccatggctgccccttatgcaggcacggctggagccactctattcccccatccgtagtaagctgtccagcgccctgcagaagtggcaccccagcgactcctctgccaagctcatcctccagccctggaaggatgtcttcactcctggctcctgggaagcattcatggtcaaaaacatagtgcccaagctggggatgtgtcttggtgagctagtcattaacccccaccagcagcacatggatgcattctattgggtgattgactgggaagggatgatctctgtctctagcctggtgggacttcttgaaaagcacttcttccccaagtggcttcaggtgctgtgctcttggctcagtaacagcccaaattatgaggagatcaccaagtggtacctgggttggaagtcgatgttctcagaccaagtgctggcacatccatctgtcaaggacaaatttaatgaggcacttgatatcatgaaccgggcggtgtcctccaacgttggtgcctacatgcagccaggagcacgggagaacattgcctatctcacccacacggagcggaggaaggacttccagtacgaggccatgcaggagaggcgggaggctgagaacatggctcagaggggcattggcgtggccgctagctctgtgcccatgaactttaaggacctcattgagaccaaggctgaggagcacaacattgtcttcatgcccgtcattgggaagcgacacgaagggaagcagctctacacctttggccgcattgtgatctacatcgaccggggagtggtctttgtccagggcgagaagacgtgggtgcccacctcactgcagagcctgatcgacatggccaagtgaactgtggcaggtccagaaccagtcagagacttgcccctaagagggatgtactgtaaataaacagtatttttagatcaccttcaaaagggtaacttctttactcaggagctactccacatcaggccaggtcatgagggaaggatgtaaaatgggacaatgccacgtagggcaggaatctttataccaagtcctcatgtggggtatcgtcctcaaaacaggacagccaagttgatgttctttcctggcaaaggagttctctgtagttcctccatagcagccttccctttagtctctggtggcagcttctacctcagccaacactgagtacctcacaacgagttcagtcagtagcagaaggatcttctctcttgttcctgatgatttcaaggtcctcacagtcctgataatctggttcttcccgaaactcccaaatatctatggagagctgttctagcttttgcacagggaaccagtggacagaggtatcattaaatatgtccatgtattgtgaagtctgaggaaactcaagctcctccagtccttttaaaatctgagcagaaaaattcaagtataaaaacttcagatagtcacagtaatccccactcttctgggataaatttccactttacttgtcatccccactttactttttaaaaaaataacaaatagggtattttgatttaaatgcttttgcacaatgaattgggcgccccaaggacagtggatatcatggactgtgatactaagaataaaggaaataaggaaaaaactaagagatgcattaaaga

SEQ ID NO: 24214 - DNA, 2367 bp, Homo Sapiens
aataggaaagctgcaaaacactgtggagtgctcccgtgtaaataaaaagaggaaaaaagtttctcaagtcgccgctgcacgacgtctggccggcgctggagcgggggtctgcgctctcccgagcggccgcgcgctggactttattgtgccgcaaccagccccagttcccattgtttgtgtttttttcaaaatatggcaaaggttcaggtgaacaatgtagtggtgctggataacccttctcctttctacaacccgttccagttcgagatcaccttcgagtgcatcgaggacctgtctgaagacttggaatggaaaattatctatgtgggctctgcagaaagtgaagaatacgatcaagttttagactctgttttagtgggtcctgttcccgcaggaaggcatatgtttgtatttcaggctgatgcacctaatccaggactcattccagatgcagatgcagtaggcgtaactgttgtgctaattacttgtacctatcgaggacaagaatttattagagttggctattatgtaaataatgaatatactgagacagaattaagggaaaatccaccagtaaaaccagacttttctaagcttcaaaggaatattttggcatctaatcccagggtcacaagattccacattaattgggaagataacacagaaaaactggaagatgcagagagcagtaatccaaatctacagtcacttctttcaacagatgcattaccttcagcatcaaagggatggtccacatcagaaaactcactaaatgtcatgttagaatcccacatggactgcatgtgaccacctaccatccctttagtacaaattaagctattaaaaatacacagaactatttccctgaattccgtaagtacatagtcaaaacacaatgtgaagaatttgtttaaaaacatcctgtagaaagtttataagaaaaccagtatttgaacaaattgtggaatataaatacaactatttttaagtaatttttttctctaatgtgttattttatttgttctgaaactaatctgattaaagcatatatattattttcttctcctttatatgtaatgaaagcacttataaagaaacaggaatcattagaccaggttgtaaagatgtcttggcctcccagacagtctttggaccactattttactggcctttgaaagaacaaagtttacttcaactaaaatgtttcttcctgtgaagacatatggtatcattttaatttaaggggcagatttccattcttttttggcatgtccttaaaaagaggatttgaaatcaactatatgctaccaagaactttaggatccaattttccaagccaccgtgaagcctcttatggctactattatagttcatgagatgttggacagcatttggtttgtttggtaagagaagaacaaatatggctaattgttaataaggtcccctggctatggtttttgttcttataacagagtttagaatatcagagcatttcttgaatcatacatcattattgtccagtgaattcaagaccgaatacaatatcgggagaaaatacaaactccctgtgtttaagaataggggattataatggctcaaattggttcatttgatttctaaaaataccatgacctttaaaaattcttttaatagatcatgttattggcagtatttatataaaaaccatggatttagaaaggtatatttagctttattataatagatacgttactattttggaaatatatatattttcacacctgtagtactcttccccatttcctctgacactcatgcagaatgagatcaggcatatttgtggttgacatactctagatagcttttccaacaaatctttgaaaagcaatcttggaaaggaattcattaactaaatggggtaaaaggtttctttttctttgagagttaagtccttcctcaaaaaattttcttatgctccataaaattgaggtagaatactttcattattcttgcagctaagcaagacagccatatgatgcaggttatgcagtgccttcatatctaaaacttttatactgcactttttaaagcttttatgttgaggaaaggaaaagggcatttgtctaaacatggattctgagttgtatatatttcctatcattctaaaaaagtgaatttgtgaagcaaagttttgccagatgttaaactttgaatttaatataccagattattaaaatattgtccattaactagttcatagattttaaaagtaaaatacttctgactgttaaaactatataaagaaaatctcatttgtctaattgcaattaaaagaaaaatgttaaaatattaaaatgaaaataaaagcattactttccaaaaaaaaaa

SEQ ID NO: 24215 - DNA, 2381 bp, Homo Sapiens
ttttgagcagaggcttcctaggctccgtagaaatttgcatacagcttccacttcctgcttcagagcctgttcttctacttacctgggcccggagaaggtggagggagacgagaagccgccgagagccgactaccctccgggcccagtctgtctgtccgtggtggatctaagaaactagaatgaaccgaagcattcctgtggaggttgatgaatcagaaccatacccaagtcagttgctgaaaccaatcccagaatattccccggaagaggaatcagaaccacctgctccaaatataaggaacatggcacccaacagcttgtctgcacccacaatgcttcacaattcctccggagacttttctcaagctcactcaaccctgaaacttgcaaatcaccagcggcctgtatcccggcaggtcacctgcctgcgcactcaagttctggaggacagtgaagacagtttctgcaggagacacccaggcctgggcaaagctttcccttctgggtgctctgcagtcagcgagcctgcgtctgagtctgtggttggagccctccctgcagagcatcagttttcatttatggaaaaacgtaatcaatggctggtatctcagctttcagcggcttctcctgacactggccatgactcagacaaatcagaccaaagtttacctaatgcctcagcagactccttgggcggtagccaggagatggtgcaacggccccagcctcacaggaaccgagcaggcctggatctgccaaccatagacacgggatatgattcccagccccaggatgtcctgggcatcaggcagctggaaaggcccctgcccctcacctccgtgtgttacccccaggacctccccagacctctcaggtccagggagttccctcagtttgaacctcagaggtatccagcatgtgcacagatgctgcctcccaatctttccccacatgctccatggaactatcattaccattgtcctggaagtcccgatcaccaggtgccatatggccatgactaccctcgagcagcctaccagcaagtgatccagccggctctgcctgggcagcccctgcctggagccagtgtgagaggcctgcaccctgtgcagaaggttatcctgaattatcccagcccctgggaccaagaagagaggcccgcacagagagactgctcctttccggggcttccaaggcaccaggaccagccacatcaccagccacctaatagagctggtgctcctggggagtccttggagtgccctgcagagctgagaccacaggttccccagcctccgtccccagctgctgtgcctagaccccctagcaaccctccagccagaggaactctaaaaacaagcaatttgccagaagaattgcggaaagtctttatcacttattcgatggacacagctatggaggtggtgaaattcgtgaactttttgttggtaaatggcttccaaactgcaattgacatatttgaggatagaatccgaggcattgatatcattaaatggatggagcgctaccttagggataagaccgtgatgataatcgtagcaatcagccccaaatacaaacaggacgtggaaggcgctgagtcgcagctggacgaggatgagcatggcttacatactaagtacattcatcgaatgatgcagattgagttcataaaacaaggaagcatgaatttcagattcatccctgtgctcttcccaaatgctaagaaggagcatgtgcccacctggcttcagaacactcatgtctacagctggcccaagaataaaaaaaacatcctgctgcggctgctgagagaggaagagtatgtggctcctccacgggggcctctgcccacccttcaggtggttcccttgtgacaccgttcatccccagatcactgaggccaggccatgtttggggccttgttctgacagcattctggctgaggctggtcggtagcactcctggctggtttttttctgttcctccccgagaggccctctggcccccaggaaacctgttgtgcagagctcttccccggagacctccacacaccctggctttgaagtggagtctgtgactgctctgcattctctgcttttaaaaaaaccattgcaggtgccagtgtcccatatgttcctcctgacagtttgatgtgtccattctgggcctctcagtgcttagcaagtagataatgtaagggatgtggcagcaaatggaaatgactacaaacactctcctatcaatcacttcaggctacttttatgagttagccagatgcttgtgtatcctcagaccaaactgattcatgtacaaataataaaatgtttactcttttgtaaaaaaaaaaaaaaaaaaaaaaagaaaaaaaaaaaaaaaaa

SEQ ID NO: 24216 - DNA, 3958 bp, Homo Sapiens
ggggggagacgagcaggtccgcgacgctgctgctgtgcctgctgggctgccacgtctggaaggcggtgacaagacgctgcgggagcccggcgccggagcccaagaggtgacgttaaaggtgcacatcagcgacgccagcacccaccagcccgtagcagatgcgctcatcgagatcttcaccaaccaggcctccatagcctctggcacctcggggactgatggcgtcgcctttatcaagttccagtataagctgggcagtcagttgattgtcaccgcctcgaagcatgcctacgtgccaaactctgccccatggaagccaatccggttacctgtattttcctctctgagccttggcctgcttccagaacgctctgccactctaatggtatatgaagatgtcgtccaaatagtatcaggattccaaggtgcccggccacagcctcgcgttcatttccagagaagggctctgaggttgcctgagaacaccagctacagtgacctgaccgcgtttctcacggccgccagctccccttcggaggtggacagttttccttatttgcgaggattagacggaaatggaacaggaaacagcaccaggcatgacctgaccccagtcacagccgtcagcgtccacttgctgagcagtaatggaacgccggtgctggtggatggtcccatctatgtcactgtgcccctggccacgcagagcagcctgaggcacaatgcctatgtcgcggcgtggcggtttgaccagaagctgggaacgtggctgaagagcggtctgggtcttgtgcaccaggaaggcagccagctgacgtggacatacattgccccccagttggggtactgggtggccgccatgtcccctcccatcccaggtcccgttgtaacacaggacattaccacgtatcacacggtgtttcttttggccattttaggaggaatggctttcatacttttggttttgctgtgtctccttttatattattgcaggaggaagtgcttgaaacctcgtcagcaccacagaaaactgcagctccctgcaggactggagagttccaaaagagaccagtccacgtccatgtcacacattaacttgctgttttcacgccgagcgtcagaattccctggcccgctgtccgtcaccagccacggccgccccgaggcccccggcacgaaggaactgatgagtggagtccatttggaaatgatgtctccgggcggcgaaggggacctgcacacccccatgctcaagctctcctacagcacctcccaggaatttagctcccgggaggagctcctctcttgcaaggaagaggataaaagccagatctcctttgataacctcactccaagtgggacgctggggaaagactaccataagtcagtggaggttttttccttaaaggcaagaaaatctatggaaagagaaggctacgagtcctcgggcatgatgactacaggggtagttacaacaccgtgctctcacagcctttatttgaaaagcaggacagagaaggtccagcctccacgggaagcaaactcaccattcaggaacatctgtaccccgcgccttcatcacctgagaaagaacagctgctggaccgcagacccactgaatgtatgatgtcgcgatcagtagatcacctcgagagacctacgtccttcccacggcccggccagttaatctgctgcagttctgtcgaccaggtcaatgacagcgtttacaggaaagtactgcctgccttggtcatcccggctcattatatgaaactccccggggaccactcctatgtcagccagcccctcgtcgtcccggctgatcagcagcttgagatagaaagactacaggctgagctgtccaatccccatgccgggatcttcccacacccgtcctcacagatccagccccagcccctgtcttcccaggccatctctcagcagcacctgcaggatgcgggcacccgggagtggagccctcagaacgcatccatgtcggagtctctctccatcccagcttccctgaacgacgcggctttggctcagatgaacagtgaggtgcagctcctgactgaaaaggccctgatggagcttgggggtgggaagccgcttccgcacacccgggcgtggttcgtctccttggatggcaggtccaacgctcacgttagacattcatacattgatctccaaagagctggaaggaacggaagtaatgatgccagtttggactctggcgtagatatgaatgaaccaaaatcagcccggaagggaaggggagatgctttgtctctgcagcagaactacccgcccgtccaagagcaccagcagaaagagcctcgagccccagacagcacggcctacacgcagctcgtgtacctggatgacgtggaacagagtggtagcgaatgtgggaccacggtctgtacccccgaggacagtgccctgcgatgcttgttggaggggtcgagtcggagaagtggtggccagctgcccagcctgcaggaggagacgaccagacggactgcggatgccccctcggagccagcagccagcccccaccagagaagatctgcccacgaggaagaggaagacgatgatgatgatgaccaaggagaagacaagaaaagcccctggcagaaacgggaggagaggcccctgatggcgtttaacattaaatgagctatcgcagacccacctgactgtggaatataaaattgccaaatatcctttctcatggaagcgcgtacccgttcgtggaggaaacggaacggcagcccagccgtgggacggacgtggacgtttactgcattcctgtttgccgtgtaaatgttagaaaggaattaaagttattactcggaataaaggatgactttggcggatgtcgcccctgcaaggaggtggctgaaagtggtgtccagatgtccttccgaggactcggcgtatccgccaccagggacattaagaaaccgcacgtgatgtcgctatgctctaacgatcacctcagttctccctcggattctgggaacagatgaaactttttgcatcgcttgagtcatttttatcacaataatcctactgtgaagctgtcgttgagaacttaggttggcacgtagcgtctcaaggtatgcgttctctcaaaggaaagctatgcatcgctgcttctttgtctgattttgcttagattttgctttggttaggttgcgttttggggtttgcctttttttgttgtcgcttaaatgcaatttggttgtaaagatttgattcctttgtgttcatctgttccgcttctcagcggtccatctcagcgtctcccttcaggaaccgctgagtgtcctctcttaacatccaagccttttaatgaaatcgtactgaaatctgtatcagctaagagtcctccaatcctggtcccattaactccaagtgcctttttgtcagtgacaacagacagtccctcgctttttgttgttgttggttttcttaacccctttaatggaactgcctggattttatacagttattaaaggatgtctcttttgctttaaactgcatgctgccaagtgccatttggggtcagcatcctcgtttcaacacagtgtgctctctagttatcatgtgtaacgtgggttctgtttagcgaagatagactagaggacacgttagagatgcccttccctgctccatccctgtggcaccattatggttttttggctgtttgtatatacggttacgtattaactctggaatcctatgggctcatcttgctcacccaatgtgggagtctggtttgagcaagcgagctgaatgtgactattaaaaaaaatttaaaaaaaaaaaagaaaatcttatgtactatccaaaagtgccagaatgactcttctgtgcattcttcttaaagagctgcttggttatccaaaaatgaaaattcaaaataaactctgaaaaaaaaaaaaaaaaaaaa

SEQ ID NO: 24217 - DNA, 3204 bp, Homo Sapiens
gaagcacaaaaacaaataagcaaaacttatacaaacagcatgggggttgggggtgagggacttaaaagtagacatgctacacctaatgtcaagaagcagcttggtttcctttgccagatatccttgtgacgacatggattgtagattcaatggtcctacacagggtatctaaaatgtcatgttgctgcatatgactaaagagtcctctggaatggccacaactgagagataaagcaacctcagggtcctgggagggcaaagcttggccatcacagcttctcaagtcagctaagtcagacagaactgcagagatagaagtagaagggaactcagattcttcctcagctagggtagaatccttggaacagtggaggtctttaaattctttacaatcgtcatatctaccattgttggactgttcttctgcatgctgtgacctgatatttgacatgtcttctgaaaacgaagatggaacttccattcggtattctttaacagaactattttcaggggaaggaagatcttgctcagttcctggatcaataattgaggagtctctggtctcattgtcagaagtgctcgttggggtcaggacctccctggtttctgttttcatgtcactgatgcagctgtctacagtgtgctcctcatcactgctaacacgccgccttttaatgggagttgctccttcatcatctgtgaaaacacatgccaaaagggaaacttctctgaaagtcattaagatcacgttagggggggatgtgggaagttaattttgtttctagcatttatatttaggaggttcagctgaacacacaactcttaaaccagttacaccaagtgtattactccctcctcccaccctaaaggtaatgatagtagtccataaagctaacctttagtttttctttctttggcttcttgctcttggagtgagtttctctgttgcagacaagtcctgcatttgcttaaaagctcttgcagagttggaattagagctgggtttaactgtttgggagtgtgtactgacaggagcaaagcgagtgccctcaggtcctacaaaaacccagataggaacatttcaaattctaaagccaacactttgatgcagttgtttacagttaattgcagatgtttattttcccaggaatccattctttcctaagaataccctggtttctctgggattcttagaatgataaaaccagaaagccagtgttaagatactacagcatttcattagttgtttttttttttgttttgtttttgttttttttgagatggagtcttgttctttggcaaggctggagtgcagtggtgtaatctcggctcgctgcaacctccaccacccgggttcaagcgattcccctccctcagcctcccaagtagctgggactacaggcgcccgccaccacgcctggcttaattttttctattttagtagagacagggtttcaccatgttggccaggatggtctcaatctcctgacctcgttatccaccggcctcgacctcccaaaatgcttggattgcaggcatgagccaccgtgcccagcctcattagttcttaaagtcactaatagcattattttatgcccacgaaccagtaagtcagaccaaagcctgaaatagtgttttctgaaaaatggaaaaggaaatataagaattttaaaaacaaaccttgaaatcagtttctcaagttaaaattctgatggatgtcacaaatagtaaggtcttccttactgagctctgtcatctgttttggcttttatgcatactgtgatttgggaggctgctgctcaacattctagcccatttccagagtgttccattattctaggacatggctgtcatgggagtctgcacaaggcaactaatgctctagatttaactgccttttttaaatcagtagatcattaattgtttcagttacataggagccataggcagtaatagaaacatcacaagtattgtttccaaaaatatacccaagtagagataagaccactaagatgttccctttattacctttcagcatttaatgataccagcttgtagcttccaaggtgatagagtgtgctgtgtacatacaaggcatagtaaacgtgtatttaaaacttgtttttttgtcgcacatggcttaagagtttgaatcagtaagttaaagttacgagagtaaaatcatatgaaggccacacagttaactgaaggacagtttaaaagtgtgtgccgccgcctctgcatagttcttaccccatttaaagaagcacttgctttggaaatttcaactcggttggagaaatcagactgtaggttctgatactggcttatcaagtttgtaataagagtgctgatcaaattggcacagtttgcttcagaaaacacttgactttgaacctgaaaaagaagatttaaaaaaatctccaaaagaccagcataatgaaaccacaagcattaactaattggaaatgacacactgagtttccaaagtactacgtacctttagaaggaaatgtgtcatgaacgtgtagacaatgttgttgtttaaaaaagttctttcatccattaggatacatttaatatattctgcgaaaacaggatcttcacacaaaagcttgatgcagttttttgacatagcagactaaagtggggagaagatggttgagcacttacggttgagcacggaaaaaacttacacggaaaaaacttacacagaaaaaacatacacttgtgtatgatggaatctgaagccactgaaaatcctacttgaaaagccatgtctaactcacctattgaatttttagttaacagcaactatttttcatacagtaaaatgttactaatttagattaagggagtgctgggggaagacactgatgccgaaactgaacaaatgttttaaaagaaatgcaggtttattatccagcactgagagagttaacaaggactggaaaaataaggctaacaaagaataggatgtgaatgttttcaagggccaaattaatgtatttataggtaaccagagcatatgttgcaaaaagacacattttaagaatcaaaatcaattctccaaaatgttttaaactttactgtatattctcgctagcaacagtaattctgtaaataccttttccccccataaacactgcaagggtaaacaataaatcttctttcctaattatctcaaaaaaaaaaaaaaaaagg

SEQ ID NO: 24218 - DNA, 2104 bp, Homo Sapiens
gcggcgagactgcacctcccagcatgccattgcagccaggactggagtcggtacttaagagtgatggggttccctagatactttaggccgtcgcatcgattatagagattgaggtggaacccggggcctgggaactggacgcacgcggagggcgaagatggaagcctggcgctgtgtgaggaagggctacggcacctgtgtgttgggaagaggccgataccccatgtttccccatcactcgaggagtctgggcagagactggactacaccgtgggagaatcttgcaaaggtgttgcttggaacagacatatttctagttgtatgaggtggcctggacattactctcgagctccttacccatacttcagtagtaggcatttttcactaaattggagaccaccctgtttgtttgagtctagaactcagttccagtactgtaactggagacctgacaacctgagccagacatctttgattcatctctctagttacgtcatgaacgctgagggagatgagccttcatcaaaacgaagaaaacaccaaggtgtgataaagcggaattgggaatatatatgtagccatgataaagaaaaaacgaagatcctaggagacaaaaatgttgatcccaaatgtgaagacagtgagaacaagtttgacttttcagtgatgtcctataatatactttcacaagaattcggcacgaggataactctcacctttatagacattgccggcggccagtattacactggagttttaggtttcccaatatttctgaaagaaattaaacattttgatgcagacgtactttgtttgcaagaagttcaagaagatcattatggagcagagatcaggccaagtttggaatcactgggttatcactgtgaatataagatgcggacaggaaggaaacctgatggctgtgctatttgcttcaaacattccaaattttcactcttgtcagtgaacccagtggaattcttccgccctgatatttctctgttggacagagacaatgttggattagttttactcttacagcccaaaattccatatgctgcctgccctgcaatctgcgtagcaaatacgcatctgttgtataatccaaggcgaggtgatattaagctgacgcaattggcaatgctactggcagagatttccagtgttgcccaccagaaagatggcagcttctgccctattgttatgtgtggtgactttaattctgttcctggttctccactatatagtttcataaaggaaggaaaattgaattatgaaggacttcccataggaaaggtatctggccaggaacagtcttcacggggacaaagaattttatctattccaatttggcccccaaacctaggtatctcacagaactgtgtgtatgaggtacagcaggtaccaaaagtagaaaagacagacagtgatctgacacaaacacagctgaagcaaacagaggtcctagtgacagctgaaaaattgtcttcaaatttacagcaccatttcagtttgtcatctgtttattcacattactttcctgacactggaattccagaagtgaccacctgtcattcccgaagtgccataactgtggattatattttctactctgcagaaaaggaagatgttgctgggcacccaggagctgaagttgctttggttggtggcttgaaacttctagctagactgtcacttcttacagaacaagacttatggactgttaatggacttccaaacgaaaataactcttcagatcatctgcctttattggcaaagttcagacttgaggctctgactctctttgatcacatactaattttctttccaatttgtattgtttttcaaagaatgtaaagttcttaagtgtatgcatgttgtttatttttgcactgtggagattctgaagcggttatgttagatgctttgaaactccatatcagaagaaataactttataacaattttttttaataatgaaaaatattttcctgacaagtgagctctaaattctctttattgtaaaagagatgtaaaggttttatattctaaatcctagtaaaattgacagtgatttttaaataaaaaaaaaaaaaaaaaaaaaa

SEQ ID NO: 24219 - DNA, 1685 bp, Homo Sapiens
tttagcaaggattcaaggctttcaggtatgaattaaaagcaaaaacaaaaaacaaaacaattcattagcctcagattcttcatctgtatacatcacaaggctcattcttgcctgctagtatggcctacatgccacttacgttttaagttatttaggaacacaaaggacagacaaaaaagccatatgcacatgcctcattttctcttatttttgatctatctagtaattcttttgctgcctgtctcttctccattttccttcttcttttttaagcatttttcatattcttcactgtcttctatttggtcttgattaggtgcatctatctcttcgctctgtcttccacaaacaaaaattctgccttcagacatttggtgttagtatttcacactcagttctccctttttttacataaggattgagtttctttttatgatgattttacctttatagcaattttgaattttgcattctattgctagtattgattcaggtacaccattaagatacaacattctagaagtctattaccttaggagttaattaaacatgatatttgaagaataatgaaatgctttatagttgtttgaggcataacaatgtgtatttgttttactggatcatgttttgaactgactagggagggtagcacctgcctcagatagtaccaacaattctgtttcactgggtagtctaaaactagcttatagtttaacttaacttgttgtgtatgtgaatttagggatggaaactttttttcccctatttattctttgtttccttctgggaaaaaaccccacaaaaatcagcactcctttatggatacattggagcttttgaaagaattgtaaactctaggaaggggaaatatctgtgtcttgatttcttagttgccttgaaaatcatgtactgaactgtaaccgctaacttgactggatgaactagtttgcttgtgtgtagagagtgtattgcttcctcagatttcactgttttcatctccttttccatcttagtctttattccttaagaccaaaaactgtaatatcctttagaaatgctctagaagatctgtattgtgtagaatgatcatgtatttataaatattttacaagtttagattataaaatgaaaaagaaggtcatgtgttttggggggtattttgcatgttcggatttttttttcccttcaccgaacccttctgattctttcaaactattgccaggtagttgttagtgtttctaattggactcttaatatgaacttcaagaagctgttaccagttatcggctctgtcatctgaaattttaaccacttaatttaaagttacaattttagaatttgtttttgttgttttaccttaagaaacacaataaatcactgtttaaaaaagatctcaatttatataaagtactggaaaaaagctaagtaatttttagttctatctataatctccgtaggatgaattagaaataaattgtgatgaaaagaaattaactgcttatttatgaatctaatcatttagaaatgtctgagagtaacactgcattcttatagaaacaaagcacaaattgcattcaagctctgaattgattttttgcttggagctgttgttacagtagctgtaattttgctaccagaatgtcttaattttttaaatttgtttttatttctaagctcttggcaat

SEQ ID NO: 24220 - DNA, 1585 bp, Homo Sapiens
ggggggttttttgttttgttttaatgggttagaaaatgtttacaatcttggtcttatatgatcaccaatggaatagtaacttccaggtttatatcaatatgagctgactttaactgagttgtttgggatagggaagaagcagtccctctacagtatacaactactgcttgccagctggatcaaaataatcatgttttatgaaaatatctcccttaagcagtgttaaggttggtttgcagtgtgtaagtggcacattgaactggaagttttcttgaaagctgcttcatctattaagaagcaattttcaaattgtagcgaattatattatcccctcttttaaagaaacagtcgttatatgctgatgtttcttaaaataactaaaatgttcctcttaatgtgattttaaatggagttatttgtaggtcctttcttagtagtaaagaatcttctagagggaaacatttgtgcttttagggataatcttccttgtgcctcactacatccctaagtgggtatgactcttgttattaccacatgcttttttagtatatttcacaaatttacttttaaatattattttagatacggtgtaacatgtgcaattcagaataattttataacaggtcatgaaaaacataactttagttaggattcacaatatttgttctccacataatgagagaatgaatgagcctttggagatactgatataaggcaattattttttgcaatgttgaatgtgttttttagtttgattctttttttttcccccaatagggcactacctgccatatcatcttgtattactttttgatgtaaagcgactaatatttacactatgccatattttttttaattatagttgtaaattatgaaagatccttgaattttctacagatctacaactactaatgtaacagacaagggcaatcttggtatttaaatctgagcatggcagttctaccataaaaagtactctatttttctaatttctaggatttttaaaataacatttctgtaagtctgacatactaatagtcactcaagcagtaccatttattttagtttgcatatattttcactgtttttaatttaatgtattgagtctaatagactgttttgcaataattagaataaagatttatttcttctaatcaaagatgcataacagctattatctaggggaccaccaaatgtgatttcaaaattttgttaactattacaaatgtaatcctcatatagaaattttaattttgtaaagtagtgtataatattgtaatattaaattcttgttcttaaattcaaatatgtattgatcttcaatgtgctgtgttaaatcttgcttctctgaaaagttggagacaagatttgtcttcctttttacagtttgtaattttcactgttttattcctgttaaaaaaaaaaaaaagtcatttgtaacccatgcagaccattgtttgatctatgctaacttatcaacttggctattcaataaagttaattgaaaagaaaaaaaaaaaaaaaaaaacttatcgataccgtcgacctcgatgatgatgatgatgatgatgatgatgatgtcgac

SEQ ID NO: 24221 - DNA, 1244 bp, Homo Sapiens
gggaaagaggatgatgatgaatgtcttgaacaaaaaccagctcagctcggtaggaaatggcgcgaactcggacttcctcctgtttccccgcgtgactgtgtcaaagatgccgtggcagcagaagtgtttgatcacgtctggacaaatatggtagaacttttggaagagctgattagaaaacactgggaaactacactcacagaagggaaaaaacagagagaaacattgaaagtggctggaaacagatttccgcacgtcctcgttccacgcgctcacgccgatggagccagtggccccccgtccggacacgccgaggctcacggcatctccctggcttctcgtctgaacccgccccagattcatcacttctccagcagtttttatagtgacatgaatggtgtcatgacaattcaagcaaaaccgcttcagcggagacctgcctattttgctgacagaacgcagaatgagaaggaggacaaagcatcgggtggaggggcaggtgctctctcctccgcaccgcacagactgggacgggcctcagacactcatggattatcaccttctgcaaagaaaacaccagtgccctggaggctgccttctcttgcttcagattcacagagactaaaaactcccaacatctatagtgacgaagttcttcggggaacaaaactgccgactggcgtggaccacatggcttccccactggttcaaacgtcacggagcaggttccccccgctagtcacggagaccagggggcagaatacagcagttcctggatgccgccttgtttcttacagaggaaggcatctacaaaaccgtgtgttgagtgccatgcctgacggtacagaacgatcgcgtcttcgagaaagaacagccaccctggaacggttgtcaaggcccagcacaacccacacgttccggtcggatacgcctcgaaaaggttcattgacacaaatggaatttgctgctcacacatggacaggtcaaagtattttgacaggttcacaatatgtgcctaaatcttttcagaggacaactttgactttcaagaggagattccaagtgacatcttgaaaccacctcaccagaaccattggagcacctgtggcctcggcacactgcttatcacttgaaaaatggaggaacaagtgttatatttatctgtgtgtctaacagtgtgagatgttagaccgagagaaaagcaaacaaataaatcacttaatctcaaaaaaaaaaaaaaaaaa

SEQ ID NO: 24222 - DNA, 1065 bp, Homo Sapiens
gggggatattgcaggggatggacccagagggatgcgggggaagagggtctggttctctctagggtggttctggtcccctctgcgtcatgcttgggagtggccagagcctcctggcatagtcaacatgagcagtggtcccggttcctttcttttctcctctccccaagtgctatcctgttcatgcctgtgctcagagcttcctcccttctctcctgggctgtagctgaggcttggaaaggagaaggtccctggttcctgcagctgatctgatctggagacacccccgtgtagactctggttacagccagatgctcaggttgtcgagggactgccgtatgatgacaacataatgagcaaagtgaggagctctgagccattaatacggctgcccggctgaggtaccaaactgattgaacaatacttgaaaggctgaggctggggaggccagtggggctgggtggccctgcaaccacgtggctgcctgttgtcttccttcaactgctggaggacttaaacaatgttcttcaaatgaggtgctcgtgctcaaggacaggggctgccccaggcaaggagagcagcctgggaagttaccggaaaagcacctactgaatcacccagctacaggagcggagcgagggagcaggtgtgcaccatcaccccaggtgtctcagatgtaggctccatgaatgcaggggcaagaacggaggcccagcgcccaggacttgaggtacgtgcggatgcgcttgcgggcccgctcctggaactcagggaactgccggctgcaggactcgatgatggcctggatcttctccttgggctgcttggagatgggcaccatgcggtccaggttctcgtccacaaagagacgcacaaacatctgtggagacacgggccatgggaagggctggccctggccttgcccccatcccaccccacctgtttccggccggtgctcacgttgaaggccttaagacgctcagggtccatgcaaaaaaaaaaaaaaaaaaaaaaaaaaaaaaaaaaaaaaaaaaaaaaaaaaaaaaaaaaaaaaaaaaaaaaaaaaaa

SEQ ID NO: 24223 - DNA, 1667 bp, Homo Sapiens
gaaaactggccatgactacagccagaactgttatgagattaacatttctattgagaagcttttgagtaaagtactgtatttgttcatgaagatgactgagatggtaacacttcgtgtagcttaaggaaatgggcagaatttcgtaaatgctgttgtgcagatgtgttttccctgaatgctttcgtattagtggcgaccagtttctcacagaattgtgaagcctgaaggccaagaggaagtcactgttaaaggactctgtgccatcttacaaccttggatgaattatcctgccaacgtgaaaacctcatgttcaaagaacacttccctttagccgatgtaactgctggttttgtttttcatatgtgtttttcttacactcatttgaatgctttcaagcatttgtaaacttaaaaaatgtataaagggcaaaaagtctgaacccttgttttctgaaatctaatcagttatgtatggtttctgaagggtaattttattttggaataggtaaaggaaacctgttttgtttgtttttcctgagggctagatgctttttttttctcacactcttaatgacttttaacatttatactgagcatccatagatatattcctagaagtatgagaagaattattcttattgaccattaatgtcatgttcattttaatgtaatataattgagatgaaatgttctctggttggaacagatactctctttttttttcttgcaatctttaagaatacatagatctaaaattcattagcttgacccctcaaagtaacttttaagtaaagattaaagcttttcttctcagtgaatatatctgctagaaggaaatagctgggaagaatttaatgatcagggaaattcattatttctatatgtggaaactttttgcttcgaatattgtatctttttaaatctaaatgttcatatttttcctgaagaaaccactgtgtaaaaatcaaattttaattttgaatggaataatttcaaagaactatgaagatgatttgaagctctaatttatatagtcacctataaaatgttctttatatgtgttcataagtaaattttatattgattaagttaaacttttgaattgatttgaggagcagtaaaatgaaagctatatctattctaaaccttatttagacattggtaccagttacccaggtgaaaatatggagtaactttgttttgtatggtaaggtttaggaatggtggatgaagggtatctctatataaataaagtgctcaacaatgtgcaatgattgtaaatttagtaagatattacagccatttcatgaatgctttaccattcaacatagtatctattacaaaacacctttcttgtatccatatacttcaggtgttgctgttaacatttactatgatatttattttaaccaaaatgttactcacattaaatgtttattctttaaaatgaatgtattatgtttttaacccacaaatgcatacttaccctgtgcctcatatttcaatagtactgtaatatggacatcttttgtgaaatacttttattttgttatgctttaaatatacatacaaaaagatttctgttattagctttgaaaattgtataatatcctaatataaacaaaaatataaaaataaaaatgaatacagtaaaaaaaaaaaaaaaaa

SEQ ID NO: 24224 - DNA, 2524 bp, Homo Sapiens
gaagggggagtgcatctggaatacgcagagtcagtaagaccatggctacgtcctcgatgtctaagggttgctttgtttttaagccaaactccaaaaagagaaagatctctctgccaatagaggactattttaacaaagggaaaaatgagcctgaggacagtaagcttcgattcgaaacttatcagttgatatggcagcagatgaaatctgaaaatgagcgactacaagaggaattaaataaaaacttgtttgacaatctgattgaatttctgcaaaaatcacattctggattccagaggaattcaagagacttgggcggtcaaataaaactcagagaaattccaactgctgctcttgttcttggtgtgaatgtcacagatcatgatttgacattcggaagtctaacagaggcccttcagaataatgtcacaccatatgtagtctcattgcgagctaaagattgtccagatatgaaacattttttgcaaaagttgatctcacagttgatggactgctgtgtagatataaaatccaaagaggaggaaagtgttcacgtcacccaaagaaagacacattattcaatggattcactttccagttggtatatgactgtcacacagaagacggacccaaaaatgctaagcaaaaaaaggactacttctagccaatggcagtctcctcctgttgtcgttatcttgaaggatatggaaagctttgccacaaaagtactacaagacttcataattatcagcagtcaacatctccatgaatttccactaatactcatttttggaatagccacatctcctattatcatccaccgattgcttcctcatgcagtatcatctctattgtgcatagaactgttccaatctttgtcttgtaaggagcacctgactacggtactcgataagctacttcttacaactcagtttccctttaaaataaatgaaaaagtattacaggttctgaccaacatctttttgtatcatgatttctcagttcaaaactttataaaaggacttcagctttctctattagagcatttctattcccagcccttaagtgtcctgtgctgtaatcttccagaagccaaaagaagaataaattttttatcaaataatcaatgtgaaaacatccgacgtctaccatcttttaggaggtacgtggaaaagcaagcttcagaaaagcaagttgcgctcttgaccaatgagagatatttgaaggaggaaacacaattattactagaaaacctgcatgtttatcatatgaattacttcctggttttgagatgtcttcataagttcacctcttctcttcccaagtatccactaggtcgacagatcagagagttgtactgtacatgtttagaaaagaacatatgggattcagaggagtatgcatcagtcttgcagctgctgaggatgttggcaaaggatgaactgatgaccatacttgagaaatgtttcaaggtttttaagtcttattgtgaaaaccaccttggcagcacagctaagagaatagaggagttcctggcccagtttcagagcctcgatgcagaaaccaaagaggaagaagatgcttctgggtcacagccaaaggggcttcagaagacagacctctatcatcttcagaggtccttattggaaatgaaggagttaagaagaagtaagaagcaaaccaaatttgaagtactcagagaaaatgttgtgaacttcattgactgtctagtgagagaataccttctgcctcctgagacacagcctctccatgaggtggtgtacttcagtgccgcccatgcccttcgtgagcatttaaatgctgctccgcgaattgccctccatactgcactcaacaatccttactattatctcaagaatgaagcactgaaaagcgaagaaggctgcattccgaatatcgccccagacatctgcatagcatacaaactgcacctagagtgtagcaggctcatcaacctcgtggactggtcagaggcttttgcaacagttgtgacagctgctgaaaaaatggacgcaaattctgcaacctcagaagaaatgaatgaaattatccatgctcggtttattagagctgtttctgaactagaacttttaggatttataaaacctaccaaacagaagactgaccatgtggcaagactaacatggggaggctgctagaaagcaaataagcaaagccagaactatcacatttagcttaagagaaaaaggtgaccagtcatatttacatatattagaggagcctgttttgttgagaagataaatgtgtaacccccattgatgtttaaccagaaaagtacattgctaaccccaaacaggcatgtatcaaaacacctgtggagtactttagactccaacaaaataataatgtaactaaaactgctcacacattttactgtactttccaaagtcattactaaattgtgagtaaatcattcttgaacttagagtatgtaaatgtgataaattccgttatccaggagtaaaaaaaaaaaaaaaaaaaa

SEQ ID NO: 24225 - DNA, 3320 bp, Homo Sapiens
gcgccccagaggctcaagaaaacccgcgggagcctcgcccggacccaggaactcgtgctcggggccaaccggctgggccgcgatcgcgtttcgtccggggccgcggcggccgtggggaatcggctgcagcgaatcggtggcgcgcggcgcctgagcgcgctgcagtcacccgggagccgggtccaggtcgtcttcccgtgacgcccagatctgtcctgcaggatggagccagcaccctcagaggttcgactcgccgtccgggaagccattcatgccctctcgtcttcggaggatggcggccacatcttctgcaccctggagtccctgaagcggtatctcggtgagatggagcctccagcgctcccgagggagaaggaggagtttgcctcggcccacttctcgcctgtcctcagatgtcttgccagcaggctgagcccagcctggctggagctgctgccccatggccgcctggaggagctgtgggccagcttcttcctggagggcccggcggaccaagccttcctggtgttgatggagaccatcgagggtgctgcgggccccagcttccggctgatgaagatggcgcggctgctggccagattcctgcgcgagggccggctggcagtgctgatggaggcgcagtgtcggcagcagacgcggcccggcttcatcctgctccgggagacgctgctgggcaaggtggtggccctgcccgatcacctgggcaaccgcctgcagcaggagaacttggccgagttcttcccccagaactacttccgcctgctcggcgaggaggtcgtccgggtgctgcaggcggttgtggactctctccaaggtggcctggattcctccgtgtccttcgtgtctcaggtccttgggaaagcctgtgtccacgggaggcagcaggagatcctgggcgtgctggtaccccggctggcagcgctcacccagggcagctacctgcaccagcgcgtctgctggcgcctggtggagcaagtgccggaccgggccatggaggctgtgctgaccgggctggtggaggccgcactggggcctgaggtcctttcgagactgctggggaacctggtggtgaagaacaagaaggcccagtttgtgatgacccagaagcttctgttcttacagtcccggctcacgacgcccatgctgcagagcctgctgggccatctggccatggacagccagcggcgcccgctcctgctgcaggtgctgaaggagctgttggagacgtggggcagcagcagtgccatccgccacactcccctgccgcagcagcgccacgtcagcaaggctgtcctcatctgcctggcgcaactcggggagccggaactgcgggacagccgggatgaactgctggccagcatgatggcgggcgtgaagtgccgcctggacagtagcctgccccccgtgcgacgcctgggcatgatcgtggcagaggtcgttagtgcccggatccaccccgaggggcctcccctgaaattccagtacgaagaggatgaactgagcctcgagctgctggccttggcctccccccagcctgcgggtgacggcgcctcggaggcgggcacgtccctcgttccagccacggcagagccccctgcagagacccccgcagagatcgtggatggcggcgtcccccaagcacagctggcgggctctgactcggacctggacagcgatgatgagtttgtcccctacgacatgtcgggggacagagagctgaagagcagcaaggctcctgcctacgtccgggactgcgtggaagccctgaccacgtctgaggacatagagcgctgggaggcagccctgcgggcccttgagggcctggtctacaggagccccacagccactcgggaggtgagcgtggagctggccaaggtgcttctgcatctggaggagaagacctgtgtggtgggatttgcagggctgcgccagagagccctggtggccgtcacggtcacagacccggccccggtggccgactatctgacctcacagttctatgccctcaactacagcctccggcagcgcatggacatcctggatgtgctgactctggctgcccaggagctgtctaggcctgggtgcctcgggaggactccccaacctggctccccaagtcccaacaccccgtgcctgccagaggcagccgtctctcagcctggcagtgccgtggcgtctgactggcgggtggtggtggaggagcggatcagaagcaagacccagcggctctccaagggtggcccgaggcagggcccggcaggcagccccagcagattcaactccgtggccggccacttcttcttccccctccttcagcgctttgacaggcctctggtgaccttcgacctcttgggagaagaccagctggttctcggaaggctggcgcacaccttaggggccctgatgtgcctggctgttaacaccacggtggctgtggccatgggcaaggccctgctggaattcgtgtgggcccttcgcttccacatcgatgcctacgtgcgccaggggctgttgtcggccgtctcctccgtcctgctcagcctgcctgctgcgcgcctgctggaggacctgatggacgagctgctggaagcccggtcctggctggcggacgtggctgagaaagacccggacgaggactgcaggacgctggcactgagggccctgctgcttctgcagagactcaagaacaggctcctcccacccgcgtctccctagtccctggaggcctccccaggaccaccctcgccgacagcaaggcaggcggctgagcagcggcctggagcagcagagccaggctttgtagcgaggccaggtcttcggccgcatccggtacggagagtgcagatgcaggaaggcccggcctgccgctatttatagtgcagccagtccgctaaaaatacactgggcctgggcactgcccgccgggacatggcagcctggacgtggggctggggctgtgggcgctgctggcggggttgactcttccagtgagggcagaaccaggctggcaggaggggaggacggtgtacctgctgctcagagcccccaaggctctcctctgagagccaccaagcaggacagagcagctcttgtcccaggtccctcgggctgagcgccgtgtcaccaggagaatagtgctcacagcccaggcagggtgtgtggctcctggatgggctcgtggggcgggatgggacagggcacgggctctcagaaaataaactgctttattggaaaaaaaaaaaaaaaaaaaaaaaaaaaaaaaaaaaaaaaaaaaaaaaaaaaaaaaaaaaaaaaaaaaa

SEQ ID NO: 24226 - DNA, 3990 bp, Homo Sapiens
ggacaaaactatgctactttagaaacgcagtctgtttttcaccaattgacatactactgatctgaagtaaccagtgccatcataagaaattactgcattaagaaaatccttgctgtgccctttgaaaagctgttcagaaatcatttacagtgatctttcatctcggtcgctgtagtgaaacattttagtgtgataaatttcaaaattctaaacaaattacccacttttatattggaaatctctaccagaactccctcttcattttttaaggcatacatttgcttgttttcaagatcaagaattctgagctagctttaagtagcaaactgatttatatgtgcaattataggatgcattaagatgaatgatagcctttacatattgaaaactttgcagacgttttgttttgaaaatggcattgtatagtaaatgcaaattaattttgtaaaattatgttaaagagtatgttcagacactttctgccatggccaaaaagtatgtatgaaagtatgtgtgtatttgtttgtaaaaggatgccaatgttttacctgatatcttagtgacacttcagttatctatgcattctttagatctgtgattcggtaaacaggcagccatgttcacgatgccttctatgtcttaccatatttttaattaacctgttaaatacagcttaaaatatttttattttatttattctatttttactgaaatatactgcattattgtgttaatgtattatctttcctggatattatctcccagtgtatccagatctaagtaatctcagtgaactatacattgcctaaaaagtggttttgtaatgatttgtagtcacatttctattgggatatgtagaagaaaaggcaaaatgcttaaagttccttttattttttaaaagcagctagatagacacagacttgccacctcatacatctgctccttggcaacatcaaggggaacgactagccaacatgcctatggctaaaaactttcctttgcagactaaagcactgcttggtgcttcgtttttctacccttcacaacatgtgtgatttcatctaagagatatatacatgtacacatgccctttgtttccacctggatacaagatcactcatagctaattaggaccattgttttttgttcatctgtcttgttgcatgaagggacattagacccatttccattaaaataagttcttggtgataaactgtggcactgctacttctttttaaatccactttatgatttcaagatggacacttgtaagatgactcgacacaaggccattgcctggaagccccagagctttcctctgtttgtatggcccgttcatgtcccaggcattgcaacacaaactcctcaagatttcaccacaacatgacaagcattttcctaactgatattagcacaatttaactaataagccccttcgctctctagttggccaggcttaacctaatacacatctaacgtgtgtgccacacggccagtagaaagtttaacttcagcttcagggcaaagatacccactcacaccgtgtcaacgcaagcagtagttcctggcctccagagcagcttacttcccctgaaagaacgctttgttttcctttatgcccttttcctgttgaccacttttacacatttaaatgtaatttgttgtgagaataaatttagctgcataaaacgttcggctcatttatctgacatcttagtcacatatacaaggaatagaaatagaaactcggtgtctctagttatttttaaattattcttacctcagacttcttagaaatcactttagtaatggagcattttgctttgattagttactacatatttctgcctggtaagaactaggaagtaacttcaaattttgagtaatcaccctgtacttatttggtgatcaggaaggccagctggccttccggacatagaagcctatttagtcaccaactcgagtcttttgtaagcggtcttgctaggattgtgatattttagcacgaagaagtttatcacttcctttaagaacctgacatcaaagaataaagaatagaggtgtacacacactaaatccaaaatgaaaggtaactagagaaatcagttgaatctggtttagcttaactgttaggcgcaggaaggcagataaacagaatttaaagtatgtccccgctttttgttcatcttgcacttccacagtggtttctctctagtcagtaacaaaatttcattatggtttcaggcattatatggtggtaaataatttcagattaaaaatgtgtttgctattggagtatctgaatactagtaatttcattatttagaattttgcagcacttttatctcaagaagaagtccaagaatgtaaaatgccaaatgaaacatgtcagtggaatcaatattctccttcattagaattccctcatattgctttttttttttttcttcagacagaggagtcttactctggagtgcagtggtgtaatttcagctcaccacaacctccacctcccaagttcaagcaattctcgcctcagcctcctgagtagctgggattacaggcatgcaccgccacgcctggccaatttgtatatttttagtagagacagggtttcgccacgttggccaggctggtctcgaactcctgacctcaggtgatccgcccgccccaacctcccaaagtatgtgagccaccacgtccggcctcatattgcttttatccaaaattcttttcccttttcactctaccaaagtatttaaataatcctgtccttcatagaagattctcaaagaagaaaactgcagtgtaattaatgaatggtttaattcagaatcttcatatacttctaaagagaaaaataatttagtgccaaatgcatgttaggagataatcaatgtaagtggcaacaaattgtgacttcacatgctactgtagagatcagaaaattatcctaaactattccataacaatgagacaacatcacagaaaatacacttgaaaataaaaatctcaagaccagctacttctggacaatggaatacttttcagtctggtatggtggagggcccgaaaaggataagggattcttatgatacacaatgggattctttactgaacaatatgttaaattaagctgcaccgccttccttgaggcatggactaccctaaccaaccagatagaaatctgggtgggataagaggatgagccacacgctataattttagggcaaggagatagtgtttgattttcaaaatcagcaaaataagctgagcactttatatctttctgtacaagagtgataacatgaagaattcttcttcagggatttaaaatacaataagcctggttcaactataaaaagtcttgtttcctttcttcattgacacttttttttttttttttttttgaggcaaggtctcactctgcttcccaggctggagtgcagtggggcaatattggctcactgcaacctgcacctcctggactcaagagatcctcgtacctcagcctcctaagtagctgggactacaggcgtgtcccaccacacccagctaatttttgtattttttgtagagatggggttttggggtttcgccatgttgtccaggctcgtctggaactccggtgctcaagtggcgtgcccacctcagcctcccaaactgctgagattacagatgtgagccactgcacccagcccactgacacgttttactgataaatgtaaatctaagctaaaataaaaataatgtattaccgctataatacaattcaccattctcttttctcacttcaagtaagaaagtaaaaatagaatatcagagctgaagtagacctaagtattcatcttgaagaagataatattctaaaaatcatgccacctgaattgagcatttaggaatttatgtaacatttctatacaactgaattgcaaaaataaaactttaaattcaaactttaaaaaaaaaaaaaaaaaaaaaaaaaaaaaa

SEQ ID NO: 24227 - DNA, 2603 bp, Homo Sapiens
gagaagcggctcccgtcggaggccgagtcgtcgccacgatcgcccccttggtggactcgcaggccgagcggcttccccgcagagctcgaggagggcagacggcggcgggggcgccatgagtcagaggcaggtgctgcaagtgttcgagcaataccagaaggccaggacccagttcgtgcagatggtggcggagctggcgactagaccccaaaacatcgagacgctgcagaacgcgggtgtaatgtctttgctgagaactcttcttctggacgtggtcccaacaattcaacagactgctgctttggctcttgggagactggccaattataatgatgacctagcagaagctgttgtgaagtgcgacattcttccacagcttgtttattcattggcagaacagaatcgcttctacaagaaagcagctgcctttgtgttacgagcagttggtaaacattctccccagctagctcaggcaatagtcgattgtggagcactggatacgctggtcatatgcttggaagattttgaccctggagtcaaggaggctgcagcctgggcacttagatatattgcaagacataatgcagaactgtcacaagctgtggtggatgcaggagctgttcctcttttagtactctgtatccaggagccagaaattgctttgaaaaggattgctgcttcggccctcagtgatattgcaaagcattctccagagttagcacagacagtagtggatgcaggagctgttgctcatttagcccagatgatcctgaaccctgatgctaaattgaagcatcagatcctttcagctctcagtcaggtttcaaaacattccgtggatctggcagaaatggttgttgaagcagagatttttccagttgtacttacctgtctgaaggacaaggatgaatacgtgaagaaaaatgcttctactttaattagagagattgcaaaacatacacccgagctttcacagctggtagttaacgcaggaggggttgctgccgtgattgactgcattgggtcctgcaaagggaacacacggctgcctggcatcatgatgcttggttatgtagcagctcattctgagaacctagcaatggcagtcatcatttctaagggtgtaccccagttgtcagtctgcttgtcagaagaaccggaagatcatattaaggctgcagctgcttgggccttaggacagattggaagacacactcctgaacacgcacgggctgttgcagtcacaaatactttgccagttctgctttctttgtacatgtcaacagaaagttctgaggatctccaagtaaaaagtaaaaaagccataaagaatatcctgcaaaaatgtacctacttaccagcccttgaaccatttctatatgatgctcctcccaatattctgaaacatgtggttggacagttcagtaaggtgctgccgcatgatagcaaagctcgacgactttttgtaacaagtggtggccttaaaaaagttcaagagataaaagcagaacctggttctctccttcaagaatacatcaacagtattaacagttgttaccccgaggaaatagtgaggtattattcccctggatattcagatacacttctgcagagggtggacagctatcaaccacttaataactgagcaaagttatattgtgatactcaaattcacagcagagtagttttgagtaacagtaattaaatccttctaaatatttgaactaagtatattctagatttatttaatgggaaatacctttagataatattttctaaatttatgtaatactttaaacattcgtagcttgaatatgtgaggaactattcatggtcattcgcatgcataggatttgttctacaggtagattttaaaaacacgttaaagggccttaaggcattttgttattctgttaaaaaccacacacactcgtacatgcagacacctccaatgagatatagttaagagatggcattcaaaaaccctaaattattctagccaatttgtcataggcataggcaaggaaagctggccttgctaactatatagtagtatacacaagagaaatctttgaaggaggaaactgatgacagatatacagggcacttgaaggagactctgatgctagttatataagtgcattaacttaagacacggactctgtgggtaacctgttaggttttactaagaatttaggaaaaatttactcctctttatcacaagttttccaaacctccttccccaccctatctaaagtgttccttacctttcatgggcccagcgagggtagaattcagaatagagagttatactcctgcatacatgctctccctctcattgaaaggtttcttagtctagctctgctcatgaatgaacaaagaagcaggcatgtaaaatggatccttgtcctaacgtcactttcccaagtttcaaaagtcacattttcaggtatttaaggaatagtttgaagctaataccatcaggctcagagtttacatgcatttttacttaggaagtggtaaacgggtgaaagagggtttcaataaaattttaaataaaaacagcaaaaaaaaaaaaaaaaaaaaaaaaaaaaaaaaaaaaa

SEQ ID NO: 24228 - DNA, 3278 bp, Homo Sapiens
gagaaccctattattgttcaactttgtgatcagtgggataatccagcaccggtacaacatgttaaaataagtcttacaaaagctagcaatttaaagctcatgccttcaaaccaacagcataaaacagatgagaaaggcagggctaatttgggagtattcagtgtttttgcccctaggggagagcatactcttcaggttaaagccatctataacaaaagtatcatagaaggacctataattaagttaatgattcttccagacccagaaaaacccgttcgtctcaatgttaaatatgacaaagatgcatccttcttagcagggggtcttttcactgattttatgattagtgttatttctgaagatgacagtatcattaaaaacattaatccagcacgtatttccatgaaaatgtggaagctgtctaccagtgggaaccgacccccagcaaatgcagaaacatttagttgtaataaaataaaagataatgacaaagaagatggctgcttctatttcagggataaagtaattcctaataaagtggggacatattgtatccagtttggttttatgatggataaaacaaatattctcaacagtgaacaggttatagttgaagtcctgcctaatcaacctgtgaagttagtacctaaaattaaaccacctacaccagctgtttcaaatgttcgctcagttgccagtaggaccttggtcagagatctacatcttagtatcacggatgactacgacaaccatactggaattgatttggttggcactataatagccaccattaaaggttctaatgaggaagatactgataccccactttttattgggaaagttagaacacttgaattccccttcgtgaatggttcggctgaaatcatgagtctggtgctggcagaaagtagtcctggaagggatagtactgaatattttattgtatttgagccccggctaccacttttatcaagaaccttagaaccatatatcctaccgttcatgttttacaatgatgttaagaagcagcaacaaatggcagcacttacaaaagaaaaggaccaattatctcagtctattgttatgtataaaagtttatttgaagccagccaacagcttcttaatgaaatgaaatgtcaagttgaagaagcaagattaaaagaggcccaattgcgaaatgaactaaaaatacataatattgacattcctacaacacaacaggtgccacacattgaagcacttctgaaaagaaagctatcagaacaagaagaactgaagaaaaaacctagaagatcgtgtactcttccaaactatactaaaggcagtggagatgttttgggaaagattgcacatctagcacaaattgaagatgatagagctgcgatggttatttcttggcatctggcaagtgacatggactgtgtagtcaccctaaccactgacgctgcacgtcgtatctatgatgaaacccaaggtcgtcagcaggtgttgccccttgattctatttacaagaagactcttccagattggaaaagatctctacctcatttccgaaatggaaaattgtattttaaacccattggagatccagtctttgctcgagacttgttaacatttccagataatgtagaacattgtgaaacagtatttggtatgctgttaggagacaccattattttggataatctggatgcggccaatcattatagaaaagaggttgttaaaattacacactgtcctacactgctgaccagagatggagatcgaattcgaagtaatggaaagtttgggggccttcagaataaagctcctccaatggataaacttcggggaatggtatttggagctccagttccaaaacagtgtctgatcttaggggaacaaatagatcttcttcagcagtatcgttctgctgtgtgcaaactagacagtgtgaataaggatcttaacagtcaattagagtaccttcgcactccggatatgaggaagaaaaagcaagaacttgatgaacatgagaaaaatctcaaactaatagaggaaaaactaggtatgactcccatacgtaagtgtaatgactcattgcgtcattcaccaaaggttgagacgacagattgtccagttcctcctaaaagaatgagacgagaagctacaagacaaaataggattataaccaaaacagatgtatgagaggtgacagagagaagaggccattggtctcagtaagaatgccctgctttctgcatctctgtttcagaagaccaagagggtgacttaccagactgagtatttctggggacaatacaagtacctgggcatgaatttccatttcgattcagatgggactggaaacaaccattcaattttatgaatcttactggacattatggatttactggaattattccagacattatgccctttggttgtcactaccttgcaaatgtgtaagaggaaaatgtgctaatgtggcagtgactgtaaaactggcacatggcatttattaatcctgaagaaaagtacatgtactatttttcagtataaatataatgaacatgtcagaactatttcttgaaaacctttttattacttttgcgtgaatttatttaacaaagatgttttgtcttttgtgtaagggaggttctagaggctagatgtttaattgtaaatatgtgaggaaactcaatgcagaattcaggataaaaattttaaaagcacaggtatttgggaattgaaatgttaagatacccagaacaacattaaatcaatgagtgaacttgtgacagtggtagcatttcaaatttcaaaagacttatcctgtgtgtgtgtgtgtgtgtatatatatatatatatatataaatatatatatataaaatattcagcagcaccaagttttataactattgtttgtttgactttattaatactagaatatgtagtctcagccttaattttacatttacattattttgtaattttttattactatttttaaggggttaaagagaacatacattctcacattagtgtactttctggtagaaagttgctgcaaaaacatttgaaatgtatattaacctaatgtatgtcatatatatgtctttgtgtaagttcaagactattgatctgtgaagttattttgtaaggacatacatttggtaagtaagtttgtgtcccaggaaatgtatgtgtttttaaaccctttctaaatatgcaggccattaataaataagattgtttcttccctaaaaaaaaaaaaaaaaaaaaaaaaaaaaaaaaaa

SEQ ID NO: 24229 - DNA, 2728 bp, Homo Sapiens
ggaataagaagacccttgaagccccagaaggcatcagagataaagtatctgactgggatgagtttctgcggcagaccctgataggagcatgtagtcctcctgttccgctgctagagggcctccgtaatgggaggaatcctttagatctcattgctccaggatccagactagaatgtcaagctttccaggactctttaagcacttggattgttactgtagtagaaaacattggaggaaggctgaagctacgttatgaaggacttgaaagttctgacaattatgaacattggttgtattacttggatccatttcttcatcacgttggttgggctgctcaacagggatatgagcttcagcccccttcagccattagacatctaaaaaatgaagctgagtggcaagagattttggccaaagtgaaagaggaagaggaagagccattaccatcttacttatttaaggacaaacaagttattggcattcatacattctctgtaaacatgaaattggaagctgtagacccctggtctccttttgggatctctcctgctacagttgttaaggtttttgatgagaagtactttctggtggaaatggatgacttgcgtcctgagaaccacgcacggcgatcctttgtgtgccacgccgacagtcctggcatcttccctgtgcagtggagtctgaagaatggcctacacatcagcccccctccaggctacccaagccaggactttgactgggctgactacctcaaacagtgtggtgctgaagctgctccccagaggtgcttccctccgttaatttctgaacatgaatttaaggagaacatgaagctcgaggcggtgaaccccattctccctgaagaagtgtgtgttgctaccatcactgcagtgagaggctcctacctgtggctccagctggagggttctaagaagcctatacctgaatgtattgtgagtgtggaatccatggatatatttcctttgggctggtgtgaaaccaacggccaccccctcagcactcctcgccgagcacgagtatataaacagaggaaaattgcagtggttcagccagaaaaacaagtaccatcctcgaggactgtccacgagggcctgaggaatcaggagctgaactccacagagtcagttatgattaatggaaaatattgctgtccaaagatatacttcaaccaccgttgcttctcagggccatatcttaacaaaggaagaattgctgagctgcctcaatgtgtaggacctgggaactgtgttctggtccttagagaggtcctcactttacttatcaatgcagcctacaaacccagccgtgtccttcgggagctccagctggacaaagactctgtgtggcacggatgtggggaagtcctaaaagccaaatataaaggaaagagttatcgggctactgttgagatagtgaaaacagcagatcgggtgactgaattctgccggcaaacctgtatcaaactggaatgctgtcctaacctcttcggtccacggatggttctggataagtgttctgagaactgttctgtacttacaaagaccaaatacacacactattacggaaagaagaaaaataaaagaattgggaggccacctggtgggcatagtaacttagcttgtgccctgaaaaaagccagtaagaggagaaagaggcggaaaaatgtttttgttcataagaagaaacgctcctctgcatctgttgataataccccagcgggctctccccagggaagtgggggtgaagatgaggatgacccagatgaaggggatgatgattccctaagtgaaggcagtacatccgagcagcaggatgagctacaggaagaatcagaaatgtcagaaaaaaagtcatgctcctcttctcccacccaaagtgagatatccacatcgctgcctccagatagacaaaggagaaaaagggagcttcgcaccttttcattttctgacgatgaaaataaacctccttcaccaaaggaaattgatgggcaggccctgttgctccttacccttcccactgttcaagaatgcatggacttaaaattgggccctgccatcaaactttgccatcacatagagaggatcaagtttgctttttatgagcagtttgccaactgagaaggacaaccaaagtgagctggatctttgaagcacaaatgcagcaaatccttcaccctgctttataagtggagctggaatagtcctggggctctggggcctgcaggtatcagcttgctctctttgcactttcggggaaggaggactcacagtgaggaagcaaaaactgtgcacagaagtggatcacctgctggtggaaatgtggacatctcttgttcagcagatggcagtttttaaaaaataaaggttgtgaggaaaagacttatataagaagaaaagcatttccagtggtgtggcctgaaaacaaagaataacctaggctgctggaaagcacccttttggttgttttcattctgttccctcccattgtagattgaactttgttctctgctttctttttcttggaaagagaggacttagctttaagtcagcactgatttgggactgttcctaaggcatatcagtgcttcattgtcattgtgtttttaaactttttaaaattaaaacagttcattttggggatgaaaaaaaaaaaaaaaaaaaaaaaaaaaaaaaaaaaaaaaaaaaaaaaaaaaaaaaaaaaaaaaaaa

SEQ ID NO: 24230 - DNA, 2876 bp, Homo Sapiens
gcggcgtcttctcgcgcggatggtgaagctgaatttggtacgctggaccctcggacagacagcaagagagagacaagcccgaggcctgacttctagcactcctgagtttgagccctatgagcagtggaacctagggaccaccaaggatccagatataattctttcctcagtaatagaaaaaagaatctgggatctaagaagatacctactcattttctaagtgactggccatgtcattgtcccacttataccgggatggggaaggccgcattgatgatgatgatgacgagcgggagaactttgagatcactgactgggatctccagaatgagttcaaccccaaccgacagcgccactggcagaccaaggaagaagccacctacggggtgtgggcagagcgagactcggatgatgagaggcccagctttggaggcaaacgggcccgtgactactctgcgccagtcaacttcatcagcgcagggctcaagaaaggggcagcggaggaggcagagttggaagattctgatgacgaagagaaacctgttaagcaggacgactttcctaaggattttggaccaaggaagctaaaaacgggtggcaattttaagcccagccagaaaggttttgcaggaggaaccaaatctttcatggacttcggcagctgggaaagacacacaaaaggaattggacagaagcttcttcagaagatgggctacgtccctggacggggcctcgggaagaatgcacaaggtatcattaacccaattgaagccaagcagagaaagggaaaaggtgctgtgggggcttatggatccgagcgcaccactcagtccatgcaagacttccctgtggttgactcagaggaagaagctgaagaggagtttcagaaggagctgagccagtggaggaaagacccaagtggaagcaagaagaagcccaaatactcttacaagaccgtggaagagttgaaggccaagggcaggattagcaagaagctcactgctccccagaaggaactttctcaagtcaaggtcatagacatgacaggccgggagcagaaggtctactacagctacagtcagatcagccacaagcacaacgttcccgatgatgggctgccgctacagtcccaacagctgccacagtctggcaaagaggccaaggcccccggcttcgcgctgcccgagctggagcacaacctgcagctgctcatcgacctcacggagcaggagatcatccagaatgaccggcagctacagtatgagcgggacatggtggtcaacctcttccatgagctggagaagatgaccgaggtcctggaccacgaggagcgggtcatctcgaacctcagcaaggtcctggagatggtggaggagtgcgagcggcggatgcagcccgactgcagcaaccccctcaccctggacgagtgtgcccgcatcttcgaaaccctgcaggacaagtactatgaggagtacaggatgtccgaccgtgtggaccttgctgtggccatcgtctatccactcatgaaggagtacttcaaggagtgggatcccctcaaagactgcacttatggcaccgagatcatctctaagtggaaaagcctcctagagaatgaccagctcttgtcccatggcggacaggacctctcagcagatgcctttcacaggttgatatgggaagtctggatgccttttgttcgaaatattgtcacccagtggcagccaaggaactgtgacccgatggtggactttttggatagttgggtgcacattattcctgtgtggatcttagataacatactggaccaactcatcttccccaagctgcaaaaggaggtggaaaactggaacccgctcacagacactgttcccatccactcttggatccacccatggctgccccttatgcaggcacggctggagccactctattcccccatccgtagtaagctgtccagcgccctgcagaagtggcaccccagcgactcctctgccaagctcatcctccagccctggaaggatgtcttcactcctggctcctgggaagcattcatggtcaaaaacatagtgcccaagctggggatgtgtcttggtgagctagtcattaacccccaccagcagcacatggatgcattctattgggtgattgactgggaagggatgatctctgtctctagcctggtgggacttcttgaaaagcacttcttccccaagtggcttcaggtgctgtgctcttggctcagtaacagcccaaattatgaggagatcaccaagtggtacctgggttggaagtcgatgttctcagaccaagtgctggcacatccatctgtcaaggacaaatttaatgaggcacttgatatcatgaaccgggcggtgtcctccaacgttggtgcctacatgcagccaggagcacgggagaacattgcctatctcacccacacggagcggaggaaggacttccagtacgaggccatgcaggagaggcgggaggctgagaacatggctcagaggggcattggcgtggccgctagctctgtgcccatgaactttaaggacctcattgagaccaaggctgaggagcacaacattgtcttcatgcccgtcattgggaagcgacacgaagggaagcagctctacacctttggccgcattgtgatctacatcgaccggggagtggtctttgtccagggcgagaagacgtgggtgcccacctcactgcagagcctgatcgacatggccaagtgaactgtggcaggtccagaaccagtcagagacttgcccctaagagggatgtactgtaaataaacagtatttttagatcaccttcaaaaaaaaaaaaaaaaaaaaaaaaaaaaaaaaaaaaaaaaaaaaaaaaaa

SEQ ID NO: 24231 - DNA, 1781 bp, Homo Sapiens
gggccgctcccagctgggacgtgagtctctggattaggcaggcagaggcagttatgggcttctgcagtggcgagaaaggaagcgcctgaagggtcgtgaggctggggcgggacccggcaccgctggggcggccaggccgtgaggacttcaatggcgagcagcgtggacgaggaggcgctgcaccagctgtacctgtgggtagacaacatccctctgtcccggcccaagcgaaacctctcccgggactttagcgatggagtccttgttgcagaggtcatcaagttttacttccccaagatggtggagatgcacaattatgtccccgccaactctctccagcagaagctcagcaactggggtcatctgaacaggaaggtactgaagaggctgaacttttcagtaccggatgacgtgatgcgcaagatcgcgcagtgcgccccaggcgtggtggagctggtgctcatcccgctgaggcagcgcctggaggagaggcagaggcgcaggaagcagggcgccggctccttacaggagctggctccccaggatggcagtggctacatggatgtgggtaaggtggccttttccatttctccctcccggttggagctttccttctgtccttcttcctgtcacttgtaagagtggaagtagggagggggaagcaggagaatgagactccagcacagtcattcctccacttgccttgtctcaggtgtatcccagaaggcccgaggtgaaggtgtcccggacccccagggagggggtcagctcagctgggaccggccgccggcgcctcggcctccagcgtataaccgggcgttgcagggcgaccccagcttcgtcctccagatcgctgaaaaggagcaggagctgttggcctctcaagagaccgtgcaggtcctgcagatgaaggtaaggcgcctggagcacctgctccagctcaagaatgtgcggatcgaagacctctcccggcggctccagcaggcggagcgtaagcagcggtgagcggcggcccgggccgcgcggggacgcccgggtacccgccagagccccgacgccgcgccggacccacccaccgatggatagaccattgggagggcggagcccgctgctctcacgagcctgctggggcccgagtgccctccttccttgggatgggtgagcgtgggaggagatgggacaggaactctaggagcgcaggcccgggactgagccgcctcctaccactccggagatccgggtcaggagaatggaccgctttccagagcccagaagccacgtgcagagacctagcctgtcccccaaagcagtgtccaacaccttgggcccggccttgcatctcccggcgctgggccttggggggcggtcccttggctctgtccacacccccagaatcaggtccccgcccagctccgaggacggcggcgtctccatccacgctagttccccatgccctcagccatgggggaatctgtcccgggccgctgaggggctcccctgcccctcctgggagcttacctgggacccacctcggcgacggagaccgcagcagctggagaggaaggggtgaggcgtgggatcgccaggagtagggaggacatcgacgatgtgcccgtagcagtcgcccctccctcctcgcgcacggggtactgaggcggaaggtttgaaggttacggctcagggctgccccattaaagtcagtgttgtgttctaaaaaaaaaaaaaaaaaaaaaaaaaaaaaaaaaaaaaaaaaaaaaaaaaaaaaaaaaaaaaaaaaaaaa

SEQ ID NO: 24232 - DNA, 914 bp, Homo Sapiens
gcaggattcccatgggagatatgaggaccatggtgatttccaggcaccagttatgtcccagagcatcgtgtgcctgtgcagtggggttactgatagtccaggcatcagttcatattgtcctttatggcagatcctgcacaagggggttctctgtctctggacccactctgtcagcatggacatcctttttctttttccctggtaaggacatcagaaagaaagttacccctccagtgtttggagtcttggaatccttggcctgcctgcaggcctctgaatcctcagtgtgttagcccaaggtcaccttaggtaaaggaacatttctcctggtcttccaacaccctggaaagggaggctcttcaagaataggaaattcttcctagtatctaaccttggcctgcaactatgccatacatttaattgtagaaggtatggaaagttaggactgtggtggacccagttaaatcactggacagaagccatgaggcagagccagaaccagcttctggactccctgcatggagctttctactatcccaggttgttgggtcccttctcagtggccaaagatgctattttatgagccttgaggacatgacactaagtgaaaaaagcctggccaaagggccacatagtgtatagttctatttatatgaaatgtccaggaaagacaaaagcatagaggcagaaagcagactagtgctgtgggaggaatgggggatttgggaggtgatggctaaggggttatggggttttgggggaggtaatagaaatgttttaaaattggttgtgaaggtggatgcccaactctgcgaatacactaaaaggcatcgaattgtatactttaaataggtgaattgtatgctatgtgaattatatctcaataaaggtattttttccctgcaaaaaaaaaa

SEQ ID NO: 24233 - DNA, 1393 bp, Homo Sapiens
ggcagccatagtgcatagctactaaaatcagtgaccttgaacatatcttagatggggagcctcgggaaaaggtagaggagtcacgttaccatttacatgttttaaagaaagaagtgtggggattttcactgaaacgtctaggaaatctagaagtagtcctgaaggacagaaactaaactcttaccatatgtttggtaagactccagactccagctaacagtccctatggaaagatggcatcaaaaaagatagatctatatatatatataaatatatattctattacattttcagtgagtaattttggattttgcaaggtgcatttttactattgttacattatgtggaaaacttatgctgatttatttaagggggaaaaagtgtcaactctttgttatttgaaaacatttttatttttcttgtctttattttaacctttgatagaaccattgcaatatgggggccttttgggaacggactggtatgtaaaagaaaatccgttatcgagcagcattttatttacccctcccctatccctaggcacttaaccaagacaaaaagccacaattaacatccctttttcaatgaattttataatctgcagctctattccgagcccttagcacccattccgaccatagtataatcatatcaaagggtgagaatcatttagcatgttgttgaaaggttttttttcagttgttctttttagaaaaaaagaaaaacaaaaacaaaaacaaaaaaaaaaaatcacaccattgctcacagaattggcatctcatttttgggacctcccatctttctgttttgaaaagtgtacagtagtgcagtgttcctgatgtaactttatggcttacaatgttgacatgtctcaggttcatgtgttgcgattggtgttttccgtctcaggtagattgcaaagtgtaggccccacacattggaaaaaataataataaaacaaagcaaaaacaggaaattatggattttagttgtatattggtttatgtattttttcttaagtatacagtgcactgtttgaaatgtattgttgagtattactttgtacaggttgatcactttttttagagtgaagaaagaacaaacttgttttttgtgttttttaaaggaatataaaataatgaaggatgtataattgatgccaaataagcttgttctttagtcacaccgacgtcttatttttccctttaggccagttctgtttttaaggtgtacatggacaatgttacagtgtaagaaactccatatccatatgttcccattcgcattttgtattggttcatgtataccatttttacaaaaaaaaaaaagaaaaaaaagaagtactataaaatatctgtcttcttaaaaaaaaaaattaatgttaaaaaaaaaa

SEQ ID NO: 24234 - DNA, 4254 bp, Homo Sapiens
agctcgcccaaagagatacaacctaatccccaacctacttttagttttttttgtttttttttttatggttaaaagtaacttttgtagtttaaaaaaatctttcctctttcatataaataagaagtggaaattgcctttttattgtgtaatgtagaaaaccctcaagtgttttttccgagcttgggaaagattttgtgtaggaaatgtgcatagagtttgtattttatttttattagcagctgaaatgcctttggttttggcttctctctctccctctctctctctgtctctccttctctctctccccccaccacccacccccacacacgtcatctgcattgttattggagcctgtacttagagggattaagcccacaccctggcttccattccatatcaggtacaggatttgatgttattaacatttgtcgtcatacctcataagtcggtccctgccttgtctgtctaggcccatttggggctccctgtgagtgattcccctctctctgctatgctggagacggttccagcctggaaagcggccaagttcatcttctcactgtgagtggaagctggatcgggcccccgtagtcctggcagccctgttgtctggagggttcttgttgtccctcccattagccagggcggagactgtctgagctgtgcaggaggagggttgctagtaggttctgcttctgcttctctctgctccactgtctgcagcccagatcctgttgggcctggctggtgtctggtaaccatgggcctccactgacccatccctctcttttaaactgtcaggtcattatcaggcataggcagcctatagggcccaaagaaggcaaaaagataagatttactcaagtagcatttgggcaatgaggaaggaaaggtttcaaatttaggggcagaagtgagagaatgagccaacccatgtacctgctgcaactgaaccagactgggttttcaaggctcccagacgtagagtaggaaacgtgctcttctaaatgaggagggagaagataaaggaaacttctagcccctgtccttagtgctttgaggattttattttctcccttactacgcttgcttgacgtcactctctctcgacctccaaacagcaggactctttctctgggaaaccgtccttccaaaacggaatctatgtagacaatgggacattaggcagagagctcagatggcccttttaagggggctccaagaaccaacatcactgctcttttagataaacctctgccctccactccttgcttgagtgggttaaaggaactaacagttgtccctttaggaggacaaaatggggtcaagaggacacagaagagttgtatagcaccagattggttccaaataattaatggatgtgtgcacattttctgttcagggattaagaccagaatatcagtggatttgttttccccaccaagtggcctcttagactagtcattaacttatggttagctctaaagatttcaaatagtggcagacagtgtcttctgaatgtaagttttgagaaatacgagtctgtcagagcggccataagccataaagagtcaatctcttcattatatttttcatcatgtaaacaagtttcccatttccctttcttagattgcaccagtgaaggagatgttttgcaaagattcagagaactaatttttcactggataagacctgagtaacccagaccccccaccgtggttcttttcacagccctcgactttgcacttaaaaagggatattgtaaatgaaaggctgcagtgccagttttaagaaagaatttctgtgaagtgtgaggactctggagtctagctcacataaagagagtgttatataaaaatccgacagctgaactaggttgctcttttttggcagggagtggggatgagatttgacaccaatatgggcaaaattagataaccttttggttaatataaatgattttgatttggaggcctaatttgtagattgtgaaagcagcttttagtttaacttattcacagaccccttataattaccatgtttttttttttcttcctaaatctcttggttcagcttgtgaatcttacgtgcccgtaaagttgggatgttgaattggctcttctttgttctggcagtgagtcaagtgtccagcattttttcataagtgttttttaaaattgttctccagcattttatggctcctccctcccatgtcctcagacccagcaaaagcgtagaggcagaattagaggcctctccaggccagctcctctgcccacatgtcatacaaggtgtgaatttgagcacagtccagaaatggagacatcccacccccagttgaataatggcccattcatgccaaccttgccaacacggagagggcagagatgcactagaagaccttcatcctccccttcctctgccccaagtcactacagttggttctattgaagccagtctttaagaaacctgggttaaagacaccagcacttctgcttgctgggctggctggacctgtgaagccatgggcaggtagtgccctcttgagagtcattttatttggccaccttcaggtgagactatccatagacacatgctaggataggccccgctgggagggcagttacaggagagagtaggtggtggtgacgtgagggctgtgaaggatccagagacaagacttagatgtttcgttcattcactcattcattcagttactcctaagacttttcagtttcataaggaagagtgttgcctgaggccctagggaatattggggaatagaagggattgaggaaacattaataatagttattcaaaagacccaaatgcttatacttctctctcccttcttctctctctgacacacacacacacacacacacacacacacgtgcacattcctcccttacatgctcatttgtgccttaaatgtgccttataggtaaatccaggatgacaggaatccctcgtcactgggagattttgtatatattcttttattattagattgagttgggtgtggggaaaaatttttttctgaaggctcaaaagtggtttcctaaaagtgagccactatcagatttgcacatcaggagaaaagaaatagggttacgtccattaggaaaatcccagtttgcaggagtgcaatcacatcaaaaaaacaaccagccaggattaaaggtattataaatcctcatagcggaacatttctcagggcaaaggaacctggctcatttgaagattaatgttccatgcctttgtggtcaaagggtcagcacttaacacaggaaaaaactaggtgttgttttgttttgttattttggacaacataaaattcaggaatgttttatttagccttggtttctagaaggaagggaaataatatttcttgagcatttactagggtgttgcgtgctgtgctaagtaaattttaagtctttcagttttatagatacggaaaacaagggtgactctttaccacaggatgaataaagaactaagtaatatgggaaatgcagcaatttctggactagctgagccgattccttcctgtgagcacactgtaagctttcaagttctctgggcaggaattacagcacctgtcccctgcaatggccctgctgtgtgatgctcatcgcttcccttcgtgctggagcagtcccccaggtgtccatctcctatctttttgttccaatcttctgtgagttccagctagcaggctttacatctggggaaaggaaaaccaggggttttagctctgttctctgctcccatccttcgctcaccagctgagtgagaacatgaactttttgcaccatgtacccatggcttacactacttagaaaatcaccttttcagataaaacagtttatgagttcatagagaacaccagcactctttgacaaaactgtgagtgaccctttttaaacaatgctgagcaggccctgagctataatcaacggtgagctttaatgtctatgctgacagttaggttttgctctcttttgtaacaggttacgtagaccagcagtgtttaaatctaaatacgttgtgagtctgttatctgtcctatcgcgttttttaaatgactttttattctttatcatagctaagtaaataccaaaaaaaaaaaaagctttgtaggacacttgtacttagtttgggaaaaaaaaataaattgaaattgttatgcttttgtatttccatttcttgcaaataaatattttttcttaaatagtaaaaaaaaaaaaa

SEQ ID NO: 24235 - DNA, 1964 bp, Homo Sapiens
gtgaaaaaccactgccagaccaggccttctttgtccttcataatatgcactccaactgtgtttcatttgaatgcaagactgatcctggagtgtttataggtgtaaaggataatcatcttgctctgattaaagtagactcttctgagaatttgtgtactgaaaatatcttgtttaagctctctgaaacttagttgatggaaacctgtgagtcttgggttgagtacccaaatgctaccactggagaaggaatgagagataaagaaagagacaggtgacatctaagggaaatgaagagtgcttagcatgtgtggaatgttttccatattatgtataaaaatattttttctaatcctccagttattcttttatttccctctgtataactgcatcttcaatacaagtatcagtatattaaatagggtattggtaaagaaacggtcaacattctaaagagatacagtctgacctttacttttctctagtttcagtccagaaagaacttcatatttagagctaaggccactgaggaaagagccatagcttaagtctctctgtagacagggatccattttaaagagctacttagagaaataattttccacagttccaaacgataggctcaaacactagagctgctagtaaaaagaagaccagatgcttcacagaattatcattttttcaactggaataaaacaccaggtttgtttgtagatgtcttaggcaacactcagagcagatctcccttactgtcaggggatatggaacttcaaaggcccacatggcaagccaggtaacataaatgtgtgaaaaagtaaagataactaaaaaatttagaaaaataaatccagtatttgtaaagtgaataacttcatttctaattgtttaatttttaaaattctgatttttatatattgagtttaagcaaggcattcttacacgaggaagtgaagtaaattttagttcagacataaaatttcacttattaggaatatgtaacatgctaaaacttttttttttttaaagagtactgagtcacaacatgttttagagcatccaagtaccatataatccaactatcatggtaaggccagaaatcttctaacctaccagagcctagatgagacaccgaattaacattaaaatttcagtaactgactgtccctcatgtccatggcctaccatcccttctgaccctggcttccagggacctatgtcttttaatactcactgtcacattgggcaaagttgcttctaatccttatttcccatgtgcacaagtctttttgtattccagcttcctgataacactgcttactgtggaatattcatttgacatctgtctcttttcatttcttttaactaccatgcccttgatatatcttttgcacctgctgaacttcatttctgtatcacctgacctctggatgccaaaacgtttattctgctttggtctgttgtagaattttagataaagctattaatggcaatatttttttgctaaacgtttttgttttttactgtcactagggcaataaaatttatactcaaccatataataacattttttaactactaaaggagtagtttttattttaaagtcttagcaatttctattacaacttttcttagacttaacacttatgataaatgactaacatagtaacagaatctttatgaaatatgaccttttctgaaaatacatacttttacatttctactttattgagacctattagatgtaagtgctagtagaatataagataaaagaggctgagaattaccatacaagggtattacaactgtaaaacaatttatctttgtttcattgttctgtcaataattgttaccaaagagataaaaataaaagcagaatgtatatcatcccatctgaaaaacactaattattgacatgtgcatctgtgcaataaacttaaaatgattattaaataatcaaaaaaaaaaaa

SEQ ID NO: 24236 - DNA, 2652 bp, Homo Sapiens
gaaaggagttcatttaaggaaggagataggaagtgtaggccgatccatccacttttcttagtctcccaattttaagagaccctttcttgcacaaaattttttgtaactttccataagtaaagaggaaggtaatggagccgtagaaatgtcaacccatcaaagactagtttgtcgtgtcattacaacaaggcatttagggaacatctttccttaattttactaatagaccaaccaaggaagccttctgaatcgctagtaagattcagctctgggtgattcttcatttctaatggctcatagtgattacagtttatgttaataatcactcctacttctgtcaacctccagcaagagtaaattgatagcaggataaattaaaagtctgatcttaatgtcataaatgtgactagaatatggtactaactttttcgggtctagatagctggaatgaggcttgcaaacagtgttatctggagagagcttgctggtctaacaactttgtgtgataatttggcatctgattagagagcatgagtctgataaattttataatccacacagagatcatgctgtggttggacacatcatttaataatatttagcatgatataatattccattttctctacaggagcacagactctttctcatactggattattttacctttgacagtcatttttcaatgacagtaattttaaataaagcatcgtgtgcttatagaacctgtgcttgagtaaaaatagtcttcaaataaaaataatgaagtaaatttttacttaggccatgcttaattggaagcatagaacttaaattgagaaaaaaatccatatgatagattttgtttttctcatgcttcccttttgaataatagcaaataatgcagagtaatggttctaagagttcagggtagatgaagtctgtaggttttagaagtatagagttgaaaagaacctccaagaggacttatttaatgagtgaaataaatgtccttagatagattttgtccctaaactcttttctattgaaagtttatagtattgaaaatttgatgattattagtacctagtataaatcaacattcatctgatgttctctttttagatagccaagttataacttttttgaaaagacattattggactaagttagtaggtcagccttttcctttgatagtgtgtactcttatctgtcacccaaccttctccacaccctcttctcttcattcagttgtggacagcagtaattttttcaggacctttgcttcttagaggaaatacattttccttatttatatttttaaaagatgtttctattacattatatatagcaagagatctattaaggatccagaaaatcttaacctgtagaggatatgagttcctcatcataagaattagtttccttgagggttctttagtatattctatttacacagtttatgcataagtaaactctgtggccgatgtacataaaaaaacctatcacttttatgctcattcatcctcctaattcagtgtctgggtcatgagatgtttggttcatagcttcaaaaactgttcaagaagactgatttcagttctctctatgttgatcttccagttgaatctggagtcttctgattgtggaaaggagtagcagatcacattatactgaaaattgtccttttcattgagaaataaaggttgactgagctacctaaagtcactttcctttggactgtaagccttagagagaacaataatacctttgcttttcttgaggtagtattagaaaactctagttcccattgataggataaacttgttttctcgtttcatggtctttttatagaaaacagtcacaaaatcttgacatttggcatccctgaaaagctcaagtggccttttcaagtagggtatcatgtagtattctgcaggtttacagtcagtatcctgcaaggaaaggtgacaaacttcctgtgaagttaggaagaaatattagtaacccacacacttgaagtgagttttccattttaccttgtagaaattgtactagagatagaacaaatgaaattagttttcttttccaggtatatcctgtgagataccagcacagagtattttctctgagttctctcagggttaaagctcagtgagcttttcttttctctttggtagtgtggaaccatttgtaccgtagaaagaatagctggaaatatggaactccaatgtggcaatacagtaataaacagaaggaatgagtcagtaggataatatattggagtgatttctgtatatttcagttataatgttttttatatagtgtatatttcagttatttcagttataatgtgttttagaatgtggatttaagccaccttctcaccctttgcaccagtagctttgttaaaacattttattatgatcaaataacaagcctgttgcttttaagtaatctaagtattaacagaaggtaagtcttcaacttctccctgttctcacctgggccaagatcaattttctaaataaaaaatagctttgtaatttgtctccaacaaagaatgggaaatggaagggaacacaaaactgtggtcctgacaatactaattctacccgttttcaaataagaataattaaacttataaagtgatatactgataaaaaaaaaaaa

SEQ ID NO: 24237 - DNA, 1407 bp, Homo Sapiens
cggacgtgtgggctaatatggaggggctgaactagtagccacatcttgttcatcacatagactaatagaaaggaggctgtggctaaagcagaaatggaacttccggatctgaaattagccaatataatgttcttttgtatttgggtatttttcatcttaatttttacagcatatactcttcttaccagtatccttagaatccaaatgtctagataagttgaggacacatacctgcattgttgagcttctctactggggacgccccggcattattttattcccaagccagcagaccggcccagacagccaggctgtggctggtccagaccaactgctatggtggaaaatgcagcttccaggtcccactaccctgacatttccgtggaaggaagaacctggtggctcgtggaggaaaccagctttctatgagaaaggactgaaggattgcgcaccctgcacaagtacagattgaccaggaaaagacaagtgtcttctgtgtgtcacagggaaagccaggagtggccttctctgcaggccagcaagcctgcagcagcaggtgcccccacgtcaggtgctgactgtccgctgtccgctcctgtagaaggtagggagcacaatacctagggactaagggatgttcgccggttgtggtttgttttttttttttttccttggttaagaaatcaaatttgcagaatttaatctacaagttgtattatgctttgaaaactccatccctcctaagaatcttaaaaaacttgaaatgctcgccaaatgtccccatgggatttttgaccaaaagtaaggtgataactgaagaaatttttagttctttgatcacttcagtgacaatacccattaatgaatctctccatgatttggggttttttttcgttgttgttttttacacttcttaacctgttgatctatttgaggtcttttgtgtttatcaaacttattcttaagtttaaaaaagaaattaaaagggtggtttttttaagattttaaagtttgctaacatattaaaaatcttcaaatgcttattaaatagagcagttcttgccacccagtcttgtattctgtctttagctagccaaattgtccttgaatttgggttttccacaacctcaaagggttatttgaaatcttttgttgtattttaaaatattttttggaagagctgctaattttattttaaaaaacaaagttgtgaaaacatgcctcctttttaaaaaataacccctccatccaggatatggaatccagcaccacagtgcacaggtcagggctcggagggagcctctgtgcagatgtgctttctttacagtggctgtaaaaagtttgtatttattatgtataaaatgttgaataataaaaaaaatggaattaaaaaaaaaaaaaaaaagg

SEQ ID NO: 24238 - DNA, 46391 bp, Homo Sapiens
atacaggcgcctgccaccacacccggctatttttttgtattttaaatagagacgaggtttcactgtgttggccaggctggtctcgaactcctgacctcatgatctgcccgcctcggcctccctaagtgctgcgattacagacgtgagccaccgcacctcctgtatcattttctatggtctaaacttttctagctaaaagcctaggtagcttgtatgtatagcagcatacttggacatgaaacacacttctggttagattccagtcaagttctataggtgttattggtaggcagaaaggctgttgtagaattcttctggtgattttcagtccctgacccaggtatattgtcctttgagtcccagattaactaactatagcagctaagcatttgaatcagacttctcatagcaatgttatgggctgtctgatatattcaggatttgttgagcagataagctgtgtgtgatcttactcattctcagccatgccgcagacatacccatttccctttagtaattttttaatacagagaatgctattaactgttactggatatcaaataattttatttttctaatagtattttccaaatatttcttaaaattcttaaaatttaggttaaagtttgctggtctcttacatttaataaagctgggacttgaagacttaccatagttttcaactgcctttgcaagttcataaacttctaagggtaaaaagtgaataagataaattcagagttttaaggtaaaggctttatattagctttttttttttttaaaggttttttgtggggtttttttgttttttttttttttgagatggagtctcgctctgtcacccaggctggagtgcagtggcacgatcttggctcactgcaacctccatctcccgggttcaggcaattcttctgcctcagcctcctgagtagctgggactacaggcgcgtgccaccatgcccggctagtttattgtatttttagtagagatggggttttactgtgttagccaggatggtctcaatctcctgacctcataatctgcccacctcagcctcccaaagtgctgggattacaggcgtgagccactgcacccagcctttttaaagtttttaattgacatataattgtacgtatttacagggtaaataatgatgttttgatacatatataatgatcagatcagaacaattagcatatccatcacattgaacatttatcatttatttgtgttgagcctttagttcttttttttttttgagatagagtctcactctgtcacccaggctggagtacagtggtgtgatcttggctcactgcaacctccacccaccggcttcaaccaattctcctgcctcagcctccctagtaactgggattacaggcacctgccaccacacccaatttttgtatttttagtagagacggggtttcaccatcttggccaggccaggctggtcttgatctcctgaccttgtgatccacccacctcagcttcccaaactgctgggattacaggcatgagccacggcccccagccagagacagtcttgctttgtcgccaggctggagtgtagtggcgccatcttggctcactgcaacctccaactccctggttcaagcagttctcctgcctcagcctcccaagtagctgggattacaggcacgcaccaccatgcccagctaatttttgtatttttagtagagacagggtttcaccatgttggccaggatggtcttgatctcctgacctcgtgatctgcccactttggcctcccaaagtgctgggattacaggtgtgagccaccgtgcccagccgagcctttagttctaagtataataaataatatatataccaggcattcctattaaaaatcttaacttaaaaaaaattactcaaatgttactactggaatttttctccctgaattgaagatacatggttagatcattaacaataccacctaaatgaaggaaacatatctggatatccagtgtcacatacttttatgtatttatttcaggaattactattttgtcaccataattaggaaacagactgtgttctttatttgaaacacaacagtataaatactatagtaaagttgggtgcagtggatcacagctataatcccagcactttgggagaccaaggagggatggtcacttgagcccaggagtttgagaccagcctaggcaacatagagagaccttgtctcaacaaaaaaatttaaagttagccaggtgtggtggtttgcacctatagtcccagctactcaggaggctgaggtgggaggatcgcttgagcttaggaggtcaaggctgcagtgagccatgattgtgccacttcaccctgggcaacagagaaagaccctgtctcaataaaaaagaagagaaaaactggagtgagaactctcctcctctcataatcatagtatccacgttaggaaaatgcttctgagagtaacttaaagtactgtgtgtgcatcttccttcaaaaccttgcttttttctccgtttttgtaaggtgagaaagggaaaaaccttcaccgtagaaatactgtcttgagattaagatacaaataaaacatgttaaacctccatctaaagacattgcaacttattaaaacagaaaaatgtacctttgttatgtctttccaaatatccacacccacaccctgttcagctttgttaataatacagagatcagaaatgtgaagcacaaatgctgcttctccccctcctgttcccatgtcagagatggagaagaaagcacagtgagctgttcaccagtccagcggtgacctcggagtcctttgtaacagtgtttccaataacttctgccaataaaacagaatttgagttagaacctatctgctgtccctcaactagtgtctgatagctgagaatgtaattcgtttgtgtgtctattagaaaattaggcaggcaccacagacagtagcaacataaaggaacctgcttagaagaggtttttatggtgtgattgtgtttttttttttttaatttttgtttcctgaagtagaatccatagctcaaaacaagttttaagcctgagaaaatataatttgaggtgttttttatgctcctaatgaaaagatgaatgaatgcatcattaaaccttaacagtagagcagaatttcactgttacaaaccacatgggttctcctggttgtgctgctgttctctacctgtgtgtcactgagtttgagcatcattattgtttgaatcagaggacccactggaatcaaggcttcttggaattgcgcaagaatctgagaaaacttcaatctttaccagcatttcttaatgctttccatgacttttgtgcaattatataagttcagtttagacaaaatgctgttactttttaaggcattactaataactgaaaatagttacgtcattgcccatcaagggaaaagcacttgtaactgtcatttaaaaaaaataaaactataaaacaatatagaggggtatggtgtgtgtgtgttactttagaatctagagtttacggtctatttagtataaacagtataaacgtgagaccatctggttttacaaaataatttacaaagtattcattagctgctgtcacaaaatcatgatagcaaacttgaaatgattttatcagtcttatagaggaagaatctggtggatttgatccagcctattaaaaggttggcacaaaactgactgaaaggtctccagaaagtccccataacactcaagactgtaaactgtagccatgcacattttatgaaggatgaattttgtggggaaataggatcaagttgcaaaattatgaatatttgacctttgtcaaccatataatgaatcgtaagtgtagccatctctctctccctgttaggaaccatctttaaaatctgagactgtctatgaggagtacctttaacatttctcacgttctggcaggcacaaaaagatactttgtatggcacaatggaacaaatttgagggggctgagtggtaagtacatatgacttgtagaaaaaaaattattatacatcctttaactatgataagaaaaatatgtacagtgagccaccatggctgaccaacaaacatgaaatttcttataatgggaatggatttctaatccagttgaaatattttatatcaaatatttcaaaataagctataatttgcagcatatacatgtattgttagaacagtcaccctgctcacagactccactaagaagtacttcatccacaaaagtcgtaagtatccagcatatgtaaagcagagatctgggctgtctgaggctgcatctggaagcagccctggcccagtcttgagcccccatgacacctatggctagcagcccttacacatctgaaacaccaaccactctagctaaattccatgacatccttgtctttcatgtgacactgtgctcaacagctgccactgaagtagatgaccaaatggtaacacctctccttctccatatttcagtgagctcttgaaaaataattctacatcttatgaccctaatttaaataccctaattgaaatatcatttagggtatttaaattagggtcataagatctagaattatactggtaagaattactctggacataaaaatttgtgtgactggtcagatgtggtggctcatgcatgtaatcctagcacttttggaggctgaggtgggaggatcactggaggccagaagttcaagaccaacctgggcaacatagctagatccccatctctacaaaaaaattatattaggtgtgatggtgcatgcatgtagccccagctacttaggaggttgaggtgggaggatcacttgagcccaggagtccaaggcccaaagctgcaacaagccattatcataccactacacttgagtgacaagggcaagaccctgtctctaaaaaaaaagtatctgtcactatgtaatattgatctagatttccaccagtttttaaaccccattggttctgaatgattgccactaaatactacattttcctaggaaacgaaagtgggaagcctacaaggttagaacaaacatttttattaaaatattcatcttggaggggcagggggagggagagcatcaggataaacagctaatgcatgcagagcttaatacttcagtgatgggttaataggtacagccatggcaaacatttacctatgtaacaaacctgcacattctgcacagttgtgtacatgtatccgggaacttaaacaaaaaaaaaatggccgggcacagtggctcacacctgtattctaggacttttggaggccaaggcgggcggattgcctgagctcaggagttcaagaccagcctggtcgacatggtgaaactccgtctctactaaaatacaaaattagctgggcacggtggtgggagcctgtagtcccaactactcgggaggctgaggcaggagaattgcttgaactcgagaggcggaagttgcagtgagccgagatcaagccactgcactccagtctgggagagcgaaactctgtctcaaaaaaaaattttttttaatttttaaaatttcacattttagcaattaaaaaaatactcatcttgaaagatgttattaaatattttattgaggccaggtgtggtggctcacacctctaatcctggcactttgggaggctgggtcaggcggatcacctgagttcaggagttcgagagcagcctggccaacatggtgaaacctctctactaaaaatacaaaaattagccgggcttggccgggcatggtggctcacgcctgtaatcccagcactttgggaggctgaggcgggaggatcacgaagtcaggagattgagaccatcctggctaacacagtgaaaccccatctctactaaaaatacaaaaaaaattagccaggcgttgtggcgggcgcctgcagtcccagctactcgggaggctgaggcaggagaatggcgtaaacccgggaggtggagcttgcagtgagccgagattgcgccactgcactccagcctgggctacagagggggactccgtctcaaaaaaaaaaaaaaaaaattagtcgggcatggtggcaagcacctgtagtcccagctactcgggaggctgcgacaggagaatcgcttgaacctggggggcagaggttgcagtgcgccagtgcactctagcctgggcgacagagcaaaactcagtctaaaaaaaaaaaaaaaattgaaagcagggactcggttatttgtacaccaatgttcaatgcagcattattaacaatagccaaaaggtagaaaaatccaaatatcgattgatggatgaatggataaacaaaacgtgtatacatgcaatgaaatattattcaattttctggccgggcgcagtggctcacgcctgtaatcccaccactttcggaggccgaggcgggcagatcacgaggtcaggagatcgagaccatcctggctaacacggtgaaaccccgtctctactaaaaatacaaaaaaattagccgggcatggtggcgggcgcctgtaagtcccagctactcgggaggctgaggcaggagaatggcgtgaacccgggaggcggagcttgcagtgagccaagatcgcgccactgcactccagcctgggcgatagagtgagactcaaaataagatggttaaaattatattctcactggccgggcgcggtggctcacgcctgtaatgccaacactttgggaggccaaggcgggcagatcacgagttcaggagatcgagaccattctggctaacacagtgaaaccccatctctactaaaaatacaaaaaattagccaggcgtggtggcgggcgcttgtagtcccagctattcaggaggctgagacaggagaatggcatgaacccgggaggtggagcttgcagtgagccgatttcgcgccactgcactcgcctgggcgacaaggcgcaactccgtctcaaaaaaaaaaaaaagaaattatattctcacttataagtgggagctaaacattgagtacacatggatccaaagaagggaaccatagataccagtgcctactcaaggctgaaacaaggagggtgaggatcgaaaaatcagctctcaggtactaggctcattacctcagtgacaaaataatctgcgcaccgaactccaatgttgagcaatttacccatgtaacaatcatgcagaggtgccctttgaacttaaaaatttgaaataaagaaaaatgggtaaaattgggaaattgtatgtacattttgccacaataattttttttttttttgagacggagtcttgctctgtcgcccaggctggagtgcagtggcactatctcagctcactgcaagctccgcctcccgggttcacgccattctgcctcagcctcctgagtagctgggactacaggtgcccgccaccacgcccggctaatttttttgtatttttttttagtagagatggggttccaccgtgttagccaggatggtctcgatctcctgacctcgtgatccgcccgcctcgacctcccaaagtgctgggattacaggcttaagccaccgcacccggcaataaaaaaaaaattttttttttgagacagagtctctccctgttccccaggctggagtgcagtggcacgatctcggctcactgcaagctccccctcccaggttcatgccattcccctgcctcagcctcccaagtagctgggactacaggcgcccgccagcacacctggctaattttttgtatttttagtagagatggggtctcactgttagccaggatggtctcgatcttctgacctcgtgatccgcccgcctcggcctcccaaagtgctgcgattacaggctggagccaccgtgcccggcaataaaaatttttaataaaggaactgtatctgcgggaggctgaggcaggagaattgcttgaacccaagaggcagaggttgcggtgagttgagatcgcgccattgcactccagcctgggcaaggagagcgaaactctgtctcaaaaaaaaaaaaaaaaaagaactatatctgcatgtgggcaacaggaagaggaggactaaaggcagcttgaggttgacagtatttgtatttaagtaactgaaatgagaataaaatcaaatagcaggagtttggccaggcgcggtggctcacgcctgtaacaccaccactttgggaggccgagacaggcagatcacctgagcacaggagttcaagacaagcctaggcaatatggtgaaaccccgtctctacaaaaaaaaaaaaatcaaaaattttggtggtgcctgcctgtagtctcagctacttgggaggctgaagcatgagaatcgcttgaacccaggaggcagaggttgcagtgagccgagatcgcaccactacactccagcctgcgtgacagagtgagaatctgtctcaaaaaaaatacaaaattgaaaacaaaaaccaggagtttataatctcatggtcccctgcaataattagattattatgtttgaagtatcatgtccattttggggcacctgtttttaaaaagatatgctggccaggcacagtggctcatgcctgtattcccagcacttttggaggccgaggtgggcggatcacccgaggtcaggagctcgagaccagcctggccaacatggcaaaaccctgtctctactaaaaatacaaaaattagctgggcatgatagtgggtgcctgtaatcccagctacttggggaggctgatgcttggacccgggaggcggaggttgcagtgagccgagatggcgccactgcactccagcctgggcaacagagtgagattgtgtctcaaaaaaaaaaaaaatgttaagtaaaaaaaaagttaagtaaaaaaaagaatgttaagtaaatagaatcacatcatacagtgtgtaaccttgagggattggcttttttttttaattcagcagaattctctggagattcctcttgttgttgcatatcaatagttcattcctttttattgcagagtggcatggatttaccagtttagccactgaaggatatctggctattaagaataaaactgctataaacatttatgcataggttttatgtaaatagaggtcttcatttctctggaatacatgccaggagtgcaatagctggggttttttgtttccgttttgttctcttttagagtcaagacctcactctatcgcccaggctagaatgcagtggtacaatcacagctcaaaggaatgcagcctcaaattcctgggcccaggtgatcctccagcctcagcctccggagtagctaggactaggcacctgtcaccacactcaatgaagtgtgtgtgtgtgtgtgtatgtgtgtgtgtgtgtgtgtgtgagagagagagaaagagtttagagacagggtggagagtcttgctatgttgccaaggctagtctcaaactcctagtctcaagcaatcctcccacctctgtctgctttattttgtaaaaatacaaaaaattagccaggcatggtggcgcggacctgcagtcccagctacttaggaggctgaggtgggaggatcgcttgagccaggggctgtcaaggctgcagtgagccgtgatcatgccactgcactccagccagggcaacaagagtgataccctatctcaaacaaaacaaaacacactaccgccaggcgcagtggtgcatgcctgtaatcccagcactttgggaggctgaggcagatggatcacctgaggtcaggagttcgagaccagcctgaccaacatggtgaaacccctaataaatctctactaaatacaaaaaattagccaggtgtggtggcgcatgcctgtaatcccagatacttgggaggctgaggcaggagaatcgcttgaacccaggaggtggaggttgcagtgagccaagatcacaccattgcactccgtcctgggcaacaaaagcaaaactccatctaaaaaaaaaaaaaaaagatactggagatactggcaaactttccaaagtgactgtaccattttgcatttctacctgcaatgtatgagtcattctgtttttccacctcctcaccagcatttggtgttgtcactgattttttttgtttttgggtttttttggccattctgattggtagtgatatctcgttgtggttttaatttgcattctctgatggctaatggtgttgaacatctcttcatctgcttacttgccatttgtattacatatatcctctccaatgaaatctcttttcctgccatttgctcatgttctaattggattgttttttgacagctgaattttaagaattctttctttatatatgctacctattagtgctttgtcagatatgtggtttgcaaattctttctcccactttatagctgtctgttcctcctcttaactggccctttcacagagcaaaagttttaaattctaatgttcaatttatcgattgttccacttatagatcatgctattattggtgccaagtctaagaattctgtctggccctagatcctgcaaattttctcctctttcattctaagttttttttttttttctggctttttttgctgttgtttgtttttgagacagagtctcactctgtcacccaggctatagtgcagtggcactatctcggctcgctgcaacccctgcttcccaggttcaagcgattctcatgcctctcagtctcccaaggagctgggattacaggcgcccgtcaccatgcccggctaatttttgtatttttagtagagatcgggtttctccatgttggccaggctggtcttgaactcctggcctcaagtgatccacccatctcagcctcccgagattgtaatctcgggattacttgtaatccaagtgctaggattacaggcgtgagccaccgcgcttggccttaattctaaaagttttatagttttaggtttaagttcatgatacacgttgagttaatttttggataacatgtgagacataggtcaagggttttttgttttggtttggtttttgtttgcctacagatgttcaattgctccagcaccatttgttaaaaatggtgtgtttttcctctactgaattacttttgtacctctgtcaaaattcagttgggcatatttgagtgagtctttttctgggttctctattctgttccattggtctatgtgtctatcctccaccaacaccagtcttgattactgcagtcgtaaaaaataagtcttgaaagcaggtaaagagattcctcccactttatttttcctttccaaaattgttctagctattctagttcctttgccttttaatgtaaattttagaataggcccggctcagtggctcatgcctataatcccagcacttcgggaggtggaggcaggcagatcacctgaggtcaggagtttgagaccagcccggccaacatggtgaaaccccatctctactaaaaaaatacaaaaattggctgggcgcggtggctcacgcctgtaatttcagtactttcggaggctgaggcgggcagatcacctgaggtaaggagtttgagaccagcctgaccaatatggtgaaatcccgtctctactaaaaatacaaaaattagctgggcatggtggcaggcgcctgtagtcccaggcgtggtggtgggcacctgtagtcccagctactcagaagggtgagacaagagaattgcttgaacctgggaggcagaggttgcagtgagccaagatcatgccactgcactccagcctgggcgacagaatgagactccgtctcaaaaaaaaaaaaaaaaaattagccaggcgtggtggtaggtgcctgtaatcccagctacttgggaggctgaggcaggagaatcacttgaacctgggaggtggaggttgcagtgaaccgagatcccaccactccacttcagcctgggtgacagagcgagactctgtctcaaaaaagaaaaaaataaaataatcatcttgtctataaataaaaaaaaaacttactgggattttgataggaattttgttaaactgtatatcaatttggtgaaaactgacatctttacaatattgaatcttccaacccatgaacaccgtatgtctatttattgtaaaaaaatgtgtagaccaggtatggtagctcatgcatgtcatctcagcactttgggaggctgaggagcgatgattgcttgaggccaagagttggagaccagcctgggaaacttggtgagacacatctctacaaaaaataccaaaaaattagctgggcatggtgacacacgcctatagtcccagctactcggaatgctgaaggaagaggattgcttgagcccaggagtccaaggttgcagggagctgagatcacaccactgcactccagactgggcaacaaagggagcttgtgtctcaaaaatatacatatattttttatttctcttatcagtgttgtgtagttttcagcacacaagtctgaagtatgttttgttagatttacacctaactatttcactttttggatgattagaagtggcatattcctttcaatttcagtgtccacatattcttagctagtatatacaaatacaattgattttggtatgtttatcatgtattctgtaaccttgctgaactcatttagttgtaagagttttgctagattccttgagattttctacataaaccatgtgtcatctaaaaatgggacagttttatttcctcctttccaacctgtatgccttttacttccctttttttttttttgagacagagtctcaatctgccacccaggctggagtgcaatggtgcgatctgggctcactgcaacctccggctccctggttcaagcgattctcctgcctcagcctcccgagtagctgggattacaggtgtacaccaccacatctggctaatttttgtatttttggtagagacggggtttcaccatgttggccaggctggtctggaactcctgatctcaggtgatccacccgcctcagcctcccaaagtgctaggattacaggcgtaagccactgcgcctggctacttccttttttttttttttttttttttttggtcttgtcccactggctagaagttctagtgctataataaataacagtgaaagagtgatgaggcctttcttgccttgttcccaattttaggagaaagtattcagcatttcaccattaagtacacttgtcccttgatgtccatgggggattggctccaggatcccccacgtataccaaaatcccaggatcttcaagtccctgagataaaatggtgtagtatttgcatataacctaggcataccttcctgcatcctttaaattatctctagattacttataatacaatgtaaatgctatgtaaatagttgacgtaccatatagtctagataggaaataatgacaaggaaaaaaaggctgtacatgttcagtacaaacacaacatccttattgggttttttcccccaagtatttttgatcccttgttggttgaatccacagatacagaggaccagaggtataacatcggcgggtttttgtacctgctccttatcacattgaagaagttccccttctacttctgtttttctgagaatttatatcatgaatggatgtttaattttgcaaatgttttgtgtgcacctattgatataatcatgtgatttttcttcttgagcccattaatatggaagaatccattgatttattttgaaatattgaaccagccttgcatccctggaaaaaaccccacttggccatggtgaataatcatttttatatttgctaatattttgtcccattaacaaaaattttaaaaatgtttgtagctatcatttgctaatattttgttgcggatttttgtgtgtatattcatgacagttattatttctgtagttttcttttttgtactctgtctggttttgttatcagagtaaaactagcttcataaaattatagatgatcctcaactttttgttttttcctttgagacaagttctgggtctgcccaggctggagtgcagtagcacgatctcagctcactacagtttccacctcccatgctcacgcttgtaataccagcactttgggaggccaaggcaggtgtatcacttaaggtcagtagttcgacaccagcctgggcaacatggcaaaaccccgcctctactaaaaatacaaaaattagccaggcatggtggcatgtgcctgcagtcccagctactcaggagactgaggcacaagaatcacttgaagccgggaggcagagtttgcagtgagccgagatcacaccactgcactccagccagggcaacagagtgagattctgtctcaaaaaaaaaaaaaaaagttatagggctattcaaattatttcatcttggatgacttgtggtaacttgtttttgaggaagtgatcaattttgcctaagtcattagatttttttttcttttttttttgaaacagggtctcactctgttacccagctgtagtgcagtggtgcaatcatggctcactgcagcctcgacctcctaggctcaagagatcctcccacctcagcctcccatgtagctgagaccacaggtgtgtggcaccatgctgggctaatttttttttattttttgtgaggcagggtctcactatgttgcccagaccagtcaactcctatgttcaagcaatcctcccacttcggcctcccaaagtgctgggattacaggtgtgggccactgcacctggcttggacttatctatttctacttttaggtctgtcagttttcacttcacatgttttgcagtgctgttttttagtgcatacatatttaggattgctatgtcttcttagtggattgactcttttagcatcgtataatgtcccgctctttctacgttaattttctttgctccaaagtccactttagtttattttagtatagtcactcttgctttcctttgatgaatgcttgtatgacacaacttttttcatccttttacttgcaacttgcctatatcatatctgtagtgaatttgttgcagataacatacaactggttttttttaaaatccactctgccaatttcttttaattggcatatttagaccatctgcatttaatgcaattgttgatatgttagggctgaagtctgtcattttatttttttctatttttctaatcagcttcctcaggttgaagtgattattttatttttgagacaaggtatcactctatcacttacactagagtatagtgccgaaatcgcagctcacggcagtcttgacattggtgggctcaagtcatcctcctgcctcagcctcccaagtagttaagaatacagttgtgcaccaccacactcatgtttgtgtgtgtgtgtctgtgtgtgtgtgtgtgtgtgtgtgtgtgtgtattgtttgtagagatgaggtctcattatgttgccaaggctggtctcgaactcctgggctcaagggatcctcttgccttggcctcccaaagtgctgggattacagatgcgagccagcgtgccccacctcattttattttttgttttctgcttgttctctgtttttctgcctttctgtgttaaacattttttacaattccattttatctatagtgtttctcttctgagtgtgtctctttgtatagctttttaagtgatggctcatatatacatgacttatgacagtctactaatgtcatcattttaccagtttgagagaaatataaaaaccttacctccctctgtgtcccttcaccattcccagtttatacgataattgtttgaaatattttctccatatagatttaggactatattagataatgctataatttttttttttggagacagagtctcgctctgtcacccaggctggagtgcagtggcacaatctcagcacattgcaacctctgcctctcgggtacctgggattataggcatgtgccactatgcaaagctaatttttttttttttttttttttttttagcagagacggggtttcaccttgttggccaggatggtctcgaattcctttttttttttttttttttttgagacggagtctcgctctgtcacccaggctagagtgcagtggtgcgatctcagctcactgcaagctctgcctcccgggttcacgccattctcctgcctcagcctcccgagtagctgggactacaggtgcccgccaccacactcagctaatttttttgtatttttagtagagatggggtttcatcgtgttagccaggatggtctcgatctcctgacctcgtgatccacccgcctcggcctcccaaagtgctgggattacaggcgtgagccaccgcgcccggcctcgaattcctgacctcaggtgatctgcctgccttggcctcccaaggtgctgggattacaggcatgagccactgcgcccgacctaaagtaaaaattatagcattcccagcactttgggaggccgaggtgggcagatcatgaggtcaagagattgagaccatcttggctaacacagtgaaaccccatctctactaaaaatacaaaaaattagccaggcgtggtgtcaagtacctgtagtcccagcttcttgggaggctgaggcatgagaattgcttgaacccgggaggtggaggttgtagtgagccgagatggccccactgcactccagcctgggcagcagagcaagactctgtctccaaaatgaatttttacttcaactgtcatacataatttagaaaactcaaaaggataagaaaagcttattgcatttgcccatatttttactttcgtgtttgttttttctaattttccaaggtccttgttttattgttttctttctttttagagaacttccattagccctttcttggggaaggcctactggtgacaaattctcttagttttccttctgagaatgtcttgattcccccttgattcctgaaggacattttcactacatatagcattctgagttgacaggtgtttttttgtattcgctttttgcatgaaaaacattttgccacttctgctggcttctgtggtttgcagtgagaaatctgccattcaaatgatttttcgtctttaggtaaggtgttttctctggctgctgtcaagatttcttctctctttagttttcagaagtttaattgtgatgtgttgtggcatggatttctatgggtgtattctgtgtagtgtttgctcagcttcttgaatctatagatttttcttgccaaagttggcaagtatccagccattattttacccattaccttttcaacctggccctctttattctctcctcctggaaccctgaggacagaaatagtagatcttttgtagtatttccacaggtccacaggctctgtttttaattttgttttcagtctatttttattttctctttcttgttcagatcaggtaatttctattgtttttttgtttgtttgtttgttttttggagacagtctcactccattgcccaagctagattgcagtggtgcgatctcagctcactgcaacatccatctcccaggttcaagtgattttcctgcctcagcctcctgagtagctgggaatacaggcacgcaccaccacacctggctaattttttgtacttttagtagggacagggtttcaccatgttgcccaggctggtctcgaactcccgagctcagacaatccacctgcctcagcttcccaaagtgctgggattagaggtgtgagccaccacgcccagccttatttctactgttctatcctccagttcagttatttttttttcttctgtcacttccatgtctttttttcctcccagcttctgttgggaaaaatgtcacttccattctgttattgatcccatccactgagagtttttaaattcagttatttgcatttttcagttctaagacttttgttctttttttttttttttgagacagagtctttctctgttgcccaggttggagtgcagtggcacgatctcagctcactgcaacctctgcctcctgggttcaagcgattctcctgcctcagcctcccaagtagctgggattacaggcgcgaaccacgacacctggctaattttttatatttttggtagagatgaggtttcaccatgttggtcaggctggtcttgaactcctgacctcaagtgatctgcccgctttggccttccaaagtgctgggattacaggcgcaagccacccttcctggaggatacctgaactaaaaatacaaaaacttacccaggcgttggtggcgggtgcctataatcccagctacaggagaggctgcagaaggagaatcgcttgaatccaggagttggaggctgcagtgagctgagattacaccactgcactccagcctgggcaagagagcaagaccatacaaaagaaaaaaaataataaccttcaatgccttcccataagatctgtaataaaatccctgcatgctctggcccctgcctgcctctctgacatctcttactactttctgcttgctcagtaagctccaaatttatttactcaacacataatgagcacatacaatgtaccagtttttgttaccaataaacaaatcaaaattcccttttcttgctgaggacatacaaaaaacaataatcctaatacacaagtaaatgtcaaaatatgtttgtttgttaggagatagggtcttgctctgtcactcaggctggagtgcagtggtgcaatttcagctcactgcagcctcgaattcccaggttcaagggattctcccacctccttagcttcctgagtagctgggaccacatgcccaacttagaaaaaatatgttagaaggtacatgtaaattggatggggaagtagatcatgtaggaccatttaaaggacttcagcttaaatgtcactcttcacagaagtcttatttaatcacccaatttactgttgcctccttctcccctcaatctcattaccttgttttcttcacaacacttattgatacctgagactgtttttttttttttgagacagagtttcactctgtcactcaggctggagtgcaatggcacaatcttggctcactgcaactgtcacgtcccgggttcaagcaattctcctgcctcagcctcccaagtagctgggattacaggtgcaagccaccacacccggctaaattttgtattttgagtagagatggggttttgccatgttggctgggctggtcttgaactcctgacctcaggtaatccacccacctcggcctcccaaagtgctgggattacaggcatgagccaccatgcccggccagagacttttttcaatgcagcattttttactaatttattatgagatagggtctcgctctgtcacccaggctggtatgcagtggcgccatctcagctcactgcaacctccatgtatgggctcaggtaatcctcccccctcagcctccagagtagctgggactaaaggcatgtgccaccacgcctagcttacttttgtattttttgtagagacgtttcaccatgttggccaggctggtctggaattcctggactcaagtgatccggctgccttggcctcccaaagtgctgggattacagacctaagccaccccgcctggcggatacgtgaaacttttttttttttttttgagataaactctcactttgttgcccaggctggaggcacgatcttggctcactgctacctccacctcccgggttcaatccattctcctgcctcagcctcctgagtagctgggactacaggtacccgccaccacgcccggctaatttttttgtatttttagtagagacagggtttcaccatgttggccaggctggtctctaactcctgaccttaggtgattctcccacctcggcctcccaaagtgctgggattacaggctagagccacctcgactggccctgagacttcttgatgtatttatttgttgacttgcatattattccctaactaggggtttatttgactctgttattatgtctcttctgtttaaaacagaacctggtaaatatcaatacttttattgaatgattgataaatatgtcttcaagaccttaatttacaatgggtttctagtattcctgtcagggcctgtaggcacacaacaaattaacaacagaaattttaacaaagtcattaaaacttgggctaagaaaaactttgtagggttcttgtagccctttaaggtctcacacaatttttctttccaagtctggataaagctgtggtggtcttttcccggatctgttgttgctgtttataactaacaaacaaatctcagttctttctcttttattattttttttgggggggaacggagtctcgctctgtcacccaggctggagtagagtggctcgatctcggctcactgccacctccacctcccgggttcaagagattctcctgcctcagcctcctgagtagctgggactacaggcgcgtgccaccacacccagctaatttttgtatttttagtagggacggggtttcgtcatgttggccaggctggtctcaaactcctgacctcaggtaatccacctgcctcggcctcccaaagtggctcccaggcgtgagccaccgcgcccagcctattctttctctttagcaatagagtcagcacgctccattacccgccagttatcttttaagagaaaatacaaggcttcaaatgcacctgtacgacatctaagagtgctctggcagagtcacacctctgcaaggttagagatgtcaaagggagtcctggtctagccagaaatgggagagtgacaaagtacaggtgcttgggtcgggtgggatggctcactcctgtgatcccagcactttgggaggccgaagtgggaggatcacttgggcccaggagttcgagaccagcctaggcaacatagtgagaccttgtctctattttttaaaaaaattaaaaaagaaaaaaaaaaaaagcggctctagcactttgggaggccgaggcaggcggatcacctgaggtcaggagttcgggaccagcctggctaacgtggtgaaaccccgtttctactaaaaatacaaaaaattagccgggcgtggtggcgggcgcctgtaatctcagctactcgggaggctgaggcaggagaatcgcttgaatcctggaggcggaggttgcagtgggccgaaatcgcgccattacactccagcctgggcaacaagagttaaaaaagaatgcctcacaaaaattcaagaaatacagcgactgcagatgggtcggtttcactacagcacaagcagcggaaaaaggacacagatcggggagaaatcaccctacaaagatgacaactgaggaatgcggagtggggactgacacacgttacggtgaaaccgtgcaccacgaccaaaggcggtcctaggactgcgactatgtgggcgcagaggccaccccccaggcttggcgggcgagtaaaggcagggctgggggcctgctcagtgtggccttagggaggaacttcgggggtctcctctctccccatcgaatccctgagcagttcccgaacagaaatcggagaccagacggtgcctgggccccagccctcccacggggactgcaccttgggcctggctcggaagcgggtcagagtctgcgaaagaccagcgaggactcttgggtttcggggcaggccgcgggcgcccacccacgccagcaccgggagccgcgcggcgactcggcgagcccggcaggcaggacaggactgcggcgcaggtctggctcaggcggaggaagcagccgccgccccagctgacggagtgcggccgggggcttcccagaggaggcggcgacgtcgagccctttcgaacgtttccacccggctagctcacgtagcctcggccccgcccggccccgcccggccccgccccacccactccggccaccgccccctccccggcctacagttcgcgggtggggcgacctgcgacagcccctttaagaggcgtggtcacgtgctccgcccccacctccgcctcgcgcgccagtaaggggtggggtgcgggaggaggtgccggggaggtggggggagcgaagtgtgcgctgctgcgcaggcgcggtggtcggacgacagaccgtgtgtttccaaaatggcggcagcgatggatgtggataccccgagcggcaccaacagcggcgcgggcaagaagcgctttgaagtgaaaaaggttgggtctcgccagcgccttcctcagggaagctagagaggcgcggatctggctggcaggcccgaggatggtcgaggcgcggagtaaagggtttcatttcagggcgttcctgggaccgggtaccacgaaaggaagccggggggcgggtcttagagttgatcggcgtgacggcggcccactgttgggggaagtgttggtttcgctgtgaggctaaggggccaatcacagagctgcttattgagatacgcggggttgcgacttggcggcgggagccaagcgcttgagctgtcactggagtggttgagaggtgggggaaggacagggtagggtggggtggggtgggtggaatggggagtcgaagcgaatgcggcggtggaggatggggcagtgcggcgagagcctggaacctgaggtcctaccgcattagaggcctctgaggaccccccttggtgatcttgctccgcccctttttgaagcttggggtcctctcacttggaggggtcctctcacttggagggatcctcgctgaaccgaggcctcacactgcctggttagagtctggagtgtaatgcttggctcttctgagacgtctgttggcttttcacacaaccaccccactcttgggttctctgtcacgtccagaatctcccccttccaaaataataataaaaagcatggtggaacttgttaagaaaatccgagcccaaatcctgtggcagttagggagggttgagtactagtcgcgaacgacttggtaagcgtgggaaagcaaaaatggaacgtgtctttttgcatgaaatgccttttagtggtttgccacagtttgggagaacagtatcgattctcacctaacatgaaagctgttcaaaatggagattctaaaatagggaagatattcctagaacatctggctaaacactgacaatatcccccgtcctagtgctttttggtgtctcattgtggccactgctgctcagttacagccagcagccatattgaaaaataatagaagtaggggcttttcctccaccttgaagctgtgatgtgaaaagtggtaaagaagttactaggcactgagaatggggtttgaaagcgaagaaggtttgggagtatttgtaattgaggaagccagagttgaatgaatgaaattctgttaaactcttactggaattattatcttaatagaagagtctaaacatataaaagttgagaacatcagtttattttatggtaagaatcaaaattctagtgaattgtagaatttgttatgaagtaatctaagatttaagtgatgaccttgttctgtgtactgacacgggtatttaattatccagcttatcccatgattacccattttatgatccagtcattatcttagttcattctgttctctagctttcacttcattgctcatgcttccagagctgtgtagagcagatacttattcagattttgagctcttctgcaactgccaccaaaacctgcacagaaattcaagtttgtgccctttttttttttttttttttttttttgagatggagtctcactctgtcgcccaggctggagtgcagtggcacgatcttggctcactgcaacctccgtcccccagattcaagcgattctcctgcctcagcttcccaaacagctggtattatagacacccgccaccaggcctggctaatttttgtatttttagtaaagataggattttgccatgttggccaggctggtcttgaactcctgacctcagtgatcggcccgcctcggcctcccaaaatgctaggactataggcgtgagccactgcacccggccagactaaattattttaaactataggaaacaaattaaaagatgacattaatttctgtgttcatatactcagccttttggagaatagaacatacgtgtagtctactgttgtctttggtataataagattaacgtaatatccaaaaacttttgtttggtggttccctgtggccaaagagatgataactgcagctgcagcctgaggtcctaaagagtatgtgtgtgtgttacaagcagaatgcactgttccctctttttgtctttgcagtggaatgcagtagccctctgggcctgggatattgtggttgataactgtgccatctgcaggaaccacattatggatctttgtaagtaattggaggaggatgggaggaagttgagaaggttgcagagattgtggctatcttgatgtgactgattttcttcttcacacgaggagatagcaagcctactctgagcactcggtcttctgtatctagtctgttggtgtgtttgaaatagagtagtttttttatgatgtcctggaggcatacccagctctcagaataaatctactcaatctaaagatggcagggacacatttagaattaattgtggacgacaggcactgttgatttttcctgcatatcttccatcttgtacctagactcaaaggtagaaatagtgaaaggaggaaaataaactttgagctaaaatattctgaggccaagcgcagtggctcatgcttgtaatcccagcactttgggaggccaaggcgggcagatcatttgaggccaggagttgaccaacctggccaacatggtgaaaccctgtctctactaaaaatacaaaaattagctgggcgtactggtgcatgtctgtaatcccagctacttggcaggctgaggcaggagaattgcttgaacctgggaggcagaggtggcagtgagccgagatcacaccactgcactacaacctgggcgacacagcaagactcaaagtctcaaaaaaaaaaaaaagtctatctgatctaatttttgctggtcattgtttacaaaggaaagaagcgttaaggagtgaggattttgtatgttaggcccaaacataataaaaaggaaatcattgccaacatctaaataaataattaattgcactaaagaaatttcatttaaatctccacatattttattacatgtagtggtcagcacatagtgatctgattatagtctttgatgaactgatttcctgtccttacagtagaagggacaagaatgttgatcacaccaggaacagttgaggttactttttcatccgggaactaaaatgatttgttactgaggccagaaatggaggaaagaaactttaagtttctagaaatggaattataggaacttatttttcagatcactcacctgcctttacaactttgtcttgagtcactcctgctcactctgttagtttacctggatgcttttttttttttttaactgaccacggtggccaaagcagccatggccccggccagttttccattttttttccttattctgagatggagtcgcccaggttggagtgcagtggcgtgatctcagctcactgcaacctccgcctcccgagttcaagtgattctcctgcctcagcctcctcaatagctgggattacaggcacctgccaccacacccagctaatttttgtatttttagtagagacacagttttaccgtgttggccaggctggcctcgaactcctgacctcgggtgatccgcgtgcctctgcctcccaaagtgttgggattacaagcataagccaccatgcccggcctgcttttccattcttaagtgtccatgctctattttagagcccttaaatagcctagtcttttttgcctagaatattcttcacctcttctcttccttggttttgtctaacccagcactgtccaatctgaatgtaagccagtacaaacacgtatataattttaaattttctttttcctttttttttttttttgtttttttcagagacgggatctcgctttgttgcccaggctggtctcgaactggcttcaagtgatcctcccactttggccttccaaaatgttgcgattataggcgtgagccactgtggctggcctgaaattttctagtatccacattcataaagtaaaaagaaaataaaaaggtgaaattaatgtattttatttaaccttatatagtcaaaatagttttacttcaacatgtaattgatgtaaaaaaaaaatgagatattttacattctgtctttgtactatctttgaaattctgtgtattttacacttacagcacatctggattcagactagccacatttcaagtgctcagtagtcacatgtggttaataactactttattgtgcaatgtaagactaacccatagttgagctttagatcttatcttaaacttgctcagatgttttcaacttgaaaagcacgaatcaaatattttctgttggaaagcagtcatggcttatactggtcatgtattgcccttggcttctttgagctttgacactgtttatctcttcacactacagccaaggaagatcagcacctaccataatgtttaatatagatgccgtgaacccatcacagaaaaacatatgcagggtttcaaatgtgtttgggtggggtctttgattacatgcttgccagtttctcggccttgcattttcacaaggagttatacccagagaaaattttactttcttggggctctgttttgaaaatagttaatgatttttaatgattttatataaccctgatttttttttctctatatttaagtcagtgtatatgtgtctctggatatgagagaatgtacttcttaaaaggaccacagaagacaaaggcgatctatattgtcttctcttagagtgaaatgcttgagacatcatattaggctttcagtgggatacctgttttgtttcataatatattttgaatgtcagatgaagtaggatattgaaatcctataacaaaaacttatgaaagtattttctaagtcctatcttttatttatccaatgaatatatcctgagcatcctggtaggcaccaggataaaacaatgagtgagatcgggcaggtctttaccttttttttttttttttttttaaagacagagtctctgtcgctcaggctggagttcaagtgattctcctgcgtcagcctcccaagtagctgggactacaggtgtgggccacctcacccggctcattttttgtatttttatgagagacagggtttcaccatgttggccaggctggtctcaaactcctgacctcaggtgatccattcgccttggcctctcaaaccgctgggattacagacatgacccattcaaactcctggcctcaaaaaaaccaccccccttggcctcccaaagtgccgggattataggtgtgagccaccatgtccgacctcaagtctttacctttaagaaacacactcttaggccaggcgtggtggcttacacctgtaatcccagcactttgggaggccaaggcgggcagatcacaaggtccagagatcgagaccatcctggctaacaaggtgaaaccccgtctccactaaaaatacaaaaaattagctgggtgcgatggcgggcgcctgtagtcccagctacttgagaggctgaggcaggagaatggcgtgaacccaggaggcggaggttgcagtgagctgagatcgcgccattgcactccagcctgggtgacagagtgagactccatctcaacaacaacaaaaaaaagaaacatactcttaggcggggcgcggtggctcatgcctgtaatcccagcactttgggaggctgaggcggggggatcatgaggtcaggagatccagaccatcctggccaacacagtgaaaccccatctctactaaaaatacaaaattagccaggcgtggtagcacgcacctgtaatcccagctacatgggaggctgaggcaggagaatcacttgaacctgggaggcagaggttgcagtgagccgagatcctgccattgcactccatcctggacaaaaagagcaaaactctgtctcaaaaaaaaagacactcttggccaggtgaggtgggtcacacctgtaaacccaagactttgggtggctgaggcgggcagatcgcttgagcctaggagttcaagaccagcctgggcaacatggcgaaaccctgtctctacaaaaaattagccaggcatggtggcttatgcctgtggtcccagctacttgggaggctgaggtgggaagatcccttgagcccgggaggcagaggtgacagtgagtcaagattttgccactgcactccagcctaggtgagagagtgagaccctatctcaaaaagagaaacactgtttattttttatttttatgtatttttttgttagagacagggtctcactcaagtgcccaggctggagcgcagtggcacagtcatagctcactgcagccttgacctgggatcaagcagtcctcctacctcagcctctaagtagctgggaccacagacgtgcactaccacacctagctaattttttttttttggaggcggagtctcacactgtcacccagctggagtgcagtggcacgatctcggcttactgcagtctccaccttctgggttcaaacaattctcctgcctcagcttcccgagtagctgggattacaggtacccgccaccacacctggctaattttttgtatttttagtagaaatggggtttcactatgttggccaggctggtctcgagctcctgacctcatgatcacccatctcggcccccaaagtgctgggattacaggtgtgagccaccgcatctagctgctaattttttaattttttgtagagattgggtcttgctgtgttgtccaggcttgtcttgaactcctggactcaagcaatcctcctgccttgcccttccaaaacactgagcttacaggtgtgagccactgcccctggccacacacttttattatagacactgaggagaagtctgagtgccataacttaaaaaaaaaaaaaggatttatatgggaaaagaacttagcaagtaaagaaaaaaatggatttatcatttttataaagacaatttttgttaaagatgaaagtaagaatctagatttagcaacggttgtattttaataaatcttgtctgaccttaaatgagtaattatatacatagctctaagtaaataagaatgattatggctgtgccctagtcggattctgaagacttcctcttttaagtccatattgattctgcatgccctcctgtacctttgtatttattttattttacactgtctccttccttggttgtattaaggagttgctgaaaaatcaaatatgtgaggttttattttctctattacctctggtaatcttattcctgatgatggggaatcttcatcatcttagacccagccttggcccagaagatgttagcatctacctaaaactacagatccatcagtattttggtttggtttggtttggtttggtttggtttggtttggtttggtttggtttgtttgagacagagtcttgctctgttgcctcggctggagtgcagtggcatgatctcggtgcactgcaacctctgcctcccaggttcaagctattctcctgcctcagcctcctgagcagctgagactgcaggtatgcaccagcatgcccagctaatttttgtatttttagtagaaacagggtttcaccatgttggccagtctggtctctttaactcctgacctcgagtgatccacccggctcggcctcccaaagtgctgggattacaggcgtgagccaccacgcccggccccgtcagtgttttgaaagtgtaatctgtctactcttgagatgaagccattgcttccttaacagttctttggtggtacagcgtttttatcaaagcttaaaggtccccaagctttataaatcacatgataggcttctgccttggcaggggtgtgacatgaacccgttatgtgccactgtcaacctgttctgggttgacagtgaacagttcctgcccgtttaaactaactggactcaacccctgtacttactctctgcaacaaaagctggaaaacttttgtattgagcacattttacactaatatttaatcattttccctgctatatcccttcttatttggtactctagattgcagtaatatccctcctatacatttttgttctttgttaggaattttgtagtaaagaatgaatctggccgggctcggtggctcacgcctataatcccagtactttgggaggccaggacgcgtggatcgtgtgaggccagaagtgcaagaccagcctgggcaacgtggggaaaccccatctctactaaaaatacaaaaaatagccaggcatggtggcgcatgcctgtagtcccagctacttgggaggctgaggcgggagaatcacttgaacctgggagacagaggttgcagtgagccaagattgcaccagtgccctccggcctggggggacaaagctagactctgtctaaaagaaaaaaaggaatgaatcttggtcggatgcagtggctcacgcctgtaatctcagcaccatgggaggccgaggcaggcagatcacttgaggtcaggagttaaagaccagcctggccaacatggtgaaaccccgtctctactaaaaatacaaaaaattagcttggtatggtagtgcacacctgtaatccctgctacttgggaggctgaggtgagagaatagctggaacccgggaggtggaggttgcagtgtggagattgtgccactgcccttcagcctgggcaacagagcgagactgtctaaaaaaaaaagaatgaatctgtatttgtcccgtatttcttctatttatagaaatagtttttgtttgcttgttcaagtaccaagagcctaatttgcacttggcatagaaagaccaggtccctgctctgtgggagctttgagttgagggggaaggagggaggtcaggtatgtaaagagatactcataattgatgtgttaagagtgcctgaaggagaggaaaatgactcagggtggaagagtcaggaaaagcttcagtcaagaagtagggatttaagctgggtcttgaagggtggggaggacttgagagtgataggaggaggagcatgttccaggtatggcagggacgaaggaaaggactctaccgtgaagggagcctgaagggttctttaggttagtagtgccatggccacagtcaaaagaaagacccagatcaaatttaaacacgataatgtaccttgaaacagttttgattttcactttaataattgtggctcttatttagctaattttataatacatagtcttcctctaagttagaggatccagcttaaaggacatcatatttacttttctctgccattcttttaattatagtagtgtattccagtttcaataagttcttaaatacactgcatagaccctagatcccttttttgtttgtttttaagatggagtctcgctctttcacccagggtagagtgcagtggcgcgatcccagctcactgcaacctctgcctgccaggttccagcgattctcctgcctcagcctctctagtagctgggattataggcatgcgccacccaccacacccggttaattgtttgtatttttagaagagacagagtttcgccatgttggccaggctggtctcgaactcctgacctcagatgatctgcctgcctcgacttcccaaagtgctgggattacagacatgagccaccacgcccggccgagccaccgtgcctggcctttttttttttttttttttttttgataacaaggttttgctctgtcacctaggctggagtgcagtggtacgatcatggtgcactgcagcctcaaccgcctgtgctcaagccattctcctgcctcagcctccttagtagctgggaccacaggcatgtgctaccacaactggctaatttttttatttctagagatgagatgttgctgtgttgcccagcctggtcttgaattcgtgggctaaagtgatcctgctgccttggcctcccaaagtgctgggattacaggtgtgagcgactgtgcctgacccaattctttatttttattttattttattatttttatttttattttttgagacagagtctcgctctgttacccaggctggagcgcagtggtgcgatcttggctcactgcaagctccgcctcccgggttcacaccattctcctgcctcagcctcctgagtagctgggactacaggtgcccgccaccacgcctggctaatttttaaatatttttagtagaaaccatgttagccaggatgggctcgatctcctgacctcgtgacccacccgcctcagcctcccaaaacgctgggattataggcgtgagccaccgggcctggccccaattctttatttttatcagttggcaaaccaagttactctgtagtgtgaatctggctagcaaaagtaagtgctttgctttctctgtgtgtgtgtgtgtgtgtgtcagccttactctgtcacccaggctggaatgcagtggtgtgatctcggctcactgcagcctctgcctcctgggttcaagtgattctcctgcctcagcctcctgagtagctgggattacagatatccaccaccatgcctggctaatttttgccttcttagtagagagggggttttgccatgtttgccaggctggtctcgaaccctgacatcaagtgatccgtcaccctcgtccttccaaagcattgggattgcaggcgtgagccactactcccagccttttatggtttgtttgtttgtttgtttgttttttgagacagagtcttgctcttttgcccaggctggagtacagtggtgtgcaacttcggctcactgcaacctctgccccttgggttcaagcaattctcctacctcagcctcccaagtaactgggattgcagacatgtaccaccatgcaccactaacttttgtatttttagtagagattgggttttgccgtgttggtcaggctggtctcgaattcctgacttcagcctctcatagtgctggcattacaggtgtgagccaacatgcccggcccactttccacattttcgaagagtgaaaagaaaaaggtattatcatggtatctcttcccctaaaaccacacatgcccattaacatctagttttgttttttttaatagttttacttttttttttttttttttgagacagagtctcactgtgtcacccaggctggagtgcagtggcgcagtcttggctcactgcaacctctgcctcccggattcaagcaattcttctgcctcagcctcctgaatagctgggactacaggcgcccaccaccacacacacctggctaatttttatttatttttttatttttatttttatttatttattttttgagacggagtcttgcactgtcgcccaggctccagtgcagtgatgcaatcttggctcactgcaagctccgcctcctgggttcaagcaattctcctgcctcagcctcctgagtagctgggactacaggcacccgccaccacgcccagctaattttttttttttttttttagtagagacggtgtttcactatgttggccaggatggtctcaaagtcctgacctcatgatgtgcctgcctcggcctcccaaagtgctgagattacaggagtgagccatcgcgcctggcctactcctggctagtttttcatatttttagtagagacaggtttcaccatgttgggtgggctagtcttgaactcctgacctcgtgatccgcctgcctcagcctcccaaagtgctgggattacaggtgtgagccaccacgcccagccatagttttactatttttcacctgtagtagtttgaagtaattctcccctattaaatagtttctcctgaagctttttattcttcagaagggagactccatttagttactatgatcagagaaagcaagttatgcattagtaattcttgttctgtgaatatttatccccagttgtgctttacccatcagatcttgatctcagtcaagaactcattgcaggccaggtgcggtggctcatgcctgtaatcccagcactttgggaggctgaggtgggcggatcacctgaggtcaggagtttgagaccagcctggccaacacggagaaaccccatctctactaaaaatacaaaattagccaggcatggtggtgtgcgcctgttaattccagctacttgggagtctgagacacgagaatcgcttgaactcggggggcggaggttgcagtgagccaagattgtgctattgcacttcagcctgggcaacaagagggaaactccatctcaaaaggaaaaaaactcagtctaggcaacatggtgaaactccatctctacaaaaaatacaaacaattagctggtgtggtggcacgcacctgtagtcccagctactcaggaggctgagggagaatcacctaagcccaggaagtcaaggctgcagtgagccatgctcatgccactgcactgtagcctgggcaacgggagtgagatgtgcatttcccatttgttactctttttaaacaaggataggaaatcgtcagaaagcatactgttatctctgtcttctctgttcttcctttcccacattcattaaaaaacaattatggctaattaaccacttgagaattgttttggctgctatagattgaaacgttgctgctcccaaggtccagtgatcctgttgctcttgttcccacaggcatagaatgtcaagctaaccaggcgtccgctacttcagaagagtgtactgtcgcatggggagtctgtaacgtaaggaagcatctttacctgtcagcatggcttgtaaacatatttccacttttcctgctttgctagtcttgaaaataactagggaaaaaaatgactagtccacctttctcccaaaaggtatacaaatagtaaaaaagattttaaatcataatactattcacctgttacagggtaaaaattacagttactgcaaagaggcacttatttgtcttaattataaagtggacccaattttgttagcagtattttggggcttcatctatgggaattgccttcaaaacctacatgcaccctttggaatattctcgtggtagaactttgtacctttgaaacaggcttttttaaagaccaggtgtctaatggaactaagtttgatgagtaaattgagtgttgaagtctctgtgtatgtgtgttttaagtgtggcgtatgtactgagataagattattttttaacatggcttatgccagaaatgttttgtgtagctttattggactgaatggccttccaagagtgtgacagctgtgaaggataacaaatatcaaatatgttagttctagcatgtgttaaaaattcattctttaagctgtaaagtcccagtcacatgagctaaaattgtcttgtcagggcctcctgtgtcatggggacagaatactcacagttcccagcatgacacagggataagagattctagagtcagaccaccattccctgtctttgtgacttacttgctaagtgacgttaggcaaggcatttaacgtctccaatcctgggttccctcataaaatggggctgatagtggaccacataaaattgtaatccggattagatgatttatgttaaaatgtgattaaacaactcccggcacatagtaagcacaagtgcttgttaaaaaaaatctaaataggccggacgcggtggctcacgcctgtaatcccagcactctgggaggccgaggcgggtgcatcatgaggtcagcagatggagacatcctggctaacacagtgaaaccccgtctctactaaaaatacaaaaaattagccgggtgtggtggcaggcgcctgtagtcccagctactcgggaggctgaggcaggagaatggcgtgaacctgggaggtggagcttgtagtgagccgagaccacaccactgcactccagcctgggtgacaaagtgagactctgtctcaaaaaaaaaaaaatctaaataaatacaaatttgaggtagaggtgttactgtgtagatggtgttctcagtagtttttcctgttgggttgcaactctttttcctacctacactggttttttgtttttttttttgttttttgttttttgttttttttttgagacggagtctcactatgtggcccaggctggagcgcagtgacgcagtcccggcttactgcaacctttatctcctgggttcaagtgattgtcctgcttcagccttccgagtagctgggattacaggtgtgtaccaccacacccagctaatttttgtatttttagtagagatggggtttcgccatgttggccaggctggtcttaaactcctgaccttggggcgatctgccagcctcggcctcccaaagtgctgggattacaggcgtgagccaccgtgcccagcccctacccgcactttcgggtacaccttcttccatctttgttgggaccctttggccaggctcacaatagaccatgttggccatgggggagctttaatcgttcatggggataaaggaagtatattgggctctttgccctttctggcatacagacatatactaagaaccatgttcctttatgtggaaagaaaagagagtgaacatccccttaaatttggctaaggagagattctctgagagagcctgccgtagaagagagccagcatggtgtggcagaaggctctggattagtcctgggttctagttctgggtcttctacaaaccagctccatgaattaggcaagtcacttgtctgggtttcagtttcctgtctgtaaaatgaagataaaaatatctgtcatgcttgcctgccagggttgatgtgaggcctcaaatgaggtaatacatgtcaacatcttctgtaaactgtcaagtactataaatttatcttctgtaaattgtactttgaccgctaaatatatccattaatacatcttagtaaatgttcaggggtgctgtcacctccctgacacctcctttacagcccccttttccccagcgcgtggtatgctctgacttagttgggctctaccaggacaccgtactgctgcaaagtgctcagtgggtgaggtgggagagggagaagctgtcgaatacccttcggtgagcccgaccccaacacctgatggttaagaaaaatgtctctgctttctgccttttggaaattttgctctttctctttttcacagtgagttatacaagagtcagctgaaaagggatcttccaaaaggctgtcactctaagagaatatttgtcctcttgggtatccctagtgtactagctgtggattccactcttagttactgaattatatttttgtctttgtcaaaaaacatttcacaagataataatccatattatataatcccttaagttccatacatactttgggagacgtaccgaccagatttcagttgttattaaatgaagcttgtaaagcttttgttgttttgttagggtgagtaatttctgcccgtgccccaccacagtgcaccaatcacagacgaaatgaaggaagcacttgctgcgtctgtcctaatacgcacatgagcagggggagaagtgctcattgcagaagcattgtgattagcatctgcatgtcatgagcccacgccaaaaaactgcatgcagattgtccttttcccaaatctaagcagacttctagctccctgtcagttaccagtgttcttgatactcttgtctttttacttcttgtcttgattatgaaataagccttttgatgctctttaggctgcttgtgtgccgtttgtccctcataagaatacttccttttaccccaattttcttttatctcattccctaagacaaagtccctcacccattaaaggcacgtgaagtactgagctcttgtaatatcaatatgtctgtgaataaatctagaaataaagtttctttgaccagagctgagctgggtgtggggaggttggggaagtgcccgtctcagttctgggtgggcggcagtgaccatgcacttctctaccaagggctggggagaaggctctgctcctacaggtcgcattctccaggggcaggagggtgggagggaagctagagacccagaatggggatatttgaaatctgcattgatgaggggcctcctttcccaaagaaagtggaagtatccccttacaggctgaatgggaccaaggagccacattccacgttctcttaaatagaagagagctcagtgctggcacatactcctgtgcttcctgaatgatttcctttagtagtaatgacatttctaacaaatgctttgttggaaatacccttgcatctaaccaagatataatcagttgttgaacttttgcctctcgttgtcttcttttcttttcttgcccactatatgtcacccatgccactaccctgtgggacctgttgtcgctcgatggctgagcctgcatagagttatttttaataaaatatatgttttctttcagcatgcttttcacttccactgcatctctcgctggctcaaaacacgacaggtgtgtccattggacaacagagagtgggaattccaaaagtaggtatctttggttgttttgacggggctttttgacttgcctcaggctgaaaggagcgtggtcttgggggatggagacatgatacatgccttgttttttttaaaactagtttttggttacttaagctaggacttatctatatggaaaatgcacaaaggattagccaacattagacatttgcagcctagggtttcccaacctttttttttttttttttttttttgagacggagtctcgctttgttgcccaggctggagtgcagtggtgctatcttggctcactgcaacgtccacctcccagattcaagcgatcctcccacctcagcctagcaagtggctgggattacaagtgtgtgccaccatgcacagctaatttttgtatttttcgtagagattgggtttcaccatgttggccaggctggtcttgaactcctgatctcaactgatctgcctgcctcggtctcccaaagtgctgggattacaggtgtgagccaccgtgcccggcaggtttcccaaccttctacggtctgtgaaagtagaaaatgtgataatctatgaactcttaaatatttccagaattacatcctaatgaggctccatggactacctaatgtcaggtagctttgggctagacttgtatccacttatcatatttcactggtttatttcacagtgattaattctgatatagcatttatggctatcctgattagattttattgttatataaataaaacatgacctggtaaacttttaaaaatttaaatggttgaaagggtataccacagaatatgaatttcccactgtaggcccctgctccggcttgctggagctagccatcagcaacaggacagcttcttaggagattttctgactatctcttatatgtcccggtatttacatggttgtgtgtatatatatatttttgttaacataaaagtgagtatcctatacagtaattcaccttttttttttttttcattttgtacattttggagattttccatttccacaaataacaaactacctcatttctaatggttgcagagtatttctttatgtaaatgtaccttaacttttttcttttctttttttatttgtttgcatgtttttaacattttttatattttttaaaaagtcagtccctggccaggcacggtggctcacgcctgtaatcccagcactttgggaggccgaggcaggcggatcacctgaggttgggtgttcaaggccagcctggccaacatggagaaaccccgtctctactaaaaatgcaaaatcagctgggcgtgggggcacatacctgtaatcccagctacttgggaggctgaggcaggagaatacttgaacccaggaggcggagattgtggtgggctgagatcgcaccatcgcactccaacaagagcgaaactccatctcaaaaaacaaagtcagtccctattggtggacatttgtgtttccagtttttcactgatgcaagcaatgtgaagggagaaacatccttatacatgaagctttgtgtaaatgtgtagctgtatctggagcagtaattcctaaaagaggaatttatgggtaaagagtatggctgggcttggtggctcacacctgtgatcccaacactttaggaggccaaggtgggcagattgcttgagtccactagttcgagaccagcctggtaacatgttgaaaccccatctctaccaaaaaatagtaaattaggccatgcctgatggctcatgcctgtaatcccagcactttggcaggttgaggcaggtggatcatttgaggtcaggagtttgagaccagcctggcccacatggtaaaaccccgtctctactttaaaaaatacaaaaattagctgggcggtagtggtgcatgcctggaatcccagttactccagaggctgaggcaggagaatcacttgagcctgggaggcagaggttgcagtgagcagagatcgtgccactgcactccagtctaaatgacagagtgagaccctatctcaaaaaaaaaaaaaagaaagaaaattagctggatgtggtgccatgcacttgtagtcccagctgctctggaggctgaggtgggaggatcgcttgagcccaggaggcggaggttgcagtaagctgagatcatgccactgcactccagcctaggtaatagacccaatttaaaaaaaaaaaaaaaaaaaagcccaggtgtagttgctcacacctgtcatcctagcactttaggaggctgaggtgggtggatcacctgaggtcaggagttcaagaccagcctggccaacatggtgaaaccccctctctactaaaaatacaaaaattagccaggcatggtggtgcctataatcccagctatttgggaggctgaggcaggagaatcatctcttgaacccgggagcccagaggtttcagtgagctgagatcacgccacatcagccggggcaaaagagcaaaacttcgtctcaaaaaaaaaaaaaaaggaatgtatatttttgtttttgataaatagtgtcaggttttccatttctaagaatacacactaatttatactccctccaaacagtgaagcagaactcccctttcttcatttcctgccagtgcttcattatacagtttttccatcttagccactctgataggtgacaatcagtattcgattttcatttttgaattttcagtaagattgggcaattgttcatgtttttatatctcttacgcttttctgtgaactgctgtgtttatcttcctgcacgttgctttattttgaattattggtcattttctttactgaattttttacgggaaaggagtttcttaatttaaatacgtctttattaggctattcttgggtttaaaaaaaccaaaaaataggattcttttgtttgtgaaatgtttagaaatccattattggtgcagtgattttgcctttaaattcaataatttattttggtaaaacatttggaagtcttatcaatgcgtattcagtttttaagaaacctgccaaatactcagtatctgagtggtactgttgggctcccttcagcaaaatatatgctaagtaccgtgtaaaatataaaaacatttgagacggtccttcctgcccttggagcttgcattctacagggaaccataacaggaatacatgtcaaggcagaggacttttcatagttttcagggggcctttgtaattggctctgccctacagcaggctcaaggttccattttagaccagaatggtctcgttttgccagtacatgtgcccagggctaaatctaagaattgcgggggtatgaagaattccttatctggggctttgactctgccactctaactggtgactttcccaggtggtagttatcagtgctttgggaaaacaaattcttcagctttctttaatctgatacgattgttctacagcccatctcacatgctagagcctaacctatgtggaatttggcacaacagctttttaaagacaatattcaagtagatttcttatgagaagctgtgatccagagttccagtgccctagtttctatccaaataacaaattattttaatcaggttaactgcctaaaaagatccaggacaaaagataataatgagggatcttgtgttcaagaaatctgtttatatgtggaagaaattccttggctttatttatttttatttatatatatattttttgagacagagtctcactgtgtcacctaggctggagtgcagtggttgtgatctcggttcactgcaacctccaactcccgggttgaagcagttctcttgcctcagtctcctgagtagctgggattacaggcacctgccaccacgcccagctaatttttgtatttttagtagagacggggtttcaccatgttggccaggctggttttgaactcctgacctcaggtgatctgcccacctcagccccccaaagtgctgggattacaggagtgagccactgcacccggcccccgttaatttttataatcttcttagagccaaattttggtttctggggaaaacagaaacctccaaaatccacgcctagcttctcttctctttgtatagaactgactgtaatcagagttgtaattggagctgatgacagattttgaaattgaaggctgatcaattgctattctcattattagctttaccctaaacatgcctgagtactggagttcaggtgaaaataggccgccatgatcagggcagcccgaaagttcaaactgtctgagcccctgttgggagtgagcaggcggagctccctttcacaaccaccaatgacttttccctctcacctccctaataccaccaggcagctactggcacctgtcaggtgggcatggttgagtcagagggagagcctgtccctaagagggggcagtaggcaagaagtcctgtaagatggggaggggaaaggggaatcacagcgacagccaagctagtgtcagtgtcgtcacctaatcctggagcacactgtgatcacttaggttctaactaaagttgcttatgtgtttaagcaggttttatgtctcaaacaggaaattatcttggaattaatcagagtaatttactttgtctttcaggtatgggcactaggaaaagacttcttccatcaagcttaattgttttgttattcatttaatgactttccctgctgttacctaattacaaattggatggaactgtgtttttttctgctttgttttttcagtttgctgtttctgtagccatattgtattctgtgtcaaataaagtccagttggattctggaacggatgctctctcttgtgtatgtgaacaaagtgaacataaatgaagagtctccccttccaaggctgaaaactcagcttttgaaagtgaaatgtttgttcatcggggccagagcagggttgtcctctgagcgcatcacttagtgacgaggaatccaacagctcaaggcagagtgtggatcaccggctcccgaaaacagcagtcagcccttctttctcctgtgtgacagcagtgggcagctgaaagagggaagaatgtgggattcagtcatcaaacccagttctgagtcctggttccacagcttgggtactgatggcaatcttggccaagttgtctctctactctgaactttcctcctctgtactgtgggcttctgaggactaagtggcatcatgtgggcacagagagaagctttgtaaaatgtaaaaccgctatacaaatgtgacctttggttgtgtatgacagcagtccccaacctttttgccaccagggattggtttcatggaagacgatttttccatggaccgggggtggggcgggggtgtgcttggggatggttttggaactgttccacctgagatcatgaggcagtagatggaccgcgcaacctagatccctcacatgcacggttcgccaatagggttgaagctcctatgagaatctaacgctgccgctgatgtgacaggcagagctcaggcggtaatgctcggtcaccaccctgctcacctcttgctgtacagccgggttcctagcaggccatggactggcatccactccgcagctcaagggttagggaagcctggtgtatgacatgttgctttctcttcttagcttagaaaaataaagatatatataatcttggctggcaaagggacaatttaagaactcaagttaaaaattgatattggctgggtatggtggctcatgcctataatcaggcgattacaaggtgaggagtttgagatcagcctgaccaacatggtgaaaccccgtctctactaaaaataaaaaaattagccaggcgtggtggtgtgcgcctgtaatctgagctactcaggaggctgaggaggagaatcccttgaacctgggaggcggaggttgcagtcagccgagatcgcgccattgcactccagcctgggcaacaagagcgaaactccgtctcaaagaaaaaaaaaaaaatcttgggagatggaaagaattgtcagttctaatactaattcaatggttaataatatagactttttaactgagaagcaacatagtttgttgcagtggttctcaaagtatcatctgaggattcctgacaagggggtacctgaaaccctttcagggggttcatgaaccgcaagtctatgtgaaagtttttctttatattcaaccaaagcagcatatctaatgaagacaccgacttaagaatccagtgtcttctattaaatcagatgtaaaagacattagcaaaaatacaaaaacaatgctagtctcactttttttgtttaaaaaaataattttaataaaaatatgctcataagtgatgggtttttattcttttcagtcatttttttaaatttctgggctttttttttgtggggggcgggatttgagacatggtcttgctctgtccccaaggctggagtgcagtggtgagatgacagctcactgcagccccaacctgctgagttcaagtgatcttccagcctcagcctcctaagtagctgggattacatgcatgcaccaccatacccagctaattttttttttttttttgaaagtctcgctcttgtcgcccaggctggagtgcattggcaccatcttagctcactgcaacctccttctctcgggttcaagcgattctcctgcctcagcctcccgaggagctgggattacaggtgcatgccaccacgcctggctaatttttgtatttttattagcaacgaggtttcgccatgttggccaggctagcctcaaactcctgacctcaatccactcgcctcggcctcccaaagtgctgggattacagatgtgagccaccccgccaggccccacactgagctaatttttaaattttgtgtagcgtcttggccgggcatggtagctcacacctgtaatcccagcactttgggaggccgaggcgggcggatcacgaggtcaggagatcgagaccatcctggctaacacggtgaaaccccgtctctactaaaaatgcaaaaaattagccgggcgtggtggcgggcgcctgtagtcccagctgctcgggaggctgaggcaggagaatggcgtgaacccgggaggcggagcttgcagtgagccgagatcgtgccactgcactccagcctgggcgacagagcgagactccgtctcaaaaaaaaaaaaaaaaagaacttcggccaggcgcagtggctcacgcctgtaatcccagcactttgggaggccgaggtgggtggatcacaaggtcaggagatcgagaccatcctggccaacatggtgaaaccccgtctctactaaaatacaaaaaaattagccgggcatggtggtagtcccagctacttgggaggctgaggcaggggaatcgcttgaacccgggaggtggagattgcagtgagccgagatcgcaccactgcactccagcctggagacagagtgagactctgtctcaaaaaaaaaaaaaaaaaaaaaaaaaaaaacactttaaagtctaacctggaacaaaactggctcccccactaaactcactaaactaccacagtacctattttgtagcaagcactcaaatggaggcagctgctactgttcctatttgtatcattttgggactaccatcctcagcagaaattccttcttttaaaccctttccaggcagcattcagactgcataaatactttcattaatgaagaacacattgctttttgcacagatgacacattacatatttgcagaattctgcttgggttttgatcagaattctttgtgtaaagtacagaaatccagcttctgcttgggcaaaagggaaatttcttggagggctatagaggtctgcaatgcaacagaagaaagggctg

SEQ ID NO: 24239 - DNA, 4407 bp, Homo Sapiens
gctcagtgcttaggcagtggcctgtgttttagacctggtgatgacagctcccctcacctaggagctgagcaccccggccatcttggtgaccacagagcaggtcacaggcttcagctgtacgccctgggcaggggagagattgtgctgcattcccagtctgctccacctcctggtgaggtctgtcaggcctggtcctgtccttggagccaccagcatcctcagacaagaatctagacagtgttgccagttccatccccaggatgcttgctcaaagccaatgcatggtctgagctccatgccaggccctggtgggggcagccacgttgacaccttcaccctgtccctcctcacccagcacatcctttactgcattgtggacagcgagtgtaagtcaagggatgtgctccagagttactttgacctcctgggggagctgatgaagttcaacgttgatgcattcaagagattcaataaatatatcaacaccgatgcaaaggtaaagttaacacagggctctgtggagtgtgctgggttgtccagaagttcacctggagtcctggtctgccaggctttaggcacaggttttacgttagagacgacgggggagtctgggcagtctttggcaaacattcattggaacctgctctgtctggctttgtgctagaccctgggaatgcagggatgaaaaccggggctgcttgtgggtagggagtgagggtgggaatgggtggcttgtgcgcctgccgtgacgcagcatggtgggtgccacggtgggagccgctgtagggagggactgggcctggtgtgttaggctcaccgagtgtgtgtgacagaaacccagctcaggctagctgaagtaaaattaaaagtaaaaattaaaggaatccagcacccttgagtgtaaaaccactggagagagtgtcggatctgtgctgaattccgggcagtgcctcttagtacctgggtggtgaggggaggtccctcagcttatctgagcctctgtcttcctatctgaagcagtggggctggtagaggtcgctgatgccccttgtagtgactgtccccccgggccatggccatacctggccagcagcccactgcctgctgtgagcttggtttctgtatagttccaggtattcctgaagcagatcaacagctccctggtggactccaacatgctggtgcgctgtgtcactctgtccctggaccgatttgaaaaccaggtggatatgaaaggtacatgaaaggcaggctgtcaaggcaagtcatgcagggtgagaatgctggcatcagacaccctgtctccagcagggagacaagaatgactgagggagctgcaccagatgcccacgtggccggcctcaaggtggcggcttccagggcaattggctttgctgccttgttcaacactttaataaggtgaaaatccattgttgctagcaagatgcaaagaaaaccagaaaaagaccttcctcttctgggctggtattgcctggcacgatgagttggccccctcgtcctcagtgtgctgtgcgtggcatcgcaggtgccctgtggtgcagcaggcatctgaaccctcctggacttgctaacgcacttccatgtgtatgcgcacgcgtttcctttttttcctaggagagggcttgtggcatccagcagattctcctgagggtttgtgacccccccacacccccaaaaagtcaggcacttgttccttgtcacggtcactgtcattgatagcaagaagtatcccggttgttggtaatttagccgtttgcttcctttttctgccccagagggtctgtttcaggggaacagccacacagattttggtaccttcggttattgccctgcctcccagttgtgcgggaagcagttgctccgacactagtggacggagcagaacctgtgccttgtggtctcagcactgggccggactcacctgagagctggtgtggaaaaccagttgcgctaggacctctgcagaaggagtggaacttttgcgttgtttttcttaatgcagcgtcatggatccatcttcctgtggagggaactcttctgtgtgtgatatggagggcacgggtctggagccagtctggggagggctgagggagagctgccctgagcttggttctggaggatgaggtggggtgctcctgggcactctgagaacatggctttgcctggtagcaggacagctggaggtccttctttctgccacagtcagctttcgttgaagctgttttgatgatgagctcccagcttcagagtcaggacccaagcggggctccacgaaaggcctgggcgacccagccactgggcctaagcctgacctgctgcacccctgcctccctccacagttgccgaggtactgtctgaatgccgcctgctcgcctacatatcccaggtgcccacgcagatgtccttcctcttccgcctcatcaacatcatccacgtgcagacgctgacccaggtgagaggccccagcagacacacagcagggaaggtcgattggaaaccacttcctttgtcctggtgcccagcaggtttctgtcccccactccagaagtgcgtctctggagacccagctcttctgaggactgtgctcaggaggaatcagtgtcccattgtacagacagggcctaaggaaggagggctcgcaagtgccctcaggtcacaggctgacttgcaggccagtgctctccccgcctcccccatgtccacgtccctcacaccttctgccctgctgggctttggaatcggacctgaggctgcccaactccctcactgaatagtcatgcagccttcccttctctgagcctcctgcccctcttttctagagtgagggtgatcttagcacctctcagaggtggtctttggttccgttctgaggtgaagcaccaggtgggagtgcatggtgagtggggcagaactctttccccaccgaggcgcgcaggctagtgctgaatggcacttctgaagcgggataaccgccccaacacacgcacccagccctgcctgggacggaccttccggaaggagtgatgcttgagcccaggtctggacagggacaggtgttgttgcctcaggtggggtgggaggtgggcgtggggaagaggaaggtgctcagtcaggaaactggtgctgctgggggcccccttcccccagtcctatctcacctctgtgcagggagagctctgtgggtggcccgaggcctggggccactctcctccctgcctgatggctacccaggttcaccaggggccactggggctcccaccagcccctgaccctgtgggcctgtggccttgcaggagaacgtcagctgcctcaacaccagcctggtgatcctgatgctggcccgacggaaagagcggctgcccctgtacctgcggctgctgcagcggatggagcacagcaagaagtaccccggcttcctgctcaacaacttccacaacctgctgcgcttctggcagcagcactacctgcacaaggacaaggacagcacctgcctagagaacagctcctgcatcagcttctcatactggaaggagacagtgtccatcctgttgaacccggaccggcagtcaccctctgctctcgttagctacattgaggagccctacatggacatagacagggacttcactgaggagtgaccttgggccaggcctcgggaggctgctgggccagtgtgggtgagcgtgggtacgatgccacacgccctgccctgttcccgttcctccctgctgctctctgcctgccccaggtctttgggtacaggcttggtgggagggaagtcctagaagcccttggtccccctgggtctgagggccctaggtcatggagagcctcagtccccataatgaggacagggtaccatgcccacctttcttcagaaccctggggcccagggccacccagaggtaagaggacatttagcattagctctgtgtgagctcctgccggtttcttggctgtcagtcagtcccagagtggggaggaagatatgggtgacccccgccccccatctgtgagccaagcctcccttgtccctggcctttggacccaggcaaaggcttctgagccctgggcaggggtggtgggtaccagagaatgctgccttcccccaagcctgcccctctgcctcattttcctgtagctcctctggttctgtttgctcattggctgctgtgttcatccaagggggttctcccagaagtgaggggcctttccctccatcccttggggcacggggcagctgtgcctgccctgcctctgcctgaggcagccgctcctgcctgagcctggacatggggcccttccttgtgttgccaatttattaacagcaaataaaccaattaaatggagactattaaataactttattttaaaaaaaaaaaaaaa

SEQ ID NO: 24240 - DNA, 2151 bp, Homo Sapiens
gcagtgaaaatgttattagttttgagggggtttgggaagcccagcggtacctgaggagtttctggacatttaagccggttcctaggtgtggccttaacagggaggctgcccttcctttcactgaatgagctgcgtcactcataagctcactgagggaaccccatctgccagctcgtgcgtgctcagacgacgtccatgtctcaagcgttctgtgaaggctgcggtgcagcgtgaggtcaccctgctgtgttcagagctttgctcactgcctgcggggctggaccgttgcacctccagggcccccagaaaccgagtttcgggtcagggtcctctgtgtgcattcctgggggtccatgtaccagctgtgacgacgtccaggggttgggctgagaagcagacacccttggggaaactggctctgtccctcccctcccccatcccaggagctgaggtcttggtgaggccacagggccaggtccacgcaaggactgtccgtgtcctgtcctgtggtctctggccccacgtgacacccacacgtgtggtaggcagcctggcctgggttgtggctatggccaggcccccaagctgtccccgatgcccagggctggtgaccacccaggcaggtgggggccccacttggtaacagagtcatagggcagaacccacctgggctgccacagaaggtctggctgcccctgtgcccactgctccccaccatggccaatcagaagagtcaggggctcctggtctttccgggagggacgtggcccagccagctctaggtgttctgagcagctctgggacccagcgattgaggggtcaggctgggggtgtcagagccagggtcctccttaagtacctcccacactacacagacagtggcccttttgtgggcagcaaattcttgagccatgaaaggatgctttgggccccttccctcccaggagggcagcctgtgcagggatggtgctcagcaggtggacagggcctggggcctgtgtcagggtctcaggcctgggagcaccagcagaggagatggcggctcccagcagtgccgcctgaaagtgtcttgggctaaggacccacacccagggctgccctgcagaaacgcccccgcagagcccagtggtctgtgaggttgcaggcagggtgcgaatggaagggcacaggtgcggggctggcacctgcccggtcctgcccacctctcctccgcccagcccgcacctgcgtctccccacagagctgtccgtggcacagtgcacgcagcggcccgtggacatcgtcttcctgctggacggctccgagcggctgggtgagcagaacttccacaaggcccggcgcttcgtggagcaggtggcgcggcggctgacgctggcccggagggacgacgaccctctcaacgcacgcgtggcgctgctgcagtttggtggccccggcgagcagcaggtggccttcccgctgagccacaacctcacggccatccacgaggcgctggagaccacacaatacctgaactccttctcgcacgtgggcgcaggcgtggtgcacgccatcaatgccatcgtgcgcagcccgcgtggcggggcccggaggcacgcagagctgtccttcgtgttcctcacggacggcgtcacgggcaacgacagtctgcacgagtcggcgcactccatgcgcaagcagaacgtggtacccaccgtgctggccttgggcagcgacgtggacatggacgtgctcaccacgctcagcctgggtgaccgcgccgccgtgttccacgagaaggactatgacagcctggcgcaacccggcttcttcgaccgcttcatccgctggatctgctagcgccgccgcccgggccccgcagtcgagggtcgtgagcccaccccgtccatggtgctaagcgggcccgggtcccacacggccagcaccgctgctcactcggacgacgccctgggcctgcacctctccagctcctcccacggggtccccgtagccccggcccccgcccagccccaggtctccccaggccctccgcaggctgcccggcctccctccccctgcagccatcccaaggctcctgacctacctggcccctgagctctggagcaagccctgacccaataaaggctttgaacccaaaaaaaaaaaaaaaaa

SEQ ID NO: 24241 - DNA, 3926 bp, Homo Sapiens
gataacctgccccttacgcctgtcattcagcctggcaggtccttagtgggctagacctacctttctgatgagctgcccgcccccagcgcaagatgattgtttgagaggtaaaaactcttgccaaaaacaacgttaaacttttaatggatgttaacatacttgcatttacaagcagtgaagtttgtcaccttcatgttgttatttatgcagcattaacctttttctccagatcattgagactgaaaatatgatggaccgaattgtgactggcttgtctgagtctagtgtcaaggtgcggttagctgccgtcaggtatgagctttaaatggtctgaataaaaaccttttgccatatatttaacctgttgcctttctggtccttcactgagtaaacacagactacaaatgttcctcaaaaatctgctcaggtgaattcatagagtatataacattgtctaacagagagcctggcctccaaaccccataaagtggtctgatgtagttcacttaacaatgtagatatgcttgaagtgtacattagtcattgtaaaatgccagccagtttgtttgaaaagtaaaagttttgatttcttgtgaagctaattttgattattctttgtagatgtttgcacagtttatccagatctgtgcagcagcttcgaaccagtttccaggatcatgctgtttggaaacctttaatgaaggttttacaaaatgcaccagatgaaatcctagtggtagcatcttccatgctgtgtaatcttcttcttgaattttctccaagcaaagagccaattttggaatcaggagccgtagagctactttgtggattaactcagagtgaaaatcctgctttacgagtgaatggaatttgggctttaatgaatatggcatttcaggctgaacaaaaaataaaagcagatattttacgaagcttgagtactgaacagctattccggttattatcagattcagatttgaatgtgctgatgaagacattgggacttcttagaaatctcctctccactcgtcctcatatagataaaataatgagtactcatggaaagcaaattatgcaagccgtcactcttattctagaaggggaacataacattgaggtcaaagagcagacactgtgcatcttagccaacatagcggatgggacaacagcaaaagatcttattatgaccaatgatgatatcctacagaaaatcaagtattacatgggccattcacatgttaaactgcagcttgcagccatgttttgtatatcaaacctcatatggaatgaagaggaaggttcacaagaacgccaggataaattacgagacatgggcatcgtagatattctacacaaactgagtcagtcaccagattcaaacctttgtgacaaggcaaagatggcactgcagcagtacctggcatgatgggagtgcccctgggcacctgcgagcatcccacctccttgtttaaggaagtacaggaaccagcctcatttgattccttctatttgcacaagtcaccttggactgcagggagctgttttgcaaaagcagtttagtaggcttagatctcaaattcatcttgagaacatttttttgaggtagtaatttcctcagaagactcttgtgttttgttttggtttttttttctgagctactcggactctttattagaacaatcaatcattttcctttggacctacaatttttgcctatgctgcagccactttgtgagtgagaatgaatatgtctgtgtgaacacacaggcatgcgtgtgtatgtgcacgtacatgggccagaatgaatggatgtgtgtgtgtgagggatacctcagatttttcttttcttattttgtgtgaaaatctcttttctacagattttccagggtttaagcattgcttgctgtataaaaaactttactgaattatatacagtttgaatgaaatgttattttaaaaacaaaacaattgttaagtgttccataaaggttatgttgaattttggtcagatgaatatttgtaagtaaaaaatatatgcatttctgaacctcaacttacatagattttctttatataaaaaaaaagaaaaaaaaagaaaaagttggctatagttggcctgattaacaggcactatacatggtgctgtgcaaaatagtaagctagcatcttactgccgtcaatattagcaggtacagagccttttttcatcctaattcagtaagttctcaggcttccaagtcaaatggagaagtaaagtgaggcaacagattcaccataggctttttgaagcatcaaagggaaatataactactgatagtgaaagcccagccatgacccagatgggcttacccttgacaggaactggggaccaagagcctcccaattgccctaactcctgtcattggtattagcaatatctggccagatttagaaccagtcatggaaacttgtgctcaaactaaaagtaggtcatcacttcccagaaacagaataccttgtgcttcctgaaacagcatatatcactgtgaaactaaagaatattctacagacacccctgtagaaagaaacaaagaacaggatagtttagaaagctttctgttagctgtattcagcaaatttcatactagttgctcaggactgctagttggtatgcttttgtaaaacgagattgaaatttaataaaagatgcaactaaaatctttcctgcatgaagctaaaagcactcaagttgagagaggggcaagggaatctccccaggatgactgaagatgacttctttttacagcaagtactgttagcctttctgcaccccttagcttggcccctgctccaacttctgggtcagcagcaaggtgaactcaacagaagttgctcttgactgtttgaaggtagaagcagcctaccttttctctttgctaaaagaaggtcaaaggcttcgcaaccaggatgcaaggtctgcggtccagaagcttgcggtgagtgtgtgccactgatggagctccaagcccacccaccagccactcctgatggggttgctcacactgcagctgccctatcaccaccctgcacgttccttggaagatttaaatgtttggttgcaaatgaatgttttaaaaatgtatttaatgcaatttttcctgctctcaacatgaccacccaagattcaaacacagagacttccaagttactattttttcagaacatcaccgattttaaaatctgtcacaacaggacttggttttgtgcagatatcagagtgctaatgtgagaaacccagttaaaagaaaacttagtttattgggaagaaagcctcaggcccactcgtttctagaactgtgaaaatatccttggttggcatttttaacacaaaacactatagtgttggtattaaatagtactaggtaaatataaagaaaccaataatgaattgctgagacaatcttgaacccaaatagcattagaaagctgaaggcccaatgaaataacactttcacacttaaactctgtggataaattttgcctgtgggtataaacagatggtcaaattaaaaatgctttactataattaacttttctgatttgaatgaagggaaatgtatttattgaaacaaagctgtttgctgctttatgcaggtgcagtgttcagtcagcaaggaagtgggaagagtggacatggtattgtgtctacacccaagttcttaactaagcttctcgctctaatactgcattctgtttctccttttgtgccctgattgtaatccaaaatttatgaactagaaaagaatgtccaatttaataagttgcattttttttttctttaagcactttattcagaacaatacatgttcttctggtagtgtttggataatatgattttaacacatgctaataaaagccaagaaaaatcaaaaaaaaaaaaaaaaaaa

SEQ ID NO: 24242 - DNA, 178403 bp, Homo Sapiens
gatcctcttgcctcagcctcccaaagtgctgagactacaggttcgtgagcctggccaaaatcttagcttttaaatttcaaatcaccctacgtttttaaaagcagagtgtcccacagattctaatctgagattactctcccacagtaattgttgactaaactacttcctgattaacagtgagacagagaagaagagtccttgggcaatcaaaaaccatagtaaaatcacagcagggtcgacaacccatacagctccttacaagggtgggctaggtggcagcagactggtgccaaccgtgtcagggcgaggtggaaggctgctctgggtgaggtgatatggaggacccagagcacagtcctgaaagcttggctcctcaccccaccctccttgagaatgacaattagccctagacagtcaccaaaatattgccaaagctggagagatgaagcccctggtccctgtgccacttctctgactctggataaaccaactgactatatgtcggttttctgagtttgctttttggggcgtgggggagggtgagggagtggcagaggtgttgtttgaagtatcataaagttttcgaagaaaaaggagactgcaggctaagttaaaacactgaaagaatagtaagtgatggtcaagagtgagaagggagcatggctctgctggtagcggtatgccaatataatctctcaggaggatgcaaggcactggctaccaaaggccttaaaaatgcacacactacttgaaataaatatttctaggaatgaatcttaaggaaataactgcccccagataagacaaagtcactcattaagaaatttttttgcagcagtaaccacccccgaaaaataccccagaaactgaaaataaatgatcaaaactagaagttggttaataacatgatatcttttaaaaatgcaaccatcaaaaatgactccatagatacatgcgttaagcaaaagatcaatacagataagttttaaatagtcataaaataaaaataaaattaaaaattaggttatagaactgaatgaggccatttctgtttaaaatatttattgatatatgcctagaaacagtcggaagaatatgggccaaaacgttaattagtggccatctcttagtgatggaattactgatttttctttttattttcgagacggagtctcactctgttgccaggctggagtgcagtggtgcgatctcggctcactgcaacctccaacttcctggttcaagcgattctcctgcctcattttcctgagtagctgggactacatgcacacgccaccacgcccagctaatttttgtatttttagtagagagagtttcaccatgttggccaggatggtcttgatctcctgacctcatgatctacccgcctcagcctcccaaagtgctgggattacaggtgtgagccaccgcagccggcctgattttaattttctactgtaaatttttctgtgttttcaagggggaaaaaaattactaaaaacagaccccttccctttccccctaacaactacaaagccaaacttaaatgtactatgatttttaactgcagcagtaggattctgagtgagtcaatccaccagattaatatttttttaaatcgagacagggtctcactctgtttcccaggctggagcgcagtggtgtgatcccggatcactacggcctcaacctcctgggttcaaatgactacaggtgtgtggcactacacctggctaatttttttatttttatttttttgtagagacagggtctcacgatgttgcccagactggtctcgaactcctgggctcaaccgatcctccctccttggcctccagaagtgctaagattataggcatgatgctgtccccagtcagattaatattttcaagagaagaaagcagtaatgcaacttttttactttttaaggtgcatttttaggaataaaggggcaacaggtccgcaacttactctcaaatggttcatgtggggggaaaaccacacacgcacacacacaaaaggagggttaaataatgtgataagatgttaatatttggagaatctgggtaaagaatatatgggaatgctttatactcttcttgcaaattctttaagtttgaaattattttaaaccaaatggttttttaaaaaattatgcatagaataacccaaactttctgaaagtcaagggttacacacaaaataaatttgtgtgtatctgtatgtgtttttgggagagggagaatagttcagaataattagaacacgttgagaatttagaattctcttccatttagtccagtgaggatcttaaaaaacctaagaagtactacgtacatatataattttagaccgcattttcagcccaggcaagagtcagagctcatacaactttgtggagggtgaaaagaaccctgccacaaatgtgctacagagcccgcatcatctccacaacaaaacacccgacacccgaggttcaaaaatctacttcatcaaagatcaagaataactctggttagaactgttaaatcagtggaaagttaatgaacatggaggatgaagtccagaaagtgctgtctgcagtgtttggggcaggcattcgcattaggaaaccctctgtggtacaggctctctcagtggccaactatttggtgatctgcacatttttagcatagaaccttgaaatgatacagctgtgctggtcattacggaattctctttttgtgtgacagaattgtgacaggctcccaggacctaaacccagaaggaagcaggaccatattgctgcctagagaaggggatggagcagattccaggacaccgatgaaacagaagcttccatcacagtgctttctgctaccttatgagacagttcgcatctcaacagctctaggatacaaaggaagcacatacatttatactttataaggtggccaaggaatcctactgtgaacaaagaatgtctaagataataaaattccactttttttttctataaaaagcaaatcttgtcccagatgcaagcacttgcaacagaagctctgtgggggaagcctacctctcaaggccctagttcttggctcatccccaccccatgacctggacaagacctgtgagggtgccatttttagtatcaccgtgcctcagtttctccacctgtgcatgtggaatgatactggcagcccccgtagacttatggggatgactgctgagctgatgtctataaaatgttcttaatggcaagggcgaaagagctataaatacaaggtcaaagcagcatttaaaacctttttaaagctgcagccacttctttcttttgaaacagagaaccacagggaggatcaaaggcgtgctgctgttaactgcggctctcaaggccttgccctccacctggcagaaaccctagagaggtctaccatgatttttaccttgactaacaaaatctcaagacaagttgtacaatggtttcctggaacattctgagtaaagaaatgggaaaccaatacagcttacctagcttgttaccttctatgaacgctggcattaaaagtaaaaggcagccttgggaggaagaaatgcaaacacagagggagaacatagcttccccttgtctctctctgccacaaaagcctggccaaagtgactctactaggttgaagcagcctgcataataaaacgcttaaccttggctaagttaacctcctcagccattaaaaaaagggagggtgggggaagggctagcaaaatcaagcttacgggaaataaacctaatcaaagccgagtagtaacaaagggcaccagaaacatttctactgtatcacatcccacaggctggccaagagcccggaattttcattacaactttcaaagagagcaagaggaggagggaaaaagatttcacaaaagcattatcaaggccccaacccaggatgccctgctgtacaaccaaaatttgtaagaggtcagcctttcagggagtcaaaaacccagcatgtggaaactggcaggccttttatatagtgggaggggttcttaaaacgactactgtttcgcactgaagtctctgagcttcacagatcattaaaggtttctgaaccacagagaaaggagggcagagttaaggaaataaatcaaaagttcctctgggacgcacaaatgcctacttggaacaggctttcagcatgaatatcctccacattaaacaacagggaggacttttcaaaataaaagcagaaaagagattcattttgttacaagcaatgcactttttccttttggtgtaaaggttatgtgtgctataaaaaatgactcctgccgtgagtgctgcggggaggtggaggctgggcttggggcaggaggtggtggtggtcaaagaaaacaagtagaagtgaatacaacgcctgagaatgctgtgtttgggggtcccccaaacaagtctaaatgtcccgcaatgatttgggggtaggatgtgaggtaggagaatggtatcagaaaggaatttcttctacatttattccttgccatccttgcccaagaactgaaatcatttccccacagccagaaagaactgtcttctttgtgggtgtgcaacacacacagttgcagatctggggaaaagagactgtgccgttttgaaggcagagcctcacacttcttaaggaaatatcagttgtctcaaaaccagcagagggagtacaacgtttgagaagaggaatggccaacccgattgctgaggattcatgtttagccccgacaatggttgtaaagctgagctatctaccataacttctgcccttgctctcctgtcacccagcaatagtaaacagaaagaaaagctatactacctactcagatggaattagcttgttctaacaaccgcatgaggcagcagagagaaaaggagaactgtccacacttctgtcgggacacagttcctgtgagcagcactgttttggggagaggaatagaagcagggggaaggctcaatgaaaagcagaaagtccaatttggactgacagcaaatcccaaagcaatgattttaccttaaaatccagggctcctaggccagtctgtgaacagctcatttccagaatttttgtttatgagagggcaaaatggagaactctgtctttcaagcttttctttcaacagatgatttgaaacaaaagcagcacactcatgaaggcgtatgtctgctaaatggttgctatcttaatctttagccacagtttatcaaaacatgtaggaatgggttgagaaattaactggtgctaagattatcagcatggacaagttcctggggagggcctggcgacatgatcaaagctaatggtccctctcccaggagcaaagagcctactatttcatgcatgatgatgttgggctctggcactggaaatctttgctcaggtccattctaagtgtcgaaatggtgtaattaatggttagcctgggtatgcactattcaatcaggcaattttttttttttttttttttttttttttactaaatccgaacattaatgctttctcattgtgggaaatgagagctgggataaagacatgctcaactcaacagaacaaacacaacctatatgtgactttatgttagtctaggaactgtgcactgatgcacacccaggaggcactaagttaacacacatgcatgcatacctgcctgcctgctgggtaaggagggctgggcaggggaggggggccgccctggctgggggacacggctggggccattgttgccactttctcctctttgtagacatcaatttttacaaagggccgaatgataaaggtccacaagacctcacccagaacggctgttgcaggaagcagaggcctgagcagcctatagccagaagcccaggcagggggtgtgccaactacacaggcccacatgaagagcctccatgaggaagacgttatggcaagaatcctctaagtctccaagggacgagatcagaacaatgtatggaaggtgaagtgatacagatttcagcttaataaaaggaaggcggcccgaaaaatggaactgttcaaaaccacaatggcttcatttaatgggttcgatgtccccagtctgcaggaatgctgtagaagattcaggtagtgagaaatacctcaacagacaagaaagctacttcaaggacttccttcggcaaggcctttcaaacaagttttaacattgaaaacacccatccttcaaagagcttgaagccccaagtgtccatcttccaggatgcacaagactccccaagccttcatcctcccattactatttaatatccacactacattgttcggcacttggtttccctccagtatgcaccgtggcagccagtaagacacccccagggagcacaaccgcagctcactatttttctccccatgctcaataagttcagtaagtgcttgatgattgactagcatcaggaataaactaggagcattttacattcacactatctagttaaacattccaaatgacagatttccagaaaaatgttgcaacaaatgtaagtatttatagacatgcctggtaaggtatgtagcatttggagaaataataactagaacagagtactgtacaaaagaaaatggtacacttttgtatgagtctaagatatattggacaaatgggtattcctattggtaaacatggacatcttaataaaaatacaaaattactacataaagaagcattacatccttcaactcatctggtggccataaaatggagagaggcacatggacttttctcctgagtcacctgatagatttacaagatcaaaagaaataagggcttcaagtctttttttttttttttttaaagagatggggtcttgctagcttgctcgggctgaactaaagatatcctcctgcctcagcctcccaggtagttggaactatagtaggagtatctaccctgccctgctagaacttcaagttttgatgggcaaatccaccccagaggacaggacaaatgccagtattctggttaatagccccagatgagccagcttcccacccatctcccgtaaggtggcagacacataagggaagccaccttggacctttcaggtcaacccatctaccaggtgatactacagagtgagctttggatacatgacatggaaacaaatggccagctgagtcccacctaaattcctgatctacaaaattattaaaactataatatttatagttttaagccagtaaattacatatactaaaaggttttggtttttagaaatttatttaaaagttttagggtttttctttttaggctcacattatccaaaacgtgtagtttgcccccagttcactggctctgtgctttactttgcgaaactagccatctatacagattcatcgggcctatttcctttagaacttaatcctattgttccacaaattacagattctcgccaaatgaaaacacctccctcgacaacttaaggccacaaacctctgacataattcaatgtgtgtcattagcacatttccaaaacagagcacttgtgggaagaagaaccaagttctgatcttagaagccctgtgcctaagtcaataaccaccaaatcccaaaggtgctggacagatgctgctccggccccgaaaataatcaaacacacaaaagttactattaatatttcttgccaaacaacaatcaaaaaaatccaactcctgcacatgggaacaaagcgacaatggcagcagctgcaaatacataagcgaagcatcactgaagaaagtctccagcttaatattgctcccgacaccctctgtggtggttcactcatacagcaaagacacgggataaaaaattccacagactgttttcaagataataaaatggcatatgatgatgactcactaacagactaaaaggaaaaaatatccgtcaacagtcataggaagcttacaaagctgcagagatctggcaccactaaagctcctccacctcccctggctctcacctccagtacacacatgtatgtgggacatacaaagtgtgtgtgttcatgtgcacaccctttagggattaatttgaagccaagttgcaattggctaatggcttactctactgcttaagacagtattttattcttgactggctcaataaacctgctgagaaaaataaacaatggatttcaatcttataaataatctagaacacagaaccgctgcgcaaacaggagagttgatttactgcgcacaataaacagaacaggaaggaccagtgtggcagagtgaaccccaagtcctagacccattgtcctgggacagtagagttcacaggggttttctgtctattacacaaagtctaaggcctgggatatccaggtttcaaactggtcttaaaaagagcatttcaaagcagatcaggtggagaagctttggtggtgccagatctccgaagctttgtaagcttcctatgactgttgatggatttttttttcctttggtctgttagattttgctcacactgaagagcaaaagatgaggaaaatgttcgtttaaaaacaatgaagagttttcacgtcttaggaccattaattatctacccatgattacaatgtatttcgaacctattatttatacatgcgtgaacacacacacacatacttcattttaagcaaataaaaagtaagggctgttacaggactctaagggtgccataaagaggtattaaaatgaggtccctgcccagaaggctttatattctatataaatacatatatgcattcatgcacacatgtgtgcagagtaaaaatgcatggaaaagaggaatcagagtcaagtccaagaataaaataaaataaattttaattttgttttttgttgttgttgttgtttttgagactactctgttgcccaggctggagcatagcagcgtgatcttggctcactgcagcctcgacctcctgggctcaagtgatcctcccacctcagcctcccgagtagctgtaactacaggtgcgtgtcaccatacccagctaattttttgtattttttgtagagatggggtttcaccatgttgcctaggctagacttgaactcctgggctcaagtgatcctcccacctcaacctcccaaagtgctgggattacagacatgagccactgtacctgcccaatcttaatttgaagagggtggaacaaaacccaactctgctgagatgaaatgggccctttgtgtaacagcaaccagcctggggaggagcagaggcagccccagcaagaccgttagaaatgagggaactttagcagggcaccatggctcatgcctgtgatcccagcactttgggaggccaaggtgggtgtatcatctgaggtcgggagttcaagaccagcctggccaacacagtgaaacctcatctctactaaaaatacaaaattagccaggcatggtggcgcatgcctataatcccagccattcgggaggaagagggaggagaattgcttgaacccgggagacggaggctgtggtgagctgagattgtgccattgcactccagcctgggcaacaagagtgaaactccatctcaaaaaaaaaaaaaaaaaagaaatgaggggactcagatacctttcagagaagacccctggcccacctggccccttcactaggggccatgaaggtaagcacccttattcacctcagacatcccatcctagacagcacaggcctggggttaccaaaagctcccccaaaatcccaactttgtcaactgggatagtttagatatttcaatagtcggccgggcgtggtggctcacacctgtaatcccagcactttgggaggcagaggcgggcgaatcatgaggtcaagagatcaagagcatgctggccaacatggtgaaaccccatctctactaaaactctactaaaaatacaaaactcagctgggcatggtggcgcatgcctgtagtcctagctacttgggaggctgaggcaggagaatcacttgaacccgggaggtggaggttgcggtgagctgagatcgcgccactgcactccagcctgggcaacagagggagattccgtctctaaataaataaataacatttcaatagtcaaatcctggggattatgataccacaattgagaggattcagaagaaggatttaagacacttgagcagaacaaagaattatatttccaaagtgggggggtcggtggggggaagaaacatgggccattaatactgaaacttaattaaaaaattcaacatctcggaaaacttagcttaatggaattctggtatcccaaaggaaggttgctcctgtttgcttttcctatttacctaacacaattaatggttttcaaattatacatgacaggaaaaaaaaaatcttactgggagtagggggatgcctttcccatgctgagcagctgggactgagactgaggttaatgctttgctttacttttcaaaacaatactattaatttttactctattttcctaagtattactcaagggtatagtttcaaataagattaaaaatgaactagttattcaaggattataatttcagatacattttgaaacttagttttaatgtcggtttcctaacagactagatagatatatttttaaaatatcagcaaactagttttcaaagtcagaatagatcttacaaggctaaaaaagaatctatgatataaaatataagctccaagtggataaatccattgactgttaaccacagcaaccacaacttgtaagtctttctaaagaccaattcaaaccttccatttgttttactagctaataaaatggtgcagactatttaggcttcaaagtcataaatgtctccatctaaaagtcatccaggtaaccaagacacagccaaatcataagaaatataggttagcaaataccaacagcaaataaatccctgcaagcaacattttgttcaataacactttaaaagccccaagcatacttcatttgagtgcagtttctataagtaatacatttcaaataattaaagcattctcatgccatccccactagttttcatatgtaggataacgccaaggtcaggctgtttacactgagaacggcaactgtccaaggcccttggtttaaaaagtcacccaattttttaatacctccttttctttccaacaccagcaccaaaagtctcttacgtacttcacttacacaagggaatatcagccagtctctcatagattaccctcacgaaaactggaccactgcccaggcaaatatccctatagttcagactatcacaattaatagattcgagcctcggctccattttaatgggaacaaactctcagcacaggaatagctataggatcacagtacttactgccaaaatgcagtgcctgtttctactggcaatcactttggcctcaaatggaaaattccaactgtttatatctatgtgagcacaaattattaagaaaaacagtatggcacataaatgtctttcctcttacccatcttgccagcccctcaaataacttatatttctttttcatacataaggaatgccaataaaagaaagcaatgcccgaaaacactgtggtattaaacctttatgactatgtaaacttcagttaacaagagaaggccatccttccacataaaaaggcttattaaaaactgaaatagaatctggcaaggtctaactagactgcatgccacaaggtaaagagaacaagagcttttgtatcaagtaagacaggagttacaatcatgtttctagaaaaacatgggagtgggaattgagaagaaaactatattgagaagtcctggctcacggtcaggcgcggtggctcacacctgtaatcccagcactttgggaggccaaggcgggcggatcacaaggtcaggagatcgagaccatcctggttaacatggtgaaaaccccgtctctactaaaaacacaaaaaattagccaggcgtggtggcgggcgcctgtagtcccagctactcgggaggctgaggcaggagaatggcgtgaacctgggaggcggagcttgcagtgagccgagactgcataactgcactccagcctgggcgacagagcgagactccatctccaaaaaaaaaaaaaaaagaaaagaaaagaaaagaaaagaaatcctattattgacaatggaaataagccctgatacttttctgtttgaaatattttgcaataattagaaaaacaaaatcaagccctaatagtgaaactttacaattttaacagaataaagacagtatcattttaagaatgatatactatgcaggctcagaattctgcaagtctgcattactgtaaatagcggtgcttcctaaactttacagtactttggaatcctctggggggtccgttaaaatgcagattctggctcaagagacaaggacagggcctgagaatcttccattttaaccagtgatgagagtgctggcctgaggagcacactgtgagcagtgaggatagacaacgtttgtagaagagggacaaggtttaaaaacagagatcttctaatgtactggtatgtggccgtgacacatttgcacattctcagtagcatcaaccgactaaggaagtccatactttgttatgcaacattagattaagcattaatgaggctaggaaaattgtttatttaaggttataacctgaaattaaataaaacttcaggctggaagctcatattgaatactagaatcatttttaacctcttaatattaacagaaacctgattactcagtcttaaagccctttctcaatagcatttattctctgctgcaggaatatggtctatgcaaatgacattttgcctgaagaaaaaagtacagttaatggccagtagttacgtacgtatttaatagaattcattcccagaaatgtggctaagaaaggtggttgattttcatgttatttattaaattaaaaatttaaatctctaatacctttcatcccattacttaaagttaaaaacgtcaaaactggctgccctttcactgggcccttggtgccaaacagtgacacatttccaatagagaaaatgaagatagaaggcaggcttcccttcccattaactttgaactttcaagtccctatctgtcttcctacaagactaaattataagaagagcctcctctttggtcccatcctatacatacttcggtagcacagccctcacttctcttcttaaaagccttaaatgggtcccatccccacactcacccatacacattctttggagggaattcaaggtcccccaaaatctaccctgcagctataatttgggcccaagttctactgcatccgcttatgcaacctcctttccaaccatgctcatgtacttgctgggcacgttttacaatttcctgtctccgtgcctttgttcatagtatttcctatggctggaaagttgcttttcctctaccctcccaacctgggcctgtcaaaaatgaatccttccttcaaagcccagttcaaacaccgcccctccaattagctttccaggagcctctgtgctcactttgtggggcctgaacctccacccaccagggccctcagcacattctaccaagtatggcaggtatgtaaatgtcgtgctggctccctgcagggcagggatggcaccttgcttctctttatagataccctacccattgcagtgctcagtgggcacccagaactttaaaaaattgaactatacacaaaatttagttctgataatgggaagtgaatgaaaatgagtttccagtgtagtaagtgtcaatgcaccaccaactgggattacaaatgacacaagcttaatcttcactgggctaggtgctcaaaaataaaaagaaagagacgagaaagacagccaaagcatgtcccctttcaccttccatctccctccaggggctaacactttgggaacacctcttggctaccaagctggggtagatcacattgtcttctcaccaatcttagttgcaccagagacaagcaacggcaggtcactgaggaagcgctcctggactacgacccagtgccagctgaatttgtctaagtaataggagacacagctataaacaaaggccaggattcaagggacaatcatccaggtgccagacacaaaaagtctttggttcaaataactgatatgtcctcagagaagagatatgtcaccactgcttgaataattatctcatgattttgaagaaaactgcaatgtatagacaaatcaaacaaaaaattatttttggatcatccacgattttgtgttattcctaacatggattcacctttaggtaattaagattctctattaggcctcctactttttcaggcattaccttaacatcaaagctcatgtaccatccatctacccaacaataagtggcagggctcaaagcagaatcaagaggcctagttctccactgtcctcccaaaagttcagacaccgggcgctctgtgacttatacaaatatactaacacttaagactctgatgtggtttatgacaaacagtggcttgacagagaagaggtatacagccaaggtgaatctaaaatgctccacccgtattcctgactacatttcacctactaattatatactttataagcatattgaggggaggtaaatggttatagagaaacagagaatgggaaaaagtataataaactacaggatatttgcacaaccatgacactaaaagatttgacttgtagttattctcttgggtaccctgaggttaacacgtaatacccattcaactaagcctctataaacagttgggttttccgcaatcacagccactattcccacttcagtgggcagcagtgttcagagaaaagccagatttagctcttgtgcaataaacaccagaaaccaaaagagctaggaaagctgtttacgtctatgcccaccaggaacccttctctgctataaccgcatgaatgaactggtaagaatgaggtctcaacaaagcttcaagacggacgttgttaactagttgctgccctccaagtttttggcaagacagattaatgaaaaacaggtaacttatttttatacaggctcagtatatttacaagcagaaaggaattctgtacttttcaaagcatttagctaccaccttatgtagtatttaaggtagacaggaagaacaatcatttccaagtatttctatgcactctttacaaacattatctcatttaaattctcaaaataatcaaaagggtaggaattatcaccccattttacaaacgcagaaattaaaggacagaggggatgaataatctgcctaaggttccagagcaagtaagtagcagagaaggcaagaatcatcacttcgttctcaggcactgcagcaagtaacgacgtacaggcattttataacgaccacagcacctacacaattctcatgcagagaaacaccattttacagaaaataacttcccagtgttgtcaagatttgacctgagctttccaatgaacagctcaaggcagactgcacaattaaaaagagatcatcaagtactatagttaccagtaaggccaagaatagaacacaggtctgctgacccttgcaccaatgcccaatcaggcatgttcttttggatgctgacacccttctcaagttccaagtcacttgcgaataacaaagaaatgagttaataattctggtagacagaagaaaatgtaagccaggcatggtagcgtgcacctgtaatcccagctattcaggggaggatcacttgagcccaggagtttgagaccagccagggcaacagagttagatcttgtctcattaaaaaagagagagagagaaagagagagagaatgtgaaaagtatctatattagagggatttgctatcaaaaggggcatgactataagaattctacccagcaagttctgaatcaacaacactggtacatgcaaatctcatcttctgcagcaaaaagtaaaaaatgacctctgccctcccctccctgtgggctgtgaatgattagcttggctatgttgataactagagaaaataagaaaacacaagatgagtgcctctcccagctcattataatacttacagatttaccctactaccaaactcctccagtgcaatgcaaaagacagcaaggacactatgaatatttagcaaatgtcaggcataataaatcctccattgctgcaaacaactctctcattagttccaatgatggtgactgatgaagactttggaaataggaaaactgctgggtgctagagaagggagaagagctacagcgtgggaaactgtgaaggcggaggagtgatggggaaaggtctcagcaaagaggctagtggaaaagacaaccagagaactagctcaaaaggttggtgtactgagaatgcctctgaaggagaaaaaaggctatttatttacggagtcacacatcatcaataagaagggaaaatcaagagcaaaaagaaaaacatagtagaagaacttaactaggttaaaggttactcacatctgcttccactacggagataaaacactaagtaaaattaccgagcatttccaaatgccagatggtagaatttagatttaatgcttaatcttccaattatgaatttattttttaaaactgaaagataaaataattgtcaagatagttctgtatcaaattcttcatggtttgcaacttttagcagagcagagacagagaacttgagaggctacaatctgagcgatcaggagaaatctactcactgatctcttttttactcagccaaaccaaacttcctacactcgggcaaaggcattttaatttttaatcatatcaaacttcaagtcactgaaatccccagaaaacttaaaatatgtatctcaatattccatattaaataactctaccctgttctgggaagggtaagaaataagttgattatatagattggcatcataatacatcttagtttaatgttcataaacaggtttctctctctctgttttttaccattctcaatatgatccatcctagcatatgagatgcgtaatacttaaatttaattgtcattgactgatgcaaatcatccatttatatatacaagactatacttgaaatcacaaaacccttcttccccatgagttatcactgtccttgaggtactatacagtaagtgtccagaaaaacagctcatttttaaaaagacagaattaaacaagaggaaatcagtaaacaacatccaattaaaaaattaagccaaaaaacccaaattatccgcatacttttatagtagatattcttgcatccatctcccacctccactccctaaaaaagcagctcaatgtctaggcagattaaacatggatcactcctcccaaagtcctgaagagtgtttctggttaatgagtcctcccttcgccttcagacagtggagtggctgctccaactccatcccatctgccctatcccgtggcctagccagagggaagactctctccccatctgcctctacaccaccagggaaggagatgaggagggaggcaaccacagggaaatgagaatgaatcccttccccgcattctcttcatataatttcactctgtattttcctcagcaaatccttctacctcacgtttatcgggcacatttgtcagctctgacccccagctttgtgaaatactaagtagttttttgtaaagctccatttaagcaatttataagatccccttgtacatctgtccagtggaaagtgcaaactctcagggatagaatattaaagagttaaaactcctcttcaaaacagagcaacattgaaaaatggaaaaaatcccccagaactcaaagtataataagccacaaacctctggtttggttgatgatttctgccaattaccaaattcaaactagtgataaaatgctatttcctattccagccactatgtttaaaatttgatgttaactctccaacaatccttcccccacaactaaccctctgttcccaaagacctttctgttctcagagttacaacagaagtctatgttctccaggcggataagcataatctgtcactttactatctaaaaattatgaactcaaattaaaagtcaagggagtaaaacggagagaattctggaggccagcccgagtctgagcacagcgcagggttaaaggaaaccatttcataagatcaaatgtggagaggcagcaggagcaaagaggaaaaaatcaagttacataaagtccaattgtactcactgtttccttattgggaagcagctcctttctaattctgaagaagttcttcccgtactgcctgagtcccttaacgaagcgtttctgtgataaaaagaaacaaatgggatgtaaaaaccaaaaacaaaacaggatgtcagcaaagcaaagatatctacaatcagcagaataacaaccacaaaaaaagtctcggctagggaatactgccgaggctcggagagtatgtcagcagctcagctgggacccactggccagggcaggccccagctaccttcatcagaaccccaatcccacccaccacgcagggcagcgcgtttaagagaaggacgtcctgcgtctgaggctaagaagcaatctgtccccctcttccaccaggcacacattctggtgcacgaaggtataaatatgctccatgttttaataaaacacaactgctttcccacctgagaaccaagcttcccagaagtgtcgagcagaaaggggaaacagaaccaaacccggtgactcttctccagaagggaaccctagggggttaaaaggccgctttccttaatccaaagaatttgccaggaggcaccggaaggcaccagtatcacagaagcccaccgggaacacgaaagccagcgggcctgccccaccgtccgtcattaaaagccactccgagacaccagagaataaccagcaccccttccgccctcccgacgccactcgccgcccccatccattttcgcagcagactcgtccctaaccccagcccggagactttcactttgtcccatgcctcccgagcacccctccccgccccggtgggggcagctcctggctccgagcccccacctcggggctcccagcctggtcccgggcggccgaccccagcagccacaggtaagcgcccggggtccggggcggcaagaggccgtcgcctgtcactgggctccggctccacaaagcgcagggcggaggcggccgcgggtggctcggcgtgtgaccgcggcggggccgcgcggcgcggggcccggggggcgcggggctggggccgccgctgacgggggaggaggcaggagcgcggcgcgcagagcccggcgcggccgcgggcggctgcaaaaggcggcctggattgccgccgccctcctgtccgccagccggggccccgcgccccggccccggccccgcccccggcccgacccccaccccgaggccggagcctccagggcacccggcgctggaatctgtgtcctccttccggacaggagaacatcaaggcggtaaagcacagaaacttcctccctaccgcagcaagcgtggggagagggcgcccacagggctggggcccttcccaggctgctgggtctccagcccacgttccggatggacgaagtcggctgcgccccggccgcacgccctccgccccaaccccgcctcagctgcgaaacggggggctggccccgacgccccccgcggtcccttccggcccgcgattgtgggcggcctctccctggcggcccaggcattagcctgcacttccccggccgccgcttcacaactaaatcaccgcggaagcttcccagccaataaatcacctgcccaccgggcagagggtccctcccactccctgtgtttgagacccgccaggcggattcagtgaagggccagacttagccttttaagaccagtctgcaacctcctactccagtagtggaggctttgcgtttttgaatttcacccttgctgagatatgactcatcattgtcaattttcaatataattcatacagttcgaagggaaaatctctcaaggcacaagaaagcagcaagctctcctctagtgtgaggagtgacctttgttacttgacaaaagtatcgtttatatgatcaacaggcatcctacgctgtgtgcacacagcatatcaccgggagagacggcacggaaagatggccctgccctcaaggagctgcagtctgcccaggaaggcagacaggtaaacaaaccagtcctagggcctgcaagaaaagcagcagaggaacaaagggtggtgggtgaagctaggaagaggaagcaacttactctgcttgctgatgtcttagaggaagtgacaaggaagagtgtgagcctgccaggtgggctccagcagggcttccagcagaagtcagccaggaaaaggcacagggaacattctgggaactgcaaggaggacagggtgtgcagaatggagtgccagcagataagacgaaagaggcaggcaaggatccggttgcagagagcccttcaggccgcacggaagagttcctaattgtaggctggcagaaaggctgaagctggagctttccatgaaaagactggatgaggactgtgccagtggcagtgtggcctaagtgtagattagggacagaccagttaaagaggctgctgacacagttcaggtatgagatgaggacctcaactactggcacactccacctcagtaatcagaattcctgccgcttaatccattcttcaagtattcaggtatttactgagcacctagctgagaggggtctaggaagataataaaggttgccatggacctttactgaactgtgattcatttttgcacgtaagataagtatgtgtgaagtcattacagaacattctgagatgtcatctggccaagcataaagaagtgaggtgcagctcatcagtgcagcaagggacccaagaaggctagactgcagtggtctgtagtagttcagaatgccttcgccaaggcagtgacatcagcgagatcacaaggggtgggcaactattgcaggggtgggaggtggcttggtgaccgggccctccgtgaaggtcagaggtggagaatgggaggtgggttacaggggacagtctacacagacttggggcgggcaatctggagtgagccaggctgtggaacgccaggaccatgcaatcggaacgtgggcttgataccaagtgacatctaacaggtccagtaaaagaggcctacacaataaaggcagcatgtgagaaaggctgactctggaacatcagggtaaggtggcagagttggacaaacaaattcagatcctgtttcttccatttattgtgatgcaatcctttgaacatcatccattcaaccaatagttactaagtacctactatatgccaggagcctcatatatattaattcgaaatctttacaacctaagaagaagtacaattattatccccattttacagacaaggaagctgaggcacagataggtaactagatcaactcctcagagacaaagccagaattcaaacttaagccccctcaaatcctcagagccacactctgtaaaatgcaggcaggcgtctacagtggtaactattttctgttaccattttctatgagtctgtactttcctcttctcgggtccaatgtcaaatcataaagtcctcagtattcttcctaagaagtgtctttcagccgggcgcggtggctcatgcctgtaatcctagcactttgggaggctgaggcgggcagaccacaaggccaggagatcgagaccatcctggctaacacagtgaaaccccgtctctactaaaaatacaaaaaattagctgggcatggtggtgggcgcctgtagtcccagctactggggaggctgaggcaggagaatggcgtcaacccgggaggcgcagcttgcagtgagccgaaattgcgccactgcactccagcctgggcgacagagactctgtctcaaaaaaaaaaaaaaaaaaagtgtctttcaacgccctcctttcctgctcatgctagtggcagtcccaggccagacctttatctctctttcctaataactaggctattaaccatctcccccatccagccatttaaaagcctctgccaaggaatttttcccaactatagatttcatcctgagtcccactttatctggcccttagcccctacctaagaacagcatggtggtctctgcaggacagtgtttacactccttagccctgaattcaaggccctccaggatcctggccctgcccacctttccagccagatgtccagtaatgccaactggcccacactgggggacctctgtctcaactccagaatctgggtaaggcatctccacgttcacctcaaaatctctcctactcccaaatgaaaccagatgtccagttactctctcattagtttatttatttgtataaggcctgcttacccaaaaagtccataaactcttaaaataattacatcttacacctagtgcctccatataacactaggcagttgatgctcaccacattttttgtctcctttaaaaattatttatttattaacgatgaggtctcactatattgcccaggctggtctcaaactcctggcctcaagcaatcctcccgctttgacctcccaaagtgttgagattacaggtgtgagtcaccgcacccggacaagtgaaaccaaccatgagatgctgagggcctgggctagggtggtcacagtggaaatggactgttgaaagccagaaggtccattttgaactctcctaacagagctgacctcttgctccatgatgccaaactctcctagttttgctcataccacttggcctaattctctactcaacctctaaatgctggagtctccccaaagctttgtcctagggctttctgctatatatatcctctccccatatgatctccactgttcccttggctctaaatatctttcgagattgtcactggtatttctaagactaaatctatggtccaagtccactgggaacactcaacttgaacgtttcacaggtatctcaaactaattacttccagaaataggaatttgacatctggtggtgaacacagacctaccacagctgtcaatgtatgtcaatataatgctatcaagagcaaaagcacccttggccccactttaaaaaaaaaaaaaaaaaaaaaaggaagtaaaagcttcatgtggcctgtactgttacttctctatggaaagccacaaggcctcaaaaccagcaaaacatctgcttctcagagaccagcctttagcttgtggtttaccagaaatgtagagtagccctgaaaatcgaaacaaagacgaccactcacagtagtcaatgattggaaggggtcacacgtgaaagagacttctgttgcggctgtctcctttccctctataaattcatcgctcttcaaatgaagaccccgaagtttttaagactttaacaattaacactattgacttataaatcaacaggccctataagcctctaaatgcaagttcatggagacagtctgtttcttaagagtcttctagttgttgagctgaaattcggcatttccagtgctgaaattcaaggtctcatgaattatttctgtgtccattagtttttctatcactcccagtgtatagatattagaatagcaggatgccaagggtaaaggaggaaggaaatatagaaggcaagtcactgacttggccactgctgccagcgctgggcagctctgctgtttatgctccccagctcatagcctgcccactctcagacgcacgaactgagcgtcttgagatgttggcacttgtttctctggtgtgttcatgcccaaccaacccaactaggtgctgctccttggaaacataaaacaagtccttttctgtttgtgtacccccatagccaggtgagatccaaatataaataaatatttatggcaaggagattgttgctttgtgttacaacttacgtttatgattttgtgctctaatttttagataaactgctatagttttccactattgagctgaatttcgtatcaccatcaaaagttacctacctacaagtccctagtagagaaaatttaacttctggctttaaaaaagtaagttacctgaacccagcattactagccttgggttttaatagaacctggaaagctctgttttgcattttcgctacagtggaaagaacgcaaggttcagacttggaagccatgtgatctagtctgctcctatgttccaaaaaggaaattctgacatggctgtttagacctagccactttagaaacagctatattggaataaaaataacaataacataaaaataaaaataaccacgtcaaaatgcattaaattaatgtgttcaaaagttcctcatgctattgcttgagcccaccccctgtcatagtcccccaagccttgtgcctcagcctcactggtctgcctagatactggtcctcacctctccacctttgggatggcacgtggacctggtgcaagtagcatcaccattaacctactgatgagtacaaacggcattgatttttacatgcgtcatggtatgagaaaggcagggaaacaccaccctagaacaataaaaatggtgaacactgagcgctataacgtgccagccactgtcttaaaggctctaatgcactagctcatttaatcatcacaacaaccttatgaggcagaggctactgctattcccatcttttaggtgggaaaagtaaccatgtatcactaaatccttgaaccaggctgggagggtcaagggggaccagtgtaaaaaattgggaagcctcagagctgtggtgggcctaggaatggagccgagggtgcagacaagggatgtgatgatgtggctgctgcctgtgtttgcatcccaagatattgtttcccaaaaattctatgtgtggatagagaatactgggctgagagtaaaccctgaaagggtaaggtgtgcaaattcccctcatctacacatgaaactcccagcacatctcattctggcgtcatcccaggtgctggacctgacccctatctgcagtagcaagagagcagaagacaggggctaagctacaaaaatggctaaaagatacctctgcattaacccctggctgagagctttcaaaattaactccctctggtgaattttaactagtgtatcacagtcagaaactcaccatgacttctgaaaagggacatctactcagtcctcttacataactgtttggaaaacactgtaggtattaaaatgattcccactgtgaaaatggctccttctgttttaccctgatttctgcacaaaattttatgttaataatttattggttcacaggggacagaaaagcaggcagatctgctagtaagcaaactacagctcccccgaggagacacacaggcagtgggtaagaggaacagacccatggctccactgaagacacagagcagcagacgaaaaagacatgtcctaaatgttaaatggtaaggaggggtagggtgaaaaaagggaacatggatgccaggcagaagaaataaaagcctttccaaacatttgtattacatgatgctggctctcactgataaaccactggatgagaactgtacttcatccatatcatcctgttggttgcagatcccgtcaccccatatctaaaacatatttccttctggagctttactgttgatactgctttgagatgtatcatttggttttggttttacatatttaacattttaatgaaagggtgacttgagtaaggcactactttttcaataaatagcaacagaaccaatttgcctgggaggagacctgccagcaagccatgaggggcatttccaaaatttccagtataggctgctcccaatttctgcctccactttaaaaacactttgcacttactagtgttattccaggagagccagttaatagtttaatgaaactagttagagtttaaaggcagcaaatgggataatttaaaataatcatcccatttttattgatggttctcaaatctctctccagatctgacattttgccctagctcagacttgtacctacactttctattcagactaacgtcctccatagttttaggacatcaccatcccaacttgggcactgacagcccacaggccacatcctcctcaagtagcaactcatgaacccagagaactgactgaaatagttcagtgtttcttgagctccccaaggccttcaggcttctgtgcagagtggaagtggtagtggtagtggcacaagtatgctaattgccacagtacactctccaaggtaagtgtaaccgggcccattctacagataaactaaaggttaggtaaattaaatctcctggcccatccacatctaatcatcatcagggccaggattcaagtccagttctaacaacaaaagccatgccaatggtaacagagtgcgtgtgagctgctaagtacttctgtgtattaactcatgccattaaagtccgtagatgccatagggtgacccagagccacactgggtaggcccctccaggcattcctttgtcttccaaataccaactgaggtgcaggcttattacccttacgttactactggcacaagtaaaacttcttcctgcatataccttaagacgggggtctccagtccccagggtacaaaccactaccagcctgttaggaactgggccacaaagcaggaagtgagcggcaggcaagtgagcaaagcttcatctgtatttacagatgctccccctggcttgcattaccgcctgagctctacctcctgtcacatcagcagcggcattagattttcataggaccacgaatcctattgtgaactgcgcatgtgagggatctgggttgcgtgcttcttttgagaatctaatgtctgatgatctgtcactgttttccatcaccctcaggtgggactgtccagttgcaggaaaacaagctcagggctcctactgattctacattatagggagttgtataattaattcattacatattacaatgtaataataatagaaataaagtgcacaataaatgtaatgcgcttgaatcatcctgaaaccatccttcccctcagcccatggaaaagctgtcttccacaaagctggtccctggttccaaaaaggttggggacctctgctgtataccactgtagtcttataaacactgtttacttaattaacctaaacatttaaaatgtttcctttcttcaataataaattaaccttagcttactgtaacttttttcactttataaagtttaaaattaacctcatgggcctagcacctcaaatctcccccgcttctctctccccaagccagcttgccctctcttagctccctgtggccctatttctgtcagctgcagcagagttctagaagaagtgcctggcgtgctctctgtccattcccactccttccatcagtcaccatgccctctagattcattcttcacttcatggagtttcctgttcggcatgctcctcggtttttgcaagggctctgccaactacagggccacgtcatgccagtgactgcactggtctcctccctggcctcagtgtgtctccacacccctccccccaacattccagttctgggcattctgtatattaatgtgttctcttatttgaagacctgtgacaattcctagtacgtccaaactatcggtctgctagttagttaacagcctccacaattgggttcccaatcacctacaccaccatgtagtgaagttagttactgcagtaccccatcctgattcctttccctgggtttttaccaatgcctttctctcttacccaatctagaatgtcccctcttcacttctgcttattcaaacacatcaactcaactaacattcattgagccctcattctagtgaacacactgtgcaaagagcacagcacgaggcactgagtgaacaaggagcacagcacgaggcactgagtgaacaaggagcacagcacgaggcactgtgcgaagcatgttccagtttcaactctatccctacacagagtccgctctgctctctctcccttctctgaaaaacaacaattcctgtttatgactagaattaataagcacttctgccattaaaaggtctatagatcttccaccaaattgtggattcctttccagcaagaggtgagtatttcatgtcttgtgtaatcttcagagtgcctggcaaactgtaaccaagcaatatgataactgttgggtggctgcatgggtattgtttttggtcctagagttctccctgaaacataatacatgtttggtaggatggaaacaaaatttctaatcaatgttagatttgtttctttttttccaagaagaatggagaagtaaatcatattttaaaatgggattgattacttggactctcagtgcagaaaacactgttttatatctattcatctcagaggaataaagggtgtgatacttcttaaggtacttcttaagatactttaaaggaaagtttacatatatatacacatatacatatacatatacccaaacttaaactcttgaaataaaagcacatgtcggagattatatgctgtatgctggatatccatgaggaaaattttcccacaaacaacctggcatggttcagtaactaaataactacatcccccgtactggtaactagccctatctcaggactactgtgttcctgggtgcaagatgggtgtctaggcctccaccatcttcaaagcctcaatttctatgtccctggttctcttaacaatggaacagtcgtaaagcagggtagcctcttggtcctacaaagagacaagaggaggactcaactatttccaaaaagacatcttgtcttgcatgctatgttttgtcaactgtcttaaatacctttaatatctaataacaccacttccacttggttctccctctctggacatgtgtctttgaaataaatcctagtttcagcacacacaaaaaagacctgtttcccaggctagtcccagaagattctatggtaattacaacaggatcccaaatccaagccctctgagtaacagtccattcatttcttttttttttttttttttgagacggagtctcgctctgtcgcccaggtcggactgcggactgcagtggcgcaatctcggctcactgcaagctccgcttcccgggttcacgccattctcctgcctcagcctcccgagtagctgggactacaggcgcccgccaccgcgcccggctaattttttgtatttttagtagagacggggtttcaccttgttagccaggatggtctcgatctcctgacctcatgatccacccgcctcggcctcccaaagtgctgggattacaggcgtgagccaccgcgcccggccccattcatttctaaaagaagtcctctctagggtcaaatatggcagctgtttagctgacacagaggagtaataccaaagagttctcttttctgtttcctttcttttcctctttttcctaatcttccaaaggccaaagagaatgagaaggagcacttgggaaggtagatctaatataatcctgcctggctgttctaccctcctcagttcatgagtatcatgataatggacagctcctggtttaaatcattgttttattccatcaccccaccactagcaacccccagttaagattagctatagaaacataacacaaagggtgactgaagcgccaggtctttcagtgtgtgaggccagcaagagtccaacagcccctcaatgtcccagctgactcttctgatgatatgctcagaaatgtctacagaagctgagcagctgccagctcaacacaccctgccacacctgcgctatcggtggaatcagagaatgagaaagctagaaagaagctttagagaactacgctggttgaaaccctcatattactgatgaggaccataaatcatttaactgaaattaaaccaacaaatcaaaccacacatacccacaaaatctttacatttgtgacaaactatattttctagaggtggccactccaatacagattccatcccacatgctctaacaatgtgataatgacactccttcattgacaggtgggtctctctgttctctcctcctgagcctgggtagacctttgtaactgtcttgaccaacagaatgtgacagaatgataccaggtgacttctaagactacatcatacaaagcaacacagcttctgctgggctctccctctctggacacgtgtctttgaagccctgagctgccagattaaacagtccggcttgcctaaagtcaccacgctggagagaccatcagggatggagaggtgctacagaaaccctagctattctagtccccagccatttgagtcttcctagcccagactcataagtgaagaaaccttcaagatgattccaatacctcctatcacttgactgcaacctcgtgaaagcctaagccagacctgcacggtggagccattcctaaattctggtcccacagaaactgtgaaagataataaatgatcatcattgctttacattgggctaatttttattatcaggggtaacgtgttacatagcgataggcaactaatacaagattcattactaaaaccactaaaaactttaacctgttagtcactattaatttaagcaaacaaataagcaatcttccaatgatgcttccccaatttgcatgcctctctataaccttactctgccttcattttaaggcctagctcttatcaccatatgtgatatgattagataacacgatataggctacgttactgaatatatgaggaaagggcctttgttttgttcactattatatccccagcacctagaacagcacttgacaacatatagcaggtgcttgacaaccactggttcagtacaagaatgtatctggagatgattgggcttagtgttcctccaaggctatttgacctctcatcacctgttctccagtttgactcaacgtctcttaatatatattcactgcactgttaagtttctaactctctaactactactgacaaaaccattagatgttcttcgttcaaacccactagaggaactacaccatcccctccgtgatgccagctcagcatccagagtagagccagtgatttcctttgtcaacacacctgcatgccaaaaacccttcccaggaggtctcaaatatcaaataaaagttactccatttttcattcaaagaccatgtgcccaatgggaaaatgacctcatgttgtggtttaaacagcaactgcacccactagcacagcccattgagctatcctatatatacatctctgtcagtgcccctctgggtctagataattacactgagtacactgaagtcctttcattattgcaggcccaacaaaaagtactgccactgggtgaatatcagaaagcatgcatcaatgcactttcaagtcaaatgagaactggctagttaagcagcagcattaacagatgtagagattgtgccagccaaatgcctcttgccaattatggccacacagctacgcccaaattaaaaataacccaacacggccaggtgcactggctcatgcctgtaatcccagcactttgggaggctgaggcaggcagatcacgaggtcaggagtttgagaccagcctggtcaacatggtgaaaccccaactctactaaaaatacaaaaattagccaggcgtggtggcgtgtgcctgtgatctcagctccttgggaggctgaggcaggagaattgcttgaacccgggagacagaggttgcaatgagctgagattgtgccactgcactccaacctgggcgacagagcgagactcaatctcaaataaataaataaaaaataaataaaataacccaacactcataacagaatccaaatgggcatgggaggctccttctctccctacaatatcaccctacagtcgctacataaatgcccctgtaaagtggctcctaagttatgtcattaaaatgttcacctttccttggcaaagtagatctcaacacaggaggaaagagaaataagctaaaaaaagaaatgtggattgtctagaagttacaagggaacaaaaaagtagaaatcctccgtgagaggattttgcaaaaactgtaattaaaggaatctagaccagtggttgcccgatagaaatataagccaaaaatgtaagttttactcttctagtaaccatactttaaaaagaaacaggtaaaattaatttaaatgttttatttaactaaaaagatcaaaaatattatcatttcaacatgtaatcaatataaaagttagtaatgaaatattttacattctttttcttcctgctcagtctttgaaatcagtgtgtattttacactgaccgtgcatctacacttgggccagcacattgcagatgctcaacagccacaagagaccagtggttaccacattggaaagcacaggtctagaataatcctaacttctttttttgtaaaatactgaaacatccaaagcactccaagttttctattagggaggcaaaataactatactgttagaatcatgggcaacgatatcataaattcctaaaataaaaccacatagggccgttatttcaaattacataaaacttgtcttctagaagaattcgaccaaatgccaaagttcttaagatctgccccacttcccaaacaagggaaactgaagacctcgaccagcaccagggccttccgtcagctcctgatacaggaggggctcctggattttgtttccccttcttgacaatacaacatgggactgggttcctcatttgactcggttcatttaaagaatgatctcaaagaagaaaggaaaatcaatgacccctttaggaaatgtagtccagggtgggggtggaggaagcatttcaatgacaaaagccaaacctcagtcataatgcagatccctgtctaacaggtgatcattgttttttttttctattacaggcactctggtctcccgcctaccccatgcaggatggctatccccatgcagaatggctgtgactttcaagagagtcccccaagggagggtcccaagatcaggggctggtaatgggccccaccacaaggctacgctgctggcttttgtttggaacaatagcgctcccatgatacctcactcttgctgacaatattggtaatacgggagcatgaacacagctgtgtgtaaattacacacacaaacagattagatctgtatatttataaggaatacaaacatactaatagctcatttacatacacagctggatacaatgggctgcatgcagaggggagtttgagttccaaagtatttctctaaaattttacaaaaagaaatgctcagattactgctaacccaggctgagacttctgctccccccacccccatgcagtatgtcccccgaaatagagtccttttcatcctcgtttgtgatatttgagatgctatgaaggagaaacctcaacaagtgctgttagatttcacttttattattatttattattatttttagagacagggtcttgctctgccacctaggctacagtggtatgatcacagttcactgtaacgtggagcttccgggctcaaatgatcctcctggctcggcctcccaagtaggtcagactacaggtatgtgtcagttaccatgcccagctaattttaaaaatatttttttgtagagacggggttctcactatgttgcccaggcttggtcttgaactcttgatttcaagcaatcctgctgcctcagcctcccaaagagttgggattatggcatgagccactgtgcccagccagatctcactcctgtaggaaaaaaatcaatataggataattttcagttaaaaagatgtatatacatacgaagagggagacctactaaaacatctgttacaacagcatatagtaaggcagaatctttgcattttcaaaatgttttcataaactttatttgttagagcaatttcaggttcacagcaaaacggaacagaaggtatagggatttcccatatagatgggtctctggatttttcagctaattttgaaaaatagggaaaagagcaatcagcattttgtgctcactacagtaaaccaggaacacaggcatcaggagagctgggctctgattcaaaggcctgattctagcaaggcctcacagtttacttccggctagccatgaacactctctgcgcctgaggttttcgtggaaagacagcatcacaagtactcaaatgtagcgtttaaaagtactaacttttaaaatgttgaatgttccagtaaaacagttaaagaaaaaaaaaggtaataatccaactaagtaaaaatattaacttatacatatctggatagatgataagctcattacaggccctaattttattatttaaaatgtttacaacaaaactctctaattgatattctccctctctctctctttttgccttgatatggtttctataaactcttggtttaaaaaagaaaaaaggtccatttctgaggcttgggtttactgtacttacagttccaccagtaaatcgtctcccagtctgggctggagaagcgctggccacggtttgattgctccagccccaggttgccaggcaacccacacaagggggaagtctgagaaccgctgacagatagccaagtggctgaaacaacagacttctctctgtcaaaaatgtgtttgagagagccacttgcccacctctgctctctgctaaacactacatgattgtaaaatcaaaatcaaaaggccactgtaataaaaacacacttcctgctcaattactaattgttctaaagctgtggggaggcccagatcctacagtgtatggcaacagaaatgcgatactgtaaatgagataaagccagcagcatgcaagaaacctgatctaaatgcatctccgtagcttcaagtcaggagagctggtgtgtggaggaatcaactgcctaagaaaacaccaggaagaaaataatgaatgtcaagatgttaaagaaacaaaccaatcaataactacgaagctagaggtcaagactacttagtaataaaaccaagaacattctccattgttttgaaacacaatctggaggcaatgaaagttttctccctcagatggaaaggaggagcaagaaaggtcaatgacccttgggaaccacaccccctggcggttccaggtggattccctgatacttgactgtaaatgggattacaggaaatagtagcatccttaggataatgcaggacaataacaggtctgagagtctaatgcaacatttaaaatacctatggtgtgagctgggcacagtggctcacgcctgtaatcccagcactttgggaggccgaggtgggtggatcacctgaggtcaaaagtttgagaccagcctggccaacacagtgaaaccccgtctacactaaaaatacaaaaaattagctgggcatggtggcaaacgcctgtaatcccagctactggggaggctgaggcaggagaattgcttcaacccgggaggcagaggttgcagtgagctgagatcgcgccattacactccagcctgggcaacaagagtgaaactccctctcaaacaaacaaaaacaaaatatctatggtgcatgtaccaagccagtaacattgtgcccaacaccaactctatgcagcatccttccatgaaaccactgtattgaaactgtcatcttggactctggaaactatttgtagtatgtggaaggggccagcactgagtgcacagttctttatctcttctgtgccatggaccctttggcagtctggtaaagcctgactccttctaaaaatggtttatggccaggcacggctcatgcctgtaatcctagcactttgggaggccgaggcaggcggacatgaggttaggagatcgagaccatcctggccaatatggtgaaaccctgtctctactaaaaatacaaacaattagctgggcgtggtggcgcatgcctgtaatcccagctactcaggaggctgaggcaggagaatcacttgaaccagggagtcagaggtcgcagtaagccgagatcatgccactgaactccagcctggcgacagagcgagactccacctaaaaaaaaaaaaaaaaaggctgggcacggtggctcctgtctgtaatcccagcactttgggaggccgaggctggcggatcacctaacgtcgagtttgagactagcctggccaacatggtgaaacctcgtctctactaaaaatacaaaaaaaaaaaaaaattagctgggcatggtggtacatgcctgtagtcccacctacttggggaggctgaggcaggagaatcgcttgaacccaggaggcggaagttgcagtgaaccaagaccatgccactgcactccagcctcggtgacagagggagactccatctcaaaaaaaaaaaatagaaagtatgccagagtaatataactgctctatgaacacactaaataacaagagctagcagagggttttctttagctcatgcaggttttttgtttttcgggggggtgggggggctgttttgctttattatgtgacctcagatgataaacccttggagggcaaggacagcaagtttttcatcattcaatttccagtgcaatatgcagcccggtttcctgccccaagctcctaagctagccctcgtcacaccactagcccagctcctatgggggcgtgggtttccttgactctcccagtgcccagaagtgggcctggcatataagatgtgtaagaccatagtccgcaaaatgggatgtatggacacaaaagacatttttttcctatgttctctttccaacaatccatcagcctgagaaggcacacgctcctgtgaggggatgcagcctctcttcttctatccccaccactgcccccctctcacttcacaaaggcagcctcctctcccccgctcccatctggaaggctaccaggcagcactgccccaggggcactgaacaaggggacaatttaaaacattgacactggtgctgacacagtgcctagctctgaggtcaggatgagaaagactccacaagtcagacattttctgattctctgctttcaacaaaacacaaggaggtcctagtggaagtgtcatctgatagattgcggaaagtcatatctgacgacaaattatacttttggcattattatggaaagaattcaaataactgagtgacactgtaacaaaactatcattcccatctacttactcacataaacaaggtttctgggcacttacgtgtttaaaaaaaccatacaatttatttccaataaatgttaagcaaaaatgaaaattatatcaacatttacattatttcgttgttttcatcaactgtgctctaataattataatttgaaaaaacatttcttctatacttaagagctttattattaaaggaaataaccatatgcccgatttcaatacacacactttttgttgcagggaagtactaaaggtcaatcggacactggactttcaaacataaaatgtatcatcttagtataaagtccctggggaagtagaatggaaataaaaattaaagggggaaaaggataagatgcaacattggactgcttttaaaaaatgaacttgtcgggcatggtggctcacacctgtaatcccatcactttgggaggcttaggtgggcagattacctgaggtcaggagttcaagaccagcctggccaccatggcgaaatcctgtctctactaaacatacaaaaattagccaggcatagtggcgcacgcctgtaatcccagctactcaggaggctgaagcagaattgctggaacctgggaagcagacgttgcacagtggaccaagatggtgccgccactgcagtccagcccaagtgacagagcaagactccatcttaaaaaaaaaaaaaaaaaaagcttattttaaaaatagatgatagttcttgctcctcctttcatcatgtgatgtgcctgctcctacttcgttttctaccataagtaaaagctccctgaggcctccccagaagccacacagacgccagcaccgtgcttgtacagcctgcagaattgtgggccaattaaacctcttttctttataaatcacccaatctctggtgtttctttatagcaatgcaagaatggcctaattcggaaaattggtgccaggagtagggtactgctataaagacacctgaaaatatggaagcagctttgcaacggggtaatggacagatgttagaagagtttgcagggctcagaagaagacaggaagatgagggaaagtttggaacttcttaaaagactggttaaatggttgtgaccaaaatactgacagtgatacggacagtgaagaccaggctgagaaggtctcagatggaaatgaggacattattgggcactggagcaaaagtcacccttgtgatgtcctagcaaaaaagatggctgtgttgtgtttctgccctaggtatctgttgaagtttgaatttgagagtgatgacctagggtatctggtggaagaaatctctaagcagcaaagtattcaagatgtgacctggctgcttctactagcttaactcaaatgtggggacaaagaaatgacttgaagttggaatttatacttaaaagggaagcagagcaaagaagtttggaacatttgcaccctggcaatgtggcaaagaaagaaaagcttttggttgggcgtggtggctcacgcctgtaatcccagcactttgagaggccgcggcgggtggatcatgaggtcaggagttcaagaccagcctggccaacatggtgaaaccccatctctactaaagatacaaaaaattagcccggcatgatggcacacacctgtaatcccagctacctgggaggctgaggcaggaggatcacctgaacccaagaggcagaggttgcagtgagcacctctgcactctagcctgagtgacaggtgagactcagtctcaaaaaaagaaaaaaaaaaaaaaaaaaaagaaagaaaagctttctcaggagagaaattcaggcaggctgtaaagcaatcacttgctagagatatttgtgtaactaaaagggagccaagcgctgatatccaagacaatgagggaaaggccttaaaggaatttcaaagaccttcccagcagcccctcccatcataggatgagaaacctaagaggaaagaatagttttcagggccaggcatggggttttgctgccctctgcagctttgggacactgcttcccacatgcccctgtgactacatccttggctcaaagggcctctgatacagctcaggctgctgcttcagagggtacaagccataggctgtggcagcttccaggtggtgttaagtctgcaggtgtacagagtgcaagagtgatggaggcttggcagcctctgccaagatttcagaggatgtatcaggtgcccaggccagaagcctgctgcagagatggagccctcacacagatactctactagggcagtgtagaggggaaatgtggggttggagggcccacacagagtccccactggggcaccacctagtggagctgtgggaaggggccattgtcttccagacccaagaatggtagatccatcagcagcttgcactgtatgcctggaaaagctgcaggcattcaactccaatttgctgaaccctgcaaagccacagaagtggaagtgcccaagaccttgggagcctgcccctcatcagtttgcccaggctgtggcaaatggagtcaagggctattttggagctttaagatttaatgattgccctgctgggtttaggacttgcattgggctcaatgcctctttcttttgactgatttctaccttttggaatgggaatgtttatccaatgcctatacccgcattgtatcttggaagtaaataacttgtttttgattttacaggctcataggtggaagggacttgccttgtctcagataagacttaggacttttgagtttatactggaatgaggtaagactttgggggactatcgataacggataatttgtaatgtgagaaggacatgtggtttgcgggaagccaggaatggaattatataatttgaatatttgtctcctcccaaatttcatgttgaaatgtaatccccaatgtcggagatggggcctggtggaaggttactggatcacgtgggtggatttctcatgaatggtttaagcaccatcctctgggtgctgtgcttgcaatagtgagtgagttcttgcaagatctggttgtttaaaagtgtgtagcagccccacccccttgctccttcttccaccatgtgatgtggtgttcccgcttcagcttccgccataagtaaaagctccctgaggcctccccaggaagtgcgtagatgttggtgtcatgcttgtacagcctatagaactgtgcgccaattaaacctcttttctttatttaaaaaaaaaaaaaaagataatgggtataaatcactatggtatttaaaattcacttgtaatatttaaaagagtgaggggacaattttatttttaaatgtcaatgtttgtaattttggaagttacatccttatcataaaaaaagtcaatttaaatttgggagtgggtatgcgctttcaggcaaaattcttttaggggcttcatagggataaaatatttttcttagctttgtatctacctaaaggaagacccagaaattctttggggtaccaagcatgcttccacatctcagctatatttagtctggttttacctaacagaaacaaactagggtcactgaaaacactttcttgaaccaagacaggttgcaccatggaagatcttgccgtatgtaactgctgttccaccaaggtacagacttttcttcactggaattccaaagctgactatagctctgttcaaggacagtaaaaagcacaaattcttcagtgtgccaattaaagtgcttggcaccttccattctgtcacttcagcctggactctcacatacccacaccacacccaagcatctggactcttttttacttattttatttttcagccatcatctacacatgtagatgggccagccccaacacccagtggttgaagacaataatcttcataagcaggaaattacagaggtgatcttggttctgaaccaactgcagaagaagacagatagacaatcgtctccatcagcaaccacctgcggcaggaaccccacctttttttttttatgttcggggatacatgggcagaacgtgcaggtttgttacatagtttacacgtaccatggtggtttgctgcacccatcaacccatcatctacattaggtatttttcctaatgctatccctcccctacccgcccccaccccccaacaggccctggtgtgtgatgttcccctccctgtgtccatgtgttctcactgttcaactcccacttacgagtgagaacatgtggtgtttggttttctgtccttgtgttagttttcacagtgtcgacggtctttacaatttggcatgtttttgcagtggctggcgcctgttgttcctttccatgtttagtgcttccttcaggagctcttgtaaggcaggcctagtggtgacaaaatctctcagcatttgcttgtctgtaaaggattttatttctctttcgcttatgaagcttagtttggctggatatgaaattctgggttgaaaattcttttaagaatgttgaatattggcccccacggtcttctggcttgtagggtttctgcagagatccgctgatagtctgatatgggcttccctttgtgggtaacccgacctttctctctggctgccctaaacattttttctttcatttcaaccttggtgaatctgaagattacgtgtcttggggttactcttctcatctgatatgggcttccctttgtgggtaacctgacctttctctctggctgcccttaacattttttctttcatttcaaccttggtgaatctgaagattatgtgtcttggggttgctcttctcgaggagtatctttgtggtggtctctgtatttcctgaatttgaatgctggcctgtcttgctaagttggggaaattctcctggttaatatcccgaagagtgttttccaacttggttccattctctgtgtcactttcaggcacaccaatcaaacgtaggtttggtcttttcatagtcccatatttcttggaggctttgttcatttcttttcttttcttttttttagagtctcgctctgtcacccaggctggagtgctgtggcgccatctcggctcactgcaagctccgcctccgggttcacgccattctcctgcctcagcctcccgagtagctgggactacaggcgcccactgccacaccgggctaattttttttttttgtatttttagtagagacggggtttcaccatgttaggcaggatggtctcaatctcctgacctcgtgatccgcccgcctcggcctcccaaagtgctgggattataggcgtgagccactgtgccgggcctgttcatttcttttcgttcttttttctctaatcttgtcttcacgctttacttcattaagctgatcttcaatctctgataccctttcttctgcttgatcaattcggctattgatacttgtgtatgcttcacaaagttctcctgctgttttttttttcagctccatcagatcatttatgttcttctctaaactggttattctagttagcagttcctctaaccttttttcaaggttcttagcttcctcgcattgggttagaacatgctcctttagctcggaggagtttgttattacccactttctgaagcctacttctgtcaatttgtcaaactcattctccatccagttttgttcccttgctggcaaggagctgtactcctttgaaggagaagaggcgttctggtttttggaattttcagactttttgccttgttttttcctcatcttcgtggatgtgtctacctttggtctttgatgttggtgaccttcagatggggtttctgtgtggacatcctttgtgttgatgttgatggtattcctttctgtttattagttttccttctaacagtcaggcccctctgctgcaggtctgctggagttttctggaggtccacttcagaacctgtttgcctgggtatcaccagcagaggctgcagaacagcaaaggttgctgcctgaggaaccccacttttatgcagaggtaaaatctaccaagcatgtggattctgaggtttcgtttcagctccagtggaggctgtgctgtgttgaccgtgtatgcaatggacacagaagaatgagtgtgcggcacttgcctgcgtctgccaccccacctccagatccaactcgagccaggctctgcctgcttctccgaatacatcctgcactctctgtgtctcctcacagggtagttctgctgtctggggagccgatattgggtgtgatgatctgacttggattcctgagtactccactcaccactgctgcggctctgaacaaattcccttactatctcatgcctatgtcatgtcgtgctcctctgtgtttccatctttctgtgtgccccatggaacttccccattctgcccagcactatgttctgggcatccaagtccaccactgccattagaacatcatcttcttgaggtggggagttcctgtccagggccacctggaggcctctgcacacgacaggcatttaataaatgtttcttcgatgacgtttcctattatcagtatctgggcctttcagagccagaaggggactatttaattattattactctcatttcttagtgagaggaccaatgactctcccaaggtacagcaactggtccaaggcacagactcaaccagaaagcaggtttaccaacacttttgtcttctcagcataaatattctaaagaaaataattactattgggtgcattttccacagatagatgaagagttatctgaaaaaagtagaagtgagggaagggaataaaaagggggaaaaaaaaaggccaggcgcagtggctcacgcctgtaatcccagtactttgggaggccgaggcgggtggatcacgaagtcaggagttggagaccagcctggccaacatggtgaaactccatctctactaaaaacataaaaattagctgggcatggtggctaataggaaacgtcattgaagaaacatttattaaatgcctgccgtgtgcagaggcctccagatggccctggcgcacatctgtaatcccagctacttgggaggctgaggcagtagaatctcttgaacccgggaggcgcaggttgcactgagccgagatcacgccactgcactccagcctcggtgacagagcaagactccatctcaaacaatcaatcaaacaaacaaacaaataaacaaacaaaaaaaaaaaaggaagaagaaccagaatttcttgtttttgaaaaatcaaactgaagaatgactggacacgatgtcagcaccactcacacaggaaacctcacgcatgaaacctcacacaacagcactgcagctctttcgcttggttaacttggggacagccctgagacatgagatcggcctttacagccttcttcccaggctggtggaagatcaggctgctctgaatccaggccggctggaattggcggggcctctcaacacagtcaagaatggctaacggcaggcagaaacattttgtggcctaataaaggatcaaagaaatgttccttacaaagaggaaatgaattatccacacatcaagctccttcatgtcttctgtttgtttgttttaggccctccagcctgtttggataaaacatgttacactgagaaagcatcaaagaaaacgaaacaacagtgacatttaaagggaactccgccggctagacagagccccattttgggttcagctccaacttctccctgttctgtctctcctggccatggggagtattcacccacagctgacataagattatcagcaaaggttttaacaagaaccagacctttctcttctaatctttcccccaatccaaaatgtcatgaaaaaacttcaaagaatcttgttagaatttaaaaatattctactattgtgtaactcatgctgaaaaatgcacatctaggtatgaaaaacgcacagattgctctgtcaaagaccactacgtgactgcacttccatagcagagatcccatctttcctttcagctaaatttaatctgttctaaactctgaaagttattgagtcctaaagacatttatttagcaggtcctaacaatgagcagtttataggcaattgtgaaacatgaccacaaagattattggatgggggtcagtaatttgaattgctagaaaaatatagatcactcttgactgacatgaatgatcagtggtatcatttacccagaattactcaagagagaatagtaacatggaatgagaagctgcttctaccctgaaggagtcacttttatagctatacaacttctaccctactcagtctgtgtgtggcaaaactagtttatcctcctcatggcatctacctgaattcatcttatttaagttaatttgcttatttgtctgtggtccctattagaatgcaaatcccatgagaacagtacctccacggttatttctattcccagagttgagaaggtgcctcgtacacagtcagtactcattgttgagtgactgaggagacaaacagcaggaatatattctacagccaacacttgaatctgcgatcttagtctacatagtcttccattcacaaaactctatcttctcgtacctttcctccaccttcaacctctccatgttaatgcacttcggctccatttaccagttaacgatttagtgatcccactgagaagccaggagctccaacagccaccgagaagcacagcacccagcagagctgcgtgtggaggcaacgctcacctccctctccatgggacctaaatgaccagcatagcacacgcttccttccttcccagcccttcctgtattcccagcccagtccagactagacgtccttctgaccagaagctcaccttagcaaatcccaactgatgcctcgcacgacgtcccctagagacctactgtcctctcacacgcagttctccaaaaggcctcataccccaacccccgagccctgctgcagctttctcactttcagatccacacagaatcccttttaacccctccagttatagggccagaagttgttttgtcaacagtagcaatcctgtctcaccgtctcatcaaccatgcccatccgggttcccccatcacagtgtcaaccacttgccaaacccatctccttcttatcctgtgaccagcaccaaagtctcttcctagctagctaagtctcttcctccatcctacctttcgacagcactctcaggaacgtggaaaaggttgcccacggcccttctaatagtctgtgtctaccattcttggtgctctttattccagcctagccatctaccggtagccatacctaagatgtgaaactacagattttccctatttactgcacagctaccatgacccccacaacatccctcttcttgactgtgtccctcaactcctctaccacttctgtactggttccccatgttctctatgcagcctggggcttaactatccattatgtcaacaatgcagtcaatactcactacctcagctgggcgcggtggctcacacctgtaatcccagcactttgggaggctgaggcgggtggatcacttgaggtcaggagttggagactagcctggccaacatggcgaaaccccgtctctactaaaaatacaaaaattagctggggtgtggtggcacatgcctataatcccagctactcaggaagctgaggcaggagaacagcttgaacccggaaggcagaggttgcagtgagctgagattgtgccactgcactgcggcctgggtgacagagcaaaattccatctcaaaaaagaacaaaaaaaatactccttgcctcaacatcccgacctcccaccaattttctagcccaatcttccacccactttggctgcatattagtgtcctaacatcctgggacactggaaacttgtaccccagatgaattaaattggacccaagtttctgctctgtgtgtctgaagttcctcatgtgactccagcgtgctaatagtgtgaagtgctgctgtacaccgacagctctcaacgtctctcactaggggcatagtcctgatccagtccagtagttctcagggcctggatgcccatgtcccaccctagggattctgctctgacttgctggggtacaggccagcattggggcattttcaagttctcccgatgactctaacgcacagccaagtttacaagacgtcctcagcccacctccactcttccaatgctactgccagactggtcttcaagggcagctccagtcctatccttccccacacattcaaaaatatataatttttcctcgtttcctgttgaattaaacataaacttctcagtcaaaagtggaaggctctgaattagctacctcacatcctcccccacccataagcttcatccaaactgggcaacaacttgctactaaccaaccactcaaattcttttagcccttgttctccaattaactaacctctgtcaactctgcccggtgaaatcctatccatccttcaaggtcctctcaaataagcctcctctacagcacccttcctgatctccctgtccaagagcagggagcaagctgctcacctcagcaggccctgtgagccccagaacaccatctgaagcaaaagaggcactcaaaacaaattttcaattgtgtggctgctgtcccctctctagattctgtggtgataaatccaactcaagcactcatttacacccactacccaaatcagtcaaggataccacagtgggatggcatgtcacctgccatactgccaagcagttaccaaggttggtggtaactcctgcagagatcttagcagtgaaagaacaaatgctgtttgtttaaagtcactgatacgctcccttccttttgtacacagaaatcaataatgttttttctaagtcttgtttccaaaaaactaagccaaataaaaaaaaagtcacttgaataatagaagaacaaactaacaatgataggaacagaagattcaactagaggaagaattatgagagcaaacagtggatacaacggtctcaaacatccagcagagccctgcacacaagagtaggaatggaaacgcagtagaattaaattcagtataagatgaaaaataaagaccttcctttttccatgtatatttttaaggtaaatttaattatccagaaacagacaaaaatgtttgctcttcaccttcaagaatccaccaccccttttgtgaagatactcaggctcagtagagtgcacccgtacacatgcccatcttcgtaacggaatgcctgagtgcctaagatgttcaaaccagtggagagtagcatggcgtgatgctcatggactcctctaaatgtgtgagcaaccggattacacatctcagagtgtggcctaaaagcaagataaatctacgtggatcatttgaatgttttacagatatttaaaaagagagggagagagaggaagggaatgtgagctgattatgaagtcagagaatttaatgagggagacaagctaccaaggtcagattgctctggggtcataaacttggaaagtgactatgaagctgacaaagaagttgggttgtctcaaaggacgatctgaaaataattttctacttttgttattgctaaaggactggagaatttcatttccatggactgaactgagcagtaggatcccaaaaatccagagcccaccccactctttaagctgctctgagaattggaacagctctgcctgatgaaatcaagacttcaacgtgggagagatcaccacagatcaaagctccaggtcttctctaggcaaagctcctttatttcttagattaatgttaggtgggtttttggtcgaggtcaaccagtttcccaaacctttgcttatcaagatctccttaggccgggcatggcggctcacacctgtaatcccagcactctaggaggccaaggtgggcagatcatttgaggttaggagttcaagaccagcctggctaacatggtgaaaccctgtctctactaaaaatacaaaaattagccgggtgtggtgacacacacctgtagtcccagctactggggaggctgaagtgggaggatcacttgaacccgggaggcagaggttgcagtgagctgagatcacaccattgcactggtccagcctgggcaacagagcaagactctgtctcaaaaaaaaatttttttttaattcattttctaaaattctcttttaaaattggataaccaagcttacttagctctgtcaccctaattaattagaggccctatctgaaaaaagaaaatgagtaatatttaggatgaacatgtctgtttggaaaacagtttattagcaaatgtgtgacacctccacagattttaatattaaacagtggctcccagagaagactccaagctgctgttgaggggagcacaagggacagaagagcacagagcatggctgcagtgatgggccatccttcctcccactctggtggagtctatggtactcattagcctgcatctctgtagcctaggagatttggtttcattactgtcaatggcaaagcttagaaaaataaaagtatgatcaaaacttacaaatcagcttcaagggagatcccagaactttcagtaacaaaaggacactgtgtgtgtgtgtacgcacacatgcatgtgtacacgtgtgttttcaaatttcttaaacaggaatgactctgttagctttagataaatcatgtggccaatttttcacctgggaagtgaaaggatggggcaggcagcagaccaagatgggcttaatcctgacctcctgtcaaacacagctgccagcacctcagaattttccccttccctttccttctccttttcctataattttttagattaaaaaaaaaaacttaagacttgctgggtgtggtggctcacgcctgtaatgccagcactttgggaggccgaggcaggtggatcacaaggtcagaagttcgagaccagcctggccaacatggtgaaacctcatctctactaaaaatacaaaaattggctgggcgtggtggtgtgaggatgtaatcccagctacttggaaggctggggcgggaggatcgcttgaacctgggaggtggaggttgcagtgagccaagatcgcaccactgtactccagcctgggcgacagggtaagactctgtttcaaacaaacaaacaaacaaacaacaaaaaaaaacccccacaaaactgaagactcaagaaggggagtggggagatcatactttcttgaggccacacaggtggcagccaatctgagtactgatacccacacctctgactctcaggccagttttctctccacaaaccaccaggcctgtttttcctgcttctgcccaccaacccaccccaaaaatgagttttccatataggaaagagaagagcctggcttatcttcttcaggaggtaactgtgccttccccagagagctcaggtgccaggacgtcagcagccctcagacagcagagccaggagggacacggggcagtggtgacgaagctgttcagggcaactctgggcatcctcctattttcagaataacaatcttcctggtgttcttagcagcatgattcctttttttattattattttttattttttagagacagggtatcgctctgtcacccaggctggagtgcagtggcgagatcacaagggagcacgattcctgaactgggggaacagtgctgagttgtatgggaaggtgtgttagaacagccagattcacctgtgctgcccactgagctctttccttctccatcactcattctcccataatagaacatctcaaccacacgtatcatcagtacacatcaggtgatgttggcaatgaacgagtttttttaattggaatttagaaaataaaaccacaaactggaaggagttggttgctccttccaaagcaagctactgagaggaaaagaacagggacacatccagttaattaattctccctagacggtggcagctcaagagctcagccaaagaggtcactgcactgaagcaatgtgaggtttctcttctgttccacccactcaaatgatattttcttattatcaatcctgctccaggtgctgggccaggttctgtgaatacaaaaagaattaaactacaaccctgccctcaagacttcctagttttgtgtggaggcacctaaatgaacttgtcaaaccaacctggtgcagcagggcctgcaaaatgcagtgacgtcccggccttcatcagtcatgggccactcctcattctaaagtgcctcgtgagcaccctaacctctcagaagaacgagtgttggggaaagaagaatatcagaacactactagggaacattaagcttggcccagcattctagttagtcagtgcacgtagcatccatcctccagacattaagaataatcaccacaggcctagagcaagcaaatgccggccgacaagggaagctggcctcttctgtcaaacagcagtattagagggactctcccctgagctgagtctcaaagccagggtatttgactcaagaaaggaagatttttgagatgactcttttcattaggtgttataattcagagcatgacatctacagttttaagttttccacagtgttcacttcctgaattaaaatttgtcaggacaggctgataacaagagtaatgactgctccaagatagaggtagagcaggtacacttttctttccaggtattttcttgctcctactcaggaaaaacagctcctctcacaaatgctgaatttatagtaaacttatgtagtaaatattgtctaaaccagttacaaaacaaaaacgcttcaatcttgacacaatgagcagctgcagaagtcagaggaatgcatgactcagagtcctacataactgaagccgtaaaaacactgttatgagagatacaatgttaggagaaaacagaacagccctcaagaattcctcattaatttgataatgtaatttaactgtgaggtacaaaataggagtgaacatctctggtctaagatcctggtggccttccgacttcatcttctccatccactccggggcatctttgctcttcctggaacacactcaggcatgctcccacctcagggcctttgcactgtttccttggcccagaattctcttcccctatgtatctgcaaggctagcttcctcactttttaaggtctttactcaaaagtgaactctccatggctaccttaagaaaaagttcaacccctctacctggtatttcctatcactttcctgcttttaattttttcaggactaacacactatacatgtcacttagcaagactgttttaatctatcctccttccccactacaatctcaactccatgaaggcagagaattttgtctgttttgttcactgctgtatcacctggcagagtgtcaatgctctaccaatatttccagaatgaaagaatgaatgaatttcaactagtgagctaaaatcagaactgaatgagaaacttggtaagtaggaaggaatcattctatcttcatgttcacacagtcaacaatcacaggaagagccaaaccgacaccaaactcctctgcaaggaatgcagagccagacagacagatcctgaggccccatgctcaggtggtgaggccaatatcaggcactgtctttctccccttataaccaccaaacacatgctgcttcctgatagctcagtactttgcctcataaatgtggaaaacacactagaattcacctatataaaggtacttcggaaaaatgtcttaaggcaagtgcaaaaacaaaatcaaatctaagtgtcaattagttgcatgcagggtgttaggaaaagaataacaaaacactactagagaagatacaaaataggctggcactctagtgaagatggcaattagggggctaccaaggccatcactacttctacctaagggagacttacttacttactttatatatttatttatttatttttttgagacagagtcttgctctgtcacccagactggagtgcagtggcacaatcttggctcaatgcatcctctgcttcctggggaggtgattctcctgcctcagccttccatgtagctgagattacaagcacgcaccaccacgcccagctaatttttgtatttttagtagagacggtgtttcgctatgttggccaggctggtcctgaactcctgacctcacttgatctccctgcctccgcctcccaaagtgctgggattacaagcatgagcctctgcgcctagcctaagggagactttagatttaagacagaagtatgccaggagagaggaggtagctttaaatgaatgacttcctctcatggtagggttctcatttttcacttcctgtttccttctcccaacattcaattccagttaccaatgtaatatgtctcacctgtgaaaatgtaagactccaatgtcactatacgtagaatgttctaagcacacgcattaaaactgactccaattctgttgctaagaaactgcacaagaaaagggttttccatcctcttcgtttataaaataaccactgtctatgggagaacaaatgcaatctctcaagtccccttgtgccttgttctcattttttaaatgaacagagaaagatgatagagagtggctgaaagtgtatgctatctccatttttttacatgcccttgaaaatgagatggaaacatggcttcaataacccactgctctagtatttattaatctttcaagctgaagactccccccattactccccttactccccgctcaagcaaaaatgaaaaatataccgtcaaaagtactcttcgatttaaaaagattatcccaagcagccaggagtaatttaaggtgtgcttatattcaatgtggggttactttccaggtctctgtatagccctgatgtctaaacacagacgtgtgcgcatgcgcgcacacacacatatacatacacacacacggccctaaagaacagcacaaggtatgctggcttttatttttttaatctaaaagtagggctggggatgatggacttaaaaaaagtaccggttaaagacactaagaaaagaataatcttgttaaacacaaagagcaaaatgggcatactaacttctttgaccacagcataaagaggaagcctagaaagtagtgagccgtggatgtgaatggaaaggtcacagctgaatctgtacatttatcccagaggcgacttctactgacatgaactactgaaatacatttttgaaatatctcttcccttctaataaaatgcttgtcctatttcatttactaaagggttttaaaaatacatttctctttagagcttgttaaacagtagaatctttctgcaaactaattgacagaactgactgccttacaccaacttttctgtgcatataattgatttttaatttgctgtctcatttccgaaaggacttgacaataaactccattctatccatactattgacttctttaagcaagggtttggttcaaaggccgatgggaattaaccataggaaaaatagtccaattttattaatagttggaacttcaggcaaatctcacttgaatctacatttttcttttttaatattaagggctaattctcactataggtcacattaagaatacataatatggagtaatatgtacatacgtgtaatatatcaacatttctatttctcttatttttcctactctcatatatacaaatttagttcttcataagaaacagtaccactgtcatttaaaactggaggaagggtggttagtagagaggagaatctactgtgattcaatttaaaatgtactaagtacctactatgtgatgcagtagatacattgtatctatattttgggttaatggcaaaggttccaaatgaattgtaaaaattttcaagttataatttctttagaaagataatttcaatgttctgactcaactcacatgtatgcaaacctgtacacatacgtaagttgacaatgacataaaaccacgtacgtacataaacaaagaccagaagagagcaagaagccagcaaatgagacgatgaagccagacactgtgagacgacgtgttagtggtgaggttttaaattccctttaatgattttaggatgttgttctaacaataaaaaaaacaatctgcacaaaaccctaaaaagaataagaaagtgaaaaggttcgtactagatgacctacaagactctcctatcatcatttttgaatgactacataaaatggtcaacaactctggaaattttaccattcctaaaataaatataactaacccttcccctatattgtggatgtaaaattttaaaacaaaatcaccaagattattagtatctgaaatccacgtaaccataactacaagctctgagagcctctctccctctttgtcattgtcctccttgctgttttcacctccacaacctcctgctgctattggatcttaacggggattttgctgtgaattccattttcctcagctgccatgcaaacagtaaataaaattcattgtatttttgccccactaagcagccccgtcttctggcacattcagatgcctagcttgaaaagagtgaacaatgaaaacaatgttttctcaagcagacattccaaaaagggcataacaaaggcatctggagatgctgctggggaaagacaccctgcaaatagttgtgtgtattctgtgtaagtaattccttgaccggccgcacgggttcactggattacaaatatttagaaaattactttgccatctcatgtcaattttgaaagaaggattttcatttatatttatgatagactgagctttaaattgaaggaagatttagatgttttaaaatttatgagcttgtaaataaatccatgtacatggccaattaaggtttatcactaccacagattaactatttttggataaaaatttcagagcttatttgtatctagattgttcacctcaatgtattacatcaaaattgatataaaatatttaatgggtagtgtatttcaagataaaagctatagttacccaagatgaaataaaaacaccctgtagtaacatggtaagcaacagaaccttcactttgtgcaacacctggattgttgcggaaagcgaattcaacatgaaaataattttaaaaaccaaaacgcagctaagtggataggaagcaaagagtgagatgcacagctcactggagcacccaatcttacaatcttgcaagtcaaaccaaactccacaaggaaaatgcaggccctgaattttaaaaagaattcaattagcatccccagtatttccataatcaacagctgaatgctaattaagagcacagcatcaagcggcaacggaatcccagtgcaataagcaccaacacaacagcagcaaatgctaccttcagctcgcatgcataaataaacagaattaataaccacccaagcatggaagggtgacttaatctgtttcgattaggtgcagttcagcctggggcctttatgttatatttgaatgtgttcatcatgtttaattaaaaacctaataatctaagatttgttttgtttgggtttttttttttaatgttttaatctctatttcctcctctttatcttcctaagttctaccaatctggatgacttcctgaaaaggaacagtatttttagcataatatatgtgaaattgattaaccatcaatgtaactctcagaggcagaaggcagccatttactttggctccacccttacccataccttggtatttaaagcttcacaaactgacctagcatttcttccaaaatgcttctctgatcaaaccaagtttacttagcctgaaagacatgacccaggtgttgctcacagacactcggcaaaagcaaaattaatttgcagtatccggtacagaatttgacagaaactggcacattttggcttcagttcaagatttgaagtgtctcagccccaaagcaacttcaattaggaacatcatacacgcacactgtcagagaaataaactgagagtttgagatgaaaggcctcctattgtgtgattctgaggtctaagatctccagaattcatgattatctgaaagacctaggaaaaagaggtcaggtgataggaggaggaggaagaggagaaggaggagtaggaagaacaagaagaaagagtttaatgtgtgagctttttccaaaagtacttttattattattattttttttggagacagagtcttgctctgttgcccaggctggagtgcagtgccatgatcacggctcactgcagcctctaacccctggactcaagcgattctccaacctcagcctcccaagtaactgggactacaggcacatggcaccatgttcagctattttattatgtttttaatttttttgtggagacaaggtcttgctgtgttgaccaggctccaaaagtaaaatttttaaggttggtttctgaggcatgtaaaagtttttctctttaatgtgctgattcataactattaactattaaaagttttaaaatgctggattgaagacactcaattatagtgaagaactttttaaaaggattaccttgaacaaagagtcatcaatattcttcaagcctctcatatggagagaaactatcttcatcattaagtccttacccttaataagtttacaaactcggaggacaatcaactcagaaataagaccgcaaggaatgaagagctggggatcagaagtcagcacgaggaggcagaggatgaactgccaagcgagtgacgcgcagaggggagacagtgcgaagagggagcactggccgcgggatgggccaggaaccgagctgagactggagaacgagtagggtctgcactggcatgagaggttagtttcttcatagagcagcaggcctgccaggcccaggaggtgcagaggcccagcctgtccgctgcacagcagggaactcacaccttcaggtgcttatttcaccaaccctctcacagagcagctgcttcaaagtattcatgtaaaaatgccaagggaaacccgttcatcaagactgttgtagtcagatcagacactgggtagttagaacaaattaatatgccagcggcagcgaagtttagtaataagtagccaggcattgtggcttgcctgtagtcccagctgctcagaggctgatgtgggaggatcacttgagcccaacagtttgagtccagcctggacaacatagcaagacccccatctcttaaaaaatagtaatgataataataaaaataataattagaatgttccaagtatatagaaaactgggaggaaaaaagggggaggtaggcccatgtatttatgttagctggaacacatttgttttgcttattcctgtgattcctgaggtgagaaaatgtggtaaatttaacagaagggggccacatgaacacagcaggtgttttttcacagccaaagccaggcgagggtaaagaggggactgccttgttgccacataaatctcttcaaagatttgatttggatccattcaccagaagcttccttcaacctctcaattattcagtcagtctctcttcttcactgctgaggttttcaaagtgaagcttcacttcctacacataagggaaccatttgatcctgaggctctacaagggctggatggctgccaagacatttttcaaaccaagaagcaaacatgataaaaatgaccccaaacggatacggatgtatacagttaaggatcattattccatactcaaaatattcaccactttggagtcctgttttgtttttcaaaataaaccaggctctttctgatgtgcaaaacttccctctcagctcacagcgacaaatcctcaagcagcagcaatggggagacaatcaacagctgcctgatgttacaagcaggcgctgcaggaaaaggaaagcagctttctcttcagcaggaagagaggactttggctgtgtatttttaaaattccagagggaatgaaaggtcacaagagaaatgaaagaagggagagaggagagccatggctagcgaggggctgggaggcatgagtgaggagtggggagggtgggagacaccaagaagaggcagggaagtggggaaggagagaggacgccaaagggcatggagactgaagagagaggagatggccaggaactgagggaaatgcagaagcagaagcagccatggattgcaagctgacaaggccctgaggccgcctaggccaggctgagaggactgaagacaatctcacaaagggtggttaaacgaccacagtctatacacttgttccatccttttcatctccttatgtgtttcttccacacaggcttttcgcagaattttaaaaccttgtcaatcagatctcttatccactcctcacataaacaggcttacagtaaaaaaacagtatcactacgacttctcaaaactgaatttaacgttgtctaaacattttaaaatgtttaagatgtttctttctctttaataataacgttaagatttttatggttttgtttgttttaaaacagcttcatgaactctgtaagtctgataaagttaaagtcttaaggaactattcaacaagcactccattaccaaaccctagggccatttcagtgcatctcagctccgcctagcttttcccattcctcagcccttgcccaccctcacccacagccattctaggagcaaattctcttttctctaccttcaaggtgcagcctggatctcgctgcttcttatcacgaccactgctgccacaccacccagccaccagtcccagcctggtgtgcagcaacccccagagaccaccggactcagcggccagtgtgagccccactgtcggagcaagtcactcctctgttcagaagctgctcatgtggggcacatcaccatgccctgacagcaggccaacaggtcacacctgatctgctccctctagggcacccctcccaccactcccctccttgctgtgttgcagaaacattcctgcctacttcttgaacatgccaagcatgctttcaccttagggcccagaattctctaatatccaaaaggctgccttcctcaccttactaaggtctcatctaaatgttacttaccaggactttcctgatcctcccttagctaagacagtaccccacccagctgattctccctcattaccctattctgtatctgcttcaccacccccggcacatactcatttatgaaggtctcccctcttaaaacttaagactcccaaggagggacaacacctggcacgcaagcaggcactcagtaaatattgctgaatcaatgaaagagcgggatcaggaaagcacatacaatttctaaacattctttcttagcatattttaaaatacaggagaggaacttgcaatcaataggtgtattagtgccagccttcatttaaatttcattcgacctgaaaggcaaatgtcaagcggtaacattcatactgaagactgtatttgcaaaagcacaagaaatccgtaagtcgtttacagcaatgccttttacaagtcacaagatggagatgtagcttcattaaaactgtctgctggatgggaatccatgggtttgcaaggctgtatctgtgggcacatttctctccccccacttccttcaacaggccacagcaatacaatcagtatgtaaaatccagcatatttatttcatcaactctctgcttcccgcttgtaatcaatgtcctttaaggaggtcaggggtcttacaagccctataaaaacaagtcaccaagccaagcatggtagagcatgcctacagtcccagctacttaagaagctggggcaagaggactgatggagcccaggagttcaaaaccagcctgagcaacacggcaaaacccccttctctaaaataattatgattaaaaaaaagacaagtcaccaaccctactttaggttatatgtccacgggttttaacatgctgtctttaaatagggaggtatcacaagctagcttgcaccaaaaacaagttcaaattaactttttttaggagtaactatcaatttctcctttctttccatgaaagttggacaatctttcccgacatctatgaagcctaatcttaataaaatcaagtctttctgtacaattaaggggctgaagggccccatcctcctgcctggcgctgccacggacagccattctgcatgactgaagcttctgctttccctgagcagcagggaggtcacacactgagacgccggtggcccgatgccccagagcacaaggcaaatgctggttcctgctcaccacttcgtcctcggtccagcacttctcgatgagcttgggcacaggcttcttcaccaggcgctgcagggctttgccagcatcgtaaccgctttcatgcagctaaaacaacaacaattatagttagctaactgcaccaaataacagacaggacacaatcgatccaaggcaagctcctcattgactatctcccacagaagagtcaggaaaggggcactgagactccatcatttcagtaggcgcaggaatttgttctcatccaagaccaccctatcccaacccctattctactcactctgggagagggaggcaggcaaggcagaaaatattttggcaaagataggaataggattcccctatattcccataaagcaaacatttagggaatgtttggccccgcccagtgctcaggacattccatgcaatcattatcttacttaatcctatggggaaagtattctctcatttaatctacggtttaggagctatcatcgccctacttcacagatgaggaaactgaggcacagaaagatcaagtaaagatgttcaccacactgagccagcaggtggtgaagccaagactccaacccagccaggaggacccctactcttgcctcattctccgcaaagcagcgtaaagtcacactagattatgttctttctttttagcatttcttaagttttttgactgtgctaatttcacacaaaaacaaaatatttaaagtggctaaaatttaagagctttttaaagaaagtaagtctgtaatagtatgctagtttttcagtacatatgaataaagatgcaggtttatctacatattccctttaggaccagacttgtttcttgtcaaagctaatcaacttttctcaccctgcgtcttttcaaccctgtgtagtgtctggcaccatggacaccttcccacctcgcaaagatgctccagacactccaagtttctgagttccaacttgcagataatgtagagaaacagcaggtacaaagatcctcctgctctatctacctccccatactgtggctgtcactcagaattctcattggaaatccacctttcctgtacacatctagtcttcttacacaaagattggctttgtctaagacttgcatctccagtgctgaacacagtccatagtataaggtaatactccagaaaaacttgctaacttcctaaataaaatactaggttctgggacacagcagtaaacaacacagagatccccgttctcatggagtggacgttctgatcttttcactcgtgcttcaatctcttattttaacaatgagccagcatttgccgaacattcaggtcaagtaaagctgaacattcaagacatgtaaagaataaaccttaataagtcacagtccttatttccaggaaacttacaaattggtacagatacaaaacatacaaaatgacaagatcaagtaggttgtaataattactcttgcttaggtttaggcaaagacctatggaatcacaagaggagacagccatgtgtttcctctttctaacagaagactccggaggacatgcagatgccttcctggcaactgctggagcccctgggctgggcacacagtaagctggcagtggtaaatatttgttgaatgaaatcaataaataaatgctgagacacacactgcaagtctctcttccaaacatttaactgccaacaaaaggaatatcacaaacattcattttcttttatttttttctttttttttgagacggagtcttgctctgttgcccaggctggagtgcagtggcgcgatcacggctcactgcaaactctgcctcccgggttcacgccattctcctgcctcagcttcctgagtagctgggattacaggcgcctgccaccacgcccggcttattttttgtatttttaatagagatggggtttcatcgtgttaaccagaatggtctcgatctcttgacctcgtgatccacccgcctcggcctcccaaagtattgggataacaggcatgagccaccgcacccggcccaaacatccattttcaatgctcactcagcaaaacagaaagtattaaaaatttgaatttccagagcattctcacagtttagagggcactaatttattttaaatcaagactgggaagtccaggttgtacattagctataagaataaatcaactatcttaaaacaaaacaaaacacctacaacaatgatcaatactggatcccacttgggagtggtggtgcaatgaataaatattaacttatttatttttattattatttatcaataaattcgtatttattattaccattagactcttttaaaaataaaatactattatgatttgcaaatgtttgaaaactatccaacctaggcttctttcagacgtataaaaagatctgaaataaagtcagattctcatactttgcctaatatccagaacaagcagacatttgtcaagttctataacacaatgggggtttataatcacaggtcaacgtggattggaactgaataaaaggaagaattacatgcctatttaatgcaaaaagcacacattttagtgataatttgaaatcaaatgaagttgatcaaatcataaatttttaatgaaaagctcatggcaaaattaacaacttttataagaggtaattatactgtatggggtaattataagaaaagtatgaggctaggcacagtggctcacacctgtaagcccaacactttgggaggctgaggtaggaagattgagttcaggaattcaagactaacctgggcaacatagtgagacctcatctctactaaaaatttaagaaattagctgggcgtggtggcatgtgcctatagtcccagctgcagtcccagctactcaggaggctgaggtgaaaggacggcttgagcctgggaggttaaggctgcagtagtcttgatcacaccactgcactacaagtccgggtgacagagtgaaaccctgcctccaataaaaaaaaaaagaaagaaagaaaaaaagaaaaaagggtaagtaggaaaaactatggactttggagtcaaactgcctggattccaactctagctctactatttactaggtatgcgaccttgagagagttacttatcatttttgtgccttaattttgacatctttaaaaatggataaaataataacatcaacctcttagcgacatgtgaggataatattagaaaatatatgttagctacatcttttaaaaagaaaaaaaaaatcggcctcaagtgtgatcagctttccagattacagagtagtcttctcagaaacaaaaaattttgttaagctataaacaaaaaccacttatgtgtcatataaaattacccatgttaaatgagatttgattaaaactctggtctcacatacaggaaaaaatttgaatttcaaaatcttggctgggcgcggtggctcacgcctgtaatcccagcactctgggaggctgaggttggtggatcatgaagtcaggtgttcaagaccagcctggccaacagggtgaaaccgcatccctactaaaaaactataaaaattaggcaggcacagtggcaggggcctataatcccagctattcgggaggctgaggcaggcaggagaatcgcttgaacccaggcggcagaggttgcagtgagctgagatcgtgccactgcactccagcctgagagacagagtgagaccccgtctcaaaaaaataataatagtaataagaaaaataaaatcttatgtgcctgctaccaggaaattgctcgtgagaacataaagcccactccaaaagcaaactgctgagtggatgaagctcaatcaaatatcattaatccctgtggcattccggccttttggtgaaccaagaagagttttaaactatagctggaagagatgcttccactgaagtgttgaacatctcgttgtggttgttccgtttgttagagagcatggctgcagcctgcacaatgcccctcagctgaatttctagtgatgagcttaatggggaaagaggcactcctctgaacaagtcctggcattcctacttccttcacaaaactttatttcagatggcagtttctcctgaagaagctattccagtgacacggtaactcgagcttccttccctactctgttctctatataatggcggattctctccttttgtttgacctgttgtctggctggcctcttaaaatatccctattcctcaaaaaaatagtccctattcctgagtttcccatgttatcagtaagtattgagagtccctacccgtcctcacccctacacaaagacacatctgagaagtaaaaagtgtgggattatttacccaaagtgacaaatttttttctttctttttggagatggagtctcactctgttgcccaggctggagtgcagtggcgtgatctcgactcactgcaacctccgcctcccagttcaagcgattctcctgcctcaacctcctgagtagctgggactacaagcgcccaccaccacgcccggctaattttttgtatttttagtagagatggggtttcgccaagttggccaggctggtcttgaactgacctcaggtgatccacccacctccaaagtgctgggattacaggcatgagtcaccacgcccagccccaaagagatatttcttgaatggatgaaggaagaatattattgcgctatcatcagtgtttcacaggggcaagttcaaaacttggtcaactggctgttctggtgtgccctcctccttaggaaacctaagggactctttcctccttagggaaccaaggggactctttctaaaggggcactatcttcttaatgttatagacattgacttctaccttgtagaaatcttgtctgagaaaattctgagacatctttaaagaaataccttttttttttttttttttttttttgagacagagtctcgctctgtcaccaggctggagtgcagtggcacaatttcagctcactgaaacctccacctcccaggttcaagcgattctcctgcctcagcctcccgagtacctgggactacaggcgcgccaccacacccagctaatttttgtatttttagtagagatggggtttcaccatgctggccaggatggtctcaatctcttgacctcatgatccccccctgcctcagcctcccaaagtgttgggattacaggtgtcagccacagcgcccagcctttttattaaagatacacttttaacatactagaagttgttatggactacaacagcttcataatagggaaacttacctttacaacatttggggaaaattactggcgatcaggacatctttctttccttcgacacatttactgagtgctcaactatgccaggcactctattaggtgctgggatatatcaaatagcccttctttttttctctctttgagacagggtgttggctctgtctcccacactggagtgcagtggcacgatcatggctcactgcagcctcaatctcctgggctcaagcagtcctcccacttcagccgcccaagtactaggacagctgtgcaccatgcctaacttttgtattttggtagaaatagggttttgccatgctgcccggggttgcttttttttttttttttgagaaagagtttcactctgttgcctgagctagagtgcaatggcacaatcagcccacttccgcctgaattcctgggctcaagcaatcctcctgccgcagcctcccaagtagctcagcttacaggcatgcgccaccatgcctggctaattttttttattttttgtagagacaggaactcactatgctgcctagtgcggtctcagactcctgggttcaagtgctcttcctgtctagacctcctgaagtgctgggattataggcatgagccactgcacctgccccaaataacccttcttaagacagagtctcactcttgttgcccaggctggagtgcaatggcatgatctcggctcattacaacctctgcctcccggattcatgtgattcttctgcctcagcatccagagtagctgggactacaggcgcacgtcaccacgcccggctaatttttgtatttttagtagagatgaggttttgccatgttggccaggctggtcttgaactcctgacctcaggtgatctgcccacctcggcttcccaaagtgttgggattacaggcatgagtcactgcacccagccaaagtttttctttctttagatgaggataatgttcaataaagagctaaactggatatttcaactatattccttacataaagtagaattggtaaatttatcaaaacactggctatcttaaatctctaaaaattgccattagaaacattcccctctaatacaacatcaagttctgaaggattgccataatttcatactgtgaaaaacattacgtagatttcaaattctaaacacctgatcacgaccacacagctacgtctatagtcaggaaatttaacacaggcttccccatattgctaaggtaaaatgtcctttaatgtgaataagattttctaccgttttcctaagaaggctgtgcaaaatacattgcaatgaagatggggaaaaagaaacacctctcaaacatcttacagcttcactttgtagccacagaaaagcaattaaagcaaaataattaaacctttctgtccattttgcagccaagtcaggctggtaaaatctgggattaaatgcaattttaatgtagagtatagagaactgtacattttggagctactgtaaaaagatcagtacaaaaagcagggaccaagataaagcatcttgactcagtgagcttacaatctttgaaagctagggaggggagaagcacttagatcttatgctgcccccacgcaaccactatagcaggatgtcattcagcagaaagcactttcagattcatcaccacaggtgtgtggcagtggtgcttttttttttttttctaaatccaatgatcaaggaaacatttacttgtaaatctttccgcctcttttccacatcactaaactgcatgactgcacttctacccaaataaaacctgtcttccctaaaccacaggttaagacctaggatttatgattagggaatctgataacaaaacactgatttcttgaacaatccaccagcctttcaagtcattccatctcagaactatgcctgttttgctgttttctagcaatcggcctttggtctctgggtgtgctccatggaatcctctgagatgtgattttttccttcgtttttggttgttcattgtgaaagaacaaatgtgagtgaactctttccctatgtggtgtctagccctcttctgccacaccttctgcagcagaagtccttggtgtccttgaacccagtaggacattccagcctcagaggcaggctgctcacaccatactctctttgcttccattcattcaaccaagaggtaccaagcaactctgcctgctagcaatggggagggatacagtggtgtgcaaagacaggcatgcatgaactatgcaaagtggacctcatcgcggattttggtgctaaaaacaatagtaacttctgaataataaacacttaatttggctccactataacaaaagtaaccactgtactgattcattcagagccatactgtgccacaataactagacatatttagctagttgcctaaaaagctctcagtaactaactctgggtgctacaataaattaacaactagtcaataccttctgcagcctactgaaaatagtacaggatgtgaggcaagtgacagattcttgctaatagccctgtcccgaaccagttgagttgaggttttcatctgttaaatgggcctaacaccaccagccctcagctgggtcacagaaaaatggaaagtgctaaatgagacaaaatgtgtcaagacactctgaaatgtaaaatagctgtaagctgtacagtggtatcatcatggggagtaatattttagatacatggctcttacctaacactattcaaacaagaggttcaatagagccaacaatgccggtagtcactacacatctgcaattgtcttactacagcctctgacctcctcctgattagcagaaagaaaggatcatgctacaagaaaaacatttctgcataattgcccaagttaaatctgctactctcactctgcctgacaaatcattccatgcttactttctataatttaatatatataagtgctttactggcaagcttctcgaaagaataaataatacttaatgactgcctacagtttaattaactcatgattgaacttctcatggattgctataaacattaaattatatccttcctcaaagctaccatggataaaaatcttgtttaaagctttaattctcttgcctaaacaattctgaaattccagcaaatctgtatgttgcacagagaggtgagagaatccaccttaacgcatggttataaagcatgttattttatagagcaaggatgaggccttaatttttataagattgaaaatgtgcacatgtccaagcacctcattaatattacagcagtcattaaacatctctggatctcaggcagtcttattagcataaactctgcgtattaccacaaggtttcaagtttctattctggcttctcatcttagctaccattttctgtctgcgtgatgttgcaaataaattttccttttggcatggctcagctgtcaggcacctctgttctataatgaacccatgaattacatctccctgctctgacatctctggtctcacacatcaaaatattgttcttcaattgtaatttataacttaatttaaatgtcccttttcccgtgacctttttagatcaaatggcattgcatctggcagtttctactatgccaaagcatacttttcaaatatagccattataataactatataaaaagcctacttaagttagactgcattcaggctaattaaataattccagtccatgaagaacaatattagatatcaaagtcttttgctatgcaaaatatctgtttatacatcacaagaaactgtcaaaataactgagaaaggaaaaaagtatttggaataaatcttaaaattcttcatatagttttaattaattatttcgactattaagataagtgagaaagaccttgccgaaatatgttcaaaacaaaatttaaaaatttcttagccacgtgcagtggcttacacctgtaatcccagaactttgggaggctgaagtgggcagatctcttgaggtcaggagttcaagaccagcctggccaacacggtgaaaccctgtctctaccaaaaacacaaaaattagccgggtgtggtggcgcgcacctgtaatcccagctacttgggaggctgaggcaggagaatcgcttaaacctgggaggcggaggttgcagttagccgagaccgcgccactgcacgccagcctgggtgacagagcgagattctgtcttaaaaaaaaaaaaaaaaattcttggctgggcgtggtggctcacacctgtaatcccagcactttgagagaccaaggtgggcaggtcacttgaggtcaggagtttgagaccagcctggccaacatggtgaaaccctgtctctactaaaaagaaatacaaaaattagccgggcatggtagtgtgtgcccataatctcagctactcaggaggctgaggcagaagaatctcttgaacccaggaggcggaagttgcagtgagccgagatcacgccactgcactctagcctgggcgaaaagagtgagactctgtctcaagagaaaaaaaaaaaaagaaaagaaaaatttcttataaccataattcacaaatgtcaatacattttcatttatacctccatcatcgataacctagtgccaagtcaatatatatgaaacatgtaaatgttaaaaaactagaattgaaactaagagcacaatatttatttttatttggccattatcatttcaaataatgctattaggtaccagagaggctaaaatttgtctgaatggtcttacgggagcaaaattcagggataatggaaaagacaaagaatttaactgcagagggtagggcttgagagaaaggtctagttaattttcagaaggaaatatagttattgaaccaatcttccctccctctttccatcactttctgaaactacaatgttccaggaattatgcgccagccctggagtcacatggaagaaaggagggggtcgcaacatttgctgagcagtgcacagtgtgctaggaactgtgttaggtctttatgatttcatcattccacacacctctcttccacagccagagtactaaaaatgaggaaatgaaatccagaggttcagtatgtttctctaggccacttccctagcaagtagcagcatgaggattctaacataaacccatgttctaggaagatgtccctaccctagaatgttgctactggggcagtttaggacaggcaatctggtgggagcaatgggtacggggactttttccgctgcagtgacaaagcaagcacactgtcttttcttaacttggggctaggggatgagggtgggtggaggaaaggagggagccagcagctcagaaaagaggaaagacacacatgtaaacaaactaacaaaaaaatccccatccatgaaaacactcacagtgctaaatgaaagctgatggggatgacatttgctcagtctggaaaatctaaaatgcattcacaggggaggttttgaaaatcaacaaccagtataatatgattaacttgcctatgctttatgaacagcaacaaccacataaaaaacactattctaggagaaataagcagtgctattattgcagtaaaaacaggctacacgaggcagggcggacctgcgtccttcgcttctttcgctgtcacagaagaggctgaggtaggtcatttttggaactttccagtattcaacattccttcacttaacaaagattttttcaaaggcaaaatattatagaatattcttctaaaaaggaataaacaaatggtaataatgttaatacattaatttagaaaaataaaaaaacaataaaaccattgaattaagccacattccccacgccaaacactaaatgaatggctcctgcacaggcttcacttacactttagggattaaggttgtgcctcttaattttcaagtctctgtgaaagctgaagtttatgccacaggtctttaaatgcaattatggataattaatcatttacatagttaacatgtctacagcctgacttctttttttataaatgcgagatcagccacagaatagtagaaagggagggtgcggagggtgtaggctgcttgccggggcaggaggactccacagacgcagtcaataatctactaagaagactcagcttgaggacccacaatgagtctaactctggccacagggagaaaagctcctggcacattcgtgaacctagactgtttatgctgcttttctcaataattatttgtcagctgagaaagacctatgtctggccacaagtggaaatggttcaggaccacaaatggaaactaaaatatgttttcacttactcctggcatcctcatagccttgaaaacagaaaaaaatttgtgacatgaaactgggcagaaggctggaggatgacataaaaaccacaggtctaagcatctcacgtaggcactagtgaacctactcatacatgctaaattgacctagaaagtgtatgtgaaaggctttcacacaaaaacacaaaatcaagaccagttacatcagtattaagaaacatttacagtaactgctttaaatcctacttagtagaattgaggtacagaaataactgcccccaatccaagggctcagcagtctgaatctcagtgctttgtgatgagtgattctaaggttatgcaaacaacagtccacctaatatttttggcaatgataatgaagttatggaacaacgaagaccgaagaggcatacactgatgcatataaagctccagagttgggaaaatatacaagcgactgtactttctaaaaacttcagccaagaacacagctttagtaactaagaaataagcaaaaagcctctgggcaaccaaaacagtgtccccaaaagccaaaggccctggagagccaggaagctcccactctgagctttagacacttagttacctcacaattctagctttcccaatctaataacaggtctcaaaagaaaaaatcagaaagactgtatgatttcaaaagagaagagcagcagcagacagcctgactgtgggagacacaaaaatttagcaactattatgcaaaccaaagagctcaaactctaacagttgcacattcttttgttaacggacaccagtaatgatcactcagaggcatcgagtaaaggtggacttgacttgagaagatatgaaaatgtattcctcctcatttctaaaatggaagaaaaaaagtaaagaaagaagaaaaggaggagaagagccagttttcctaaaaatgctgggataactagtactccaaagtgctgcagtggctggaatacacagcccaacaaataccaggtgtggggagaaggcaggccactcaacaaataggggagcaggaaggacaggagtggggcgccccagtgtcattacctatgaaccccagaaagttgctgggtaagggggaaacatccaagattctggaggacagggctggccaggacaacacaggttgtcagagtccagtggggctgggctctgggcagggctgtggaactgaagctaaaacagacaccagagacttgaaaaagctacagcttcaaggattgcctgagtttatcccaggccagctcaaagaccaaccttaaaacaacacaacttgcccacaagggtcactaatgagcaacaccttccctactctatcaggcccaggctaggactggtgcaggctggacccagagttttgaggggctagggtagtggctgaggaagaaacaacctgggaggtcagaacatatcaattaatatggtagttatacatgacaattttgttatctaaataaatatccttattctttgcataaggaagccaaatactccctattttataaatcaaatgtcctcacattacagaaatatcatagccactactagaaatatttttatacattctcaatatcagaaactccacactttaaataagtcataacagctgggcaaggtggctcacacctgtaatcccagcactttcagaagccaaggcaagaggacttcttgaggccaagagtttgagaccagcctggacaacacagtgagcccctgtctctacaaaaaaatttttttaaataaataaaaataagcaagtcacaacagatgcaaaaataataataatgagctattttttaaattttttttaaattttttttaaatttcaaaataagtaatatattttagtaatattttatataatagtcattttaactgtggtaggccaaaaaatgaccaccagaagatatacacatcaaatccctggaacctatgaatgtgaccttatttgggaaaagggtctttgcagatgtgctaaggatcttgaaataaaggagatgattctagataactcaggtgggccctaactccaatgacaagtacttataaaagagaggtggtgaagaaacccagactggagaagacacagacacacagaagagaaggcagcgtgaagatgagcagagaaagatggggccacagccaaaatgtgcaaacagccaccagtagctacaagaggcgaagagtgggctctgccaggaggagccggagaggtaccccactgacaacttgatgtcagatttctggcttccagaactgtgagagaacacctctctgtcgtttaagccaccaagtttgggtaatttgttacagtagccacaggaaacaaatacactaaccttcaaaaactggggataaaaaattatttaagagagctataaaaaagcattctgaggtgtttccaaaatataggaaatgaatactagggcaaatattatacattttagaattttgtagtatgctgtagaatacatgagcccttctgaaactcatgggcctgatttgttctaacaatgaggtgttcacttagattctcatcaaacaccctccccacaagggctgcagaaactcaaacatgttaattaccaaataaataaatgaatatatgattttattaaagcctttttttgttttttttttttttgttttttttttttttgagacacagtctcgctctgttgcccaggctgcagtgcactgatgtcatctcggctcactgcaacctccgcctcccgggttcaagcaattctcctgcctcaacctcctgagtggctgagattacgggtgtgcaccaccacacccgactaatttttgtatttttagtagagacggggtttcaccatgttggtcaggctagtcttgaactcttgatgtcgtgatccgcccgccttggcctcccaaaatgctgagattacagacctgagccaccaggcccggaaattttttttttttttttagacgaaggcttgctctgttgcccaggctggagtacagtggcatgatctcggctcactgcaaactccacctcccaggttcaagcaattctcctgcctcggtctctcaagtagctggaattacaggcatgcaccaccatacttggctaatttttgtatttttagtagagacggggtttcaccatattggccaggctggtcttgaactcctgacctaaggtgatccacccgcctcggcctcccaaaatgctgggattacaggcacgagccaccgcatccggcctaagcctgtttttaaatgtaaaaaggctaaaggtttttttatcaatttgctgaagacattgtgttattaatactaatataggctcaaatatgttaaaattctaactgatcaaacggtaagtggatgtttttataaataccacatatatctcaaaacattttaccactctttaacatggaaaaaaatcatctgataaagaagtttcttaaatgagtaaatgaactttctaacttatgccaaacaaaagtaaaagctgaatcacatcacattcctcagtccctgctgagcacctaggaaacaggaaggagatgcaggaaaagctgtggcatgaaggatttctgattggctaaacagcaaatcctccaaattacagattaaccagacatttctttctgtttctgagacggggtctcgctctgtcaccaggctggagtgcagtggcgcgatctcggctcactgcagcctccacctcctgggttcaagcgattctcctgcctcagcctcccgagtagctgagactacaggagcataccaccatgcccagctatctttgtatttttagtagagacagggtttcaccatgttggctagaatggtctcaatctgttgacctcgtgatctgcctgccttggcctcccaaagtgctgggattacatgcgtgacccaccgcacccggcccgattaaccagacatttcaagaaggcgctataaggtactggcctcaatttaaaccaagtttaaatagttatgtatataaatattgtgtatataaataagtgtgcttattaatttttagatgataaccacacttgcctcatagaattgttatgaagattaaatgaattcattcataaaaagcacttaaacttttgcctagcatataaatactcaaaccacaaatacatttcaattttataatcaggaagctgaccaatagttgataccttaaaaaataaaattaatagtgatgaacttaaggtcctatgactggctcaaaattcagtggaaaagctcagggtgggaaagaaatggcttatcaaaagcacatatacaaggaaaaatgaaacataacaagattacaacacaggactaaaaagaatgtgatgagcagacattcttataagctgagactgcactgagcagatgagcttttaggataactgaggggtatccctgggtcaccttatgttggtcagacctgaggagtgttgcttagtgcaggtgccacattttaaatgacaggcgaagcagaccaggaggataaataaaatggtaatatataaaaatggctaataccaccacacggatgatgcctgaaaacagtaccccctcagtaaaagaaagcagtcacaaaaggccacttattatatgatgccatttatatgcaatgtccagaataggcatatctatagagacaaaaagcagatgagaggttgcctagggctgctcaataaaaataaaaataaagaacctaattggattgtaaaagtggccttttatctccccatccaccccagagaagtttaggtaatgctctctctcatgtttagggaaaagaagaaagtggggtataaagtttgactttaaataaagctacatattatctaaaaagaaacaaagtactaaattttaaaagccatttcattcaaacaagacaaaaaataggctgggtgtggtggttcatgcctgtaatcccagcactttgggaggctgaggcgggtggatcacgaggttaggagatcaagaccatcctggctaacatggtgaaaccccgtctactaaaaatacaaaaaaaaattagccgggcgtggtggcaggtgcctgtagtcccagctacttgggaggctgaggcaggagaatggcgtgaacccaggagttggagcttgcagtgagccaagatggtggcactgcactcgagcctgggcaacagagtgagattctgttgcaaaaaaaaaaaaaaaaaaaaaaaaaagacaaaaattaaatcacgcaatttgtgttaaaatgttgttacatggaactttagaagggaatttatgaatttcttagcccaaaggaagccacacaggtgaacacctaaacacttaattttcaaaacaatagctcaaaatgtttctaaaactaaaaaattttcaaaaaataaaagttgaaaattatatattattatgctaataatcagctgaaaaggtcttggttataccagaaaacctcaactgcgtgatctttttctgcatcctcactaatgctatgattaacagcacaactttctgttgacttcaatatcctgttattacataaataaaacactggcaacagtgcctgtcaaggctgatttatatgatgtgctgttctgaaatttattggatttccataataagaaatcatagagcctatcagctttacccattagactttccaacaacaaataaaaaatcctgaacgacaagaaaacccaacatcttaccttaacccaagccagcaaacactaaccatttaatgttgactcatctggatagaaacatttaagtaaagggtgtgggtatggaatgaatgtcagaaggctcctctcacatgcttagggaaaacttatgaaagggcctcccggcaatgccttatttgggagctgagaaatattccacattcaagtcataagcactgcaaagctaatccaggtccagatactttagtgaaggccatttataatgaacaaacaaaaaatctgacaaaaattctatggacttaattttttagaataaaagagaaatgaaaatgatccttagaatagggttatctgcatattctgctatgccaacttcctaacatcaatttctggatgatcaagtgtgatatgaacttgaacttgatttatctattcaatcattcaacaaccatttagtatctctctaccatgtgtcaggcatcagactagggttagaaaacacaaataattaatactcaacagttaacaaatagtgatatttatagaccagagatgaaaaactatgaagccactgggagccttgaattctttgctgaaggagatgtgggtgtgcataaataaataagcaaacaaacatgtactctcttgaatacataaagagcttaatccaaacgtctaaaagccacccgtatctcagggaataaaactgtccaggcggaggtgaaatctttgttgcatgattataaattttacttacacacagtgaatatatagttatgtttagtgttggtgagaaaatggcaataaattactgagaaagaaaaagcaaaataatttgaattgtattagaaaccaggaaagatacctgagcccaaagaaggaaatccaatatcagtttagtaaaaataagttggcaagatatattctagaaaaccttagtctcaaatgatggggcttttctgcagtttctaagtaggaatataaaggtctattttgtaaatagccaaataaatgtaagcactcaaaggtggctaaattaaccccattaggataagacagatcatctccatgttatatagcatgatgtttacaaattatatgtcagctgcaagtgttcagatgagcctaatgcaaacactgtatgaggaaacacacacagaaatatttccacacaagatctttctggggaaacaccattacttcttcatatttaacataagcttatatttaatatataaaaatacaaataaaactttttttttttttttgagatggagtctcgctctgtcgcccaggctggagtgcagtagcgccatctcggctcactgcaagctctgcctccaggccacaccattctcctgcctcagcctcccaagtagctgggattacaggcgccaccatcacgtccagctaatttttgtaattttagtagagatgaggtttcactatgttagccaggctggtatggaactcccagcctcaggtgatccacccaccttggcctcccaatgtgctgggattacaggtgtgagccactgtgcccagccaaataaaacaattttacatttataggtgttcacatttgaaatattaaaataaaacatatcattgctacatacaaaaaggaatacgcccaatgttactaagaaatccctcttttcctaatgagagagaccaacatgtttattacatcttcttcctctacagcggtacaaagctgtttcttatgtatgaaaagataagaaatgcatgttaacataaatgaacaaacaaagaacaactgtcctgaactatctgccagttcactattggaccaaaagtagcaagtcatgtggccatgaaaataagatatttattaactacctctgtgattcttcaatgaggcctctactattaagaatgtgggccggatccggtggcttactcctgtaaccccagcactttgggaagccaaggtgggcagatcacctgatgtagggagttcaagaccagcctgaccaatatggagaaaccccgtctctactaagaatacaaaattcactggacgtggtgccgcatgtctgtaatcctagctacttgggaggctgaggcaggagaatcacttgaacctgggaggcggaggttgtggtgagccgagatcgtgccatcgcactccagcctggggaacaacagcgaaactctgtctcaaaaaaaagacatacggctaaagttttatataacctgaaaaccatcttcattaaattaaaacagactcaacactccaaacaaaaggcagagcttgccaaactagataaaaaggcatgaaacaactaaagaatacaggagatgttaccttaaatacaaagaaaaaacaagattcaaagtaagaagttgtaaagagatgtaccatgcagacaacaagcataagaaaactagagtggctgtattaacattagacaaaacagacttcaagacaaagaatattagtagacacaaaaaaggttacagcagaaaggtaaaagggtcaaaagacagagaaagacacaaatattttaagtgttcatgtgtctaataaccaacttcaaatatatgaagcaaaaattaacagaatcaaaaggagaaacaaccaactctacaatcacttttttttttttttttttttggagatggagtctcgctctattggcaggctggagtgcagtggcgcgatcttggctcactgcaatctccgcctcccagattcaagcaattctcctgcctcaggctccctgagtagctgggactacaggtgtgcgccaccacacccggctaatttttctatttttagtagagacggggtttcaccacattggccaggatgttctcgatctcttgaccttgtgacccgcccacctcggcctcccaaagtgctggaattacaggcgtaagccaccgcgcctggcctacaatcactattgaagactttcatacatgtctctcagtaacatacaactaggtgataaaaaaaattagtataagagaagatatgaatactaacgtcaaccactgacactgcataacagcacacccagtaactacagagagcaagttgatggcaagtacacatgaaacatgaaccaagacacatcacatgctcagccaagaaacaaggctcaaaagatttcaaaatactgaaatgttactgagtactctttgaccactgaattaaattaaattagaaatcaataacattccaaaaaataaaacttagagaagccccaagtatctggaaattaaggaatttagtactaaataattcatgggtcaaagaaatcaccaaaaaattcaaaacatttttgaacagaataatagatcacaacaaatcaaaatttgtggtaaaatcagctatttaacatcccactttagaaagctaggaggaaaatgatcaaattaaaccccaaataggtagaaaaaaattaataacgaacagaaaccaatgaaatataaaacaaacgggaaaaaataataaaaccaaactctaaagagatcaataatgttgaaacgtctttatattgatcaagaggaaacaaattaccagccttggcaacgtggagtccatcttaaaaaaaaaaaaaaaaagaaaagaaagaaaagaaaaaaagcactttctatataaaaaaatttagatggctaaactgtgaattctggcaaacatttgatgtagaaagtaatatcaatctttcataaacatcttaagaaaacagaacaggaagaacgatttcccaactaattttttgagggagtattactctgatatgaaaaccaaagttcttattaccaaactccttattacaaagaaggaagactacaactcagtatctctcatgatcacaaatgtaaaattccttaacaaattattagcaaattgaatccaatagtacgtagtgaccaagcaggattcatcctaggaacaaacagttccttcatatttgaaatcaatgtaattcactatattaacaaaataaagaataacaatcatataataatctcattagatgcagaaggaaaaacaaagcaactgacaaaattcaatgcccattcacaataaaaactcaacaacctggatatataagagatcattctaacttgattaaaaaaacaaagaaaggccaggtgcagtggcttacacctataatctcagcatttggggaagctgaggaggatcacttgggcccaggagttcgagaccaggctgggcaacatagtgagaccccgtcactacaaaaaattttacaattagctgggcatgatggtgtaccctgtagtcttagctacttgggaggctcagacaggaggattacttgagtctgggaggtcaaggctgcagtgattcaagattgctacactgcactccagcctgggcaatagaccctttctcaaaacaaacaaatacaacaaaaactgcattgtacttaatagtaaatgactgaaaactttctaagattagaaagataatgtccactctcatcacttctattcagtattatagcagaggttcaaggaagtgcaataaagcacaaaaaagaaataaaacacatagatcataaaggaagaggtaaaactatatttgcacacgacatgtttagcaggaccaaaaaaagccaacatataaaaactgattgtgtttctatgctatcgaagaccatttagaaattaaaattttagttacaacagaatcctcaaacaggaaatacttaggagtaaatttaacaaaatgttgtaagatctgtattcccaaaaaatcttattgtaagaagtaaaagaaagcggggcatggtggcatgcacttgtagtcccagctactcaggaggctgaagcaggagatcacgtgagccaaggacttcaagcccagactgaacaacatagcaagacctctttaaattttttttaatcaaaaaaaaaaaaaaaatcaaagacaacttctttaaaaatagagaaatatcgtatttatggattagaagatccaatattgttaggatgtcagtatttcccaaactgatccataaattcaatagaatcccaattaaaattccatcagactttttattttttattattattatttttttgagacagagtttcactcttgttgcccaggctagaatgcaatggcacggtttcggctgactgtaacctccgcctcccgggttcaagtgattctcctgcctcagcctcctgaatagctgagattacacgcacgtgccaccatgcccggctaatttttatatttttagtagagacgaggtttcaccatgttggccaggctggtctcaaactcctgacctcaggcgatccgctcacctcggcctcccaaagtgctgggattataggtgtgagccactgcgcctgcaagactttttaaaaattagaaactggaaggctgattctaaaatttacatggaaatggaaattacctcaaatagccaaagcaatctttaaaatcacatttaaagcagaaagacacccctgaggtcaagacttcctatatagctacagtattcaaaacacagaggccctaataacgatcaatgagacagaatagaatccagaaaaagatccaaacataaaaaagcagctgattttcaataacaatgtcaaggcagtcaaatgagaaaagtttttccaaccaatattgttcaaacaacaggtatctgtgtggaagaaaatcaattttcactccataattaacgcatcacaattcaaaatgaatcaaagacctaaatgtaagaagtaaaacttctagaataaagcacagaaacaatctttgtaatcttggagtaatcagagatagtaccataaaaggaaaataatgacttattaagcttcagcataactatatattaaagtcaacattaaggaaaaaaagtcaggccaggtgcggtggctcatgtcttaatcccggcattttgggaagctgaagtgggaagatcacttgaggccaggcattctagaccagcctgggaaacatagtgaggccctgtcactagaagaaacaaacaaacaaacaaaaactctaaaaaaaattagacaggtgtagtagcctgtagtcccaggtactcaggaggttgaggcaggaggattgcttgagctcaggagtttgaggttacagtgagctataatcactctactgtactccagccttggtgacaaagtgagacttaaaaaaaaaaagaaaaaggaaaaaaaaatttttttaaaagaatgaaaaaaagtcatggtatgggacaaataattcccaatacatatatcaaaggacttctacctgaaatattaacaaacaatccttataactaaattgtaaaacaaatttttttaagtaaacaaactatttgaacagaggcttcacaaaaaaagataaacaaatgggcaataaaacaggaaaagatgctcaaccctattaaattaggaaattccaataaaacctcaatgagataccagactacacatccattaaaatggataaaatttaaaaaaaaataactgacaacaccaagtcttggtgaagatgctaaagacgtaaaattataacacactactgatgggaatctaaattggaaccactttagaaacctgtaggccgggcgcagtggctcacgcctgtaatctcagcacttcgggaggcccaggtgggaggatcacgaggtcaggagatcgagatcatcctggctaacacagtgaaaccccatctctactaaaaatacaaaaaattagccaggcgtggtggcgagtgcctgtagtcccagctactcgggaggctgaggcagaagaatggcgtgaacccgggaggcagagctcgcagtaagcgtagatcgcaccactcactgcactctagcctgggcgacagagcgagactctgtctcaaaaaaaaaaaaaaaacctgtttgacagaacaggcgcagtggctcacgcctgtaatcccagcactttgggaggccaaggcgggcggatcacgaggtcaagaggtcaagaccatcctggccaacgtggtgaaatcctgtctctacgaaaaatacaaaaaaattagctggacgtggtggcacatgcctgtagctactcaggaggctgaggcaggagaactgcttaaacctgggaggaggaggttgcagtgagccgagatcgcaccactgcactccagcctgggcaacatctcaaaaaaaaaaaaaaaagaaaagaaaagaaaagaaacctgtttgacagtttctgagagagcttcctacgtacaaacaatcctgccactccaagtatttacctgagagaactgaagataaatgtcaacataaagactcatacaacaatgttgaaaaaacttttatttataatggccaaaagcttataaacaaccagaatgttgtttaacaaggttaaagaatatgaaaaaattgtgaatatgcatatccatacaagggaatacttatcaataaaaaggggatgaactatcgatacatgaaacacaactggctctcaaaatccttatgcccaaagaagtcacacaatatgattccattcctgtaacattccgcgaaatgcaaactactccaaaatgattttaaaaaaataaaaaaaacattgaaaacacgatacttcaatggctatctgaggctggaagcagaaaatgattataagaggccatgaggcaacttttgggggtgttggaaatgttttgtatcttgacattatagtagtttcacagatttataagtagtttcacagatttatatatctgaaaaccctcaaattttttactttgaaacagagcagtttattatacataaatcttacctcaataagttgtttcaaaaattacacactagcaatctcttttgttaataatgaagaaaaaacagaataaaaataagtaatctaagagcttagattcaaaaataggtccacataattgtcataaagaactgatagctctgggcaacattgtgagacatcatctctgcaagtaaaaataaccagctgggccaggcgcagtggctcacgcctgtaatcccagaactttgggaggccaaggcaggtgaatcacctgagatcgggagttcgagaccagcctgaccaacatggcgaaaccctgtctctactaaaaatacaaaattagccgggtttggtggcacatgcctgcaatcccagctactcggaaggctgaggcaggagaatcgcttgaacctgggaggttgtggtgagccaagattgcgccattgcactccagcctgggcaacaagagcaaaactccatctcaaaacaaaaacaaaaaacaaaacaaaacaagaaaaacagctgggcatggtagtgcacacctatggtaccagctactctggaggctgaggtgggaggactgcttgagcccaggaggtcaaggctgcagtgagccgtgatccaccactgcactccagcctgggcaacagagcaagatcctgcctcaaacaaacaaacaaacaaaaaagaactgacagctcaaaaattttctaaaccaattgcagttttaaaaatgaaacgatttatttaaatttactcgtatttaaatactcctactggatgttcaacacactttaatgtggccatatagcctatttcatttaagttctatgttgccctaggaagcaggaaatatacactaattactcacaggtttcttctaaactgataaatgcctaaccttgttttaaatctatgctatactctaagaaaacaataaatgctttccacacaacaatgtatatatctttttaacttattacttaacacagctcaaatcttctattactctagggaagtaaaaaatcccagtaacttctctcacaggatattttcattcatttttcattaggaaaatgcttgcaactgaagttttcggagtcagttcaacagtgaagtacaaaaattaaaacagcacataacttttcaattcatcacaaaatatgtacacataacctaagacacctgagccatgtcaggctagtctgaagagtttcagtgtcataaaaatgaaaaattgtacaacaaaaaaatctctgggagtgctaacaaaaccttcagaaggagcttgccacaaagaaccatgggcaaaagtagccaaaatgatttctatactgaagtatggtctacagaattcttaagagagtttggaataaaaaggggaataaatcatatacattcaagaaagtgccaaaaatagacatttaattaaatatggcaagatcttcattattcaaaattcaactgatagcacagttatgaaagcaggatttttttcacaaagcttttatacagagaacaactggccagacatggtggcccatgcctgtaatcctagcactttgggagtctgagacaggaggattacttaagaccaggagtttgaaatcagccctggcaacaaagtaagacgatgtctctacaaaaaaaataaaacttaaaaaaaggccaggtgcagtggcacacacctgtaatcccagcactttgggaggccgaggcaggaggatcacttgagcccaggagtccgagaccagcctgggcaatacagtgggacctcatcttgacaaaaaaaatttttatttaattagtcaagcatgatggtgggcgtctatgatatcagctacagctcttgggaagctaaggtgggagaaaagcttgagcctgggaggttgaggctgcagtgagccaagactgtgtcactgtactccagactgggcaacagagcaagatggtctcaaaaacaaaaattagctgagtgcggtggcacatgcctgtaatcccagctacagctactcaggaagctgaagtgggaggatcacttgagcctgggaggtcaagcctgcagtgagcctgcagtgagctgtgactgtgccactgcactccagcctgggtgacagagcgagactttgcctcaagaaaaaacaacaacaaacaacaacaacagaaaaaagttcctatcaaagactttctctttgtacacacacttttaaggtattctgaattcacagacattcatatctaacctaccacagcctctactgggcagtagtatcatcaacctctgagtttcagcttcctcatctgtaaaataatcttaaaggccccttctggcttaatcatatgctcaaaataaagattttgtatttaaaactaaccaacaaaaaaatccccactaactatcctatcgaatcagtgacaatgtacacaaacacacaatatttatgacaatgtgaaaaaacattctcttatttacagaatggcatatccctagcaaaaccactcaaatgttatatcatactcaagaaacctaattatactaggaataaaaatcagccatatcacgcagatatctacgtttcctcaaaagcaagctgcacagtagatttctaaatcaggaatggggactactttcttccctctgttaggaacttttgggactgtcagtatttaagtcatctagccgcctcggattctcctatttagaaactgggacagatgatcttgaaagtctcttctaactatagtgacctctcaagaaattaaaaaaaaagaaaaaagaaaaagaacaaaggggtgcttaaatgacatttggttaatcatcagaagaggtgcttagcctcatactcaacagcctacatacacatacacaacgatgcagactatcaatatatcagaaattgattccataaatatcattagctcttcagatttaatggtttcacattagtaatgatagagaggaattatttcatgtaactttaaaatacattaatattcctatacagccccatgggatatagcctaaggccaaaacaaataaaaacaacaacaacaaacaaagaacgaaagacaactggtttcagtaatcatattgtttgcagcagtgtgttgttatctgagctgctgtgtgtttattatgggattaaagtagatgagtaattatgatggtatgtcatgcaaccaactcagtaacattagcctcatttccctttacttttaattttttagaaattattcgtgtaaaactttttatagtcatgtaaaatattaacatgttccaaagtatactttataaaaaacaagtttatgcaaaaaagtttagcttcttcccatccctccatgtgctttaaaataaatacatggtctcagaaacagtgaagtacaaaaacacggcttctagattccaatcttgggggtatgaccttaaattgtgacttaatctctctcaacttatttccttatgtctaaaaaggtgataataatagaacctagaggccgggcgtggtggctcacgcctgtaatcccaacactttgggaggtcgaggtgggaggatcacaaggtcaggagattgagatcatcctggctaacatggtgaaaccccgtctctactaaaaatacaaaaaattagctgggcgtggtgggtgtctgtagtcccagctactccggaggctgaggtaggagaacggtgtgaagccgggaagcggagcttgcagtgagctgagatcgcgccactgccagagcgagactccatctcaaaaaaataaaaaataaataaaaataaaaatagaacctagaggtggttgtgaggattaagcaagatcttctatgcacagtacttggctttgtgaggcctcagttaagtatcaggtgctattattaggatctcatttgagagtcacctcaaacctgcagcacagacacagattaggaaatgaacctgcaggtgccacatcactggcctggagcccccatggcacccaacagccaagaccacaactcactcctgagtctacaggcgacttcatgctccgcactcatcacacattccctacagccagttcaggggaaaaagaagtgtcttcccactcagggtgacttcaaaagacttactgtgttcagtgcattcagagtggtgtcatcccgagaggctgcgacacagccgtcctctgtagagcctccatcacacattcctgcaaatgccgccatgctccttcagaagaaaaggtttttcctttattagtacatagtaatatcaggacagagacttagaccttcaattttcagaggacatttccagcccagaacaaattccattactacacgcatgatgaaccagttcccagctctgcctctgctcctatttttttttttttttcttttgagatggagtctcactctgtcatccaggctggagtacagtggcgcaatcttggctcactgcaacctccacctccaggattcaagggattctcctgcctcggcctcccgagtagctgagattacaggaacaccccatgcccagctaatttctgtatttttagtagagacaaggtttcacagtgttggtcgggctggtctcgaactcctgacctcaggtgatctgctcacctcagcctcctaaagtgctgggattacaggcgtgagccatcacgcccagaccaaaaataaatttaagttcctcttcactcacgcagaaagacatatgttacttttagtcagatccatttgtattgtttcttcccacgttttagcagtactaagattttagatttgagagcatgaagaatctaaatctatgagccacaatatttcagtagatgacaatcttctgaaagaaaagtctccagaaaacatgtgaaattaagtcatctaaaattttacttaattcctctcattctgcatatcaactacctttaggtgaattaaaagtaaaaaatcatggctgggtgtgatggctcatgcccgtaatcccagcactctgggagcctgacgccagaggactgcttgaggccagagagttcaaaatcagccctgacaacatagagagagaaaaaaaatatattagccaggtatggtggtgcatgcctgtagtcctagctactggggaggacgaggtgggaggatgacttgagcccaggaggttaaggctgtaatgagtcatgattatgccactgcactccagtgtgagaccctgtcttaaaaaaaaaaaaaaaaaaaggtgagaaaccagagataaaacctcttagtcattcactccacttacacattctcatctctactgaatgccaccatgcacaacaccgttgactagaaaacagccaggtaactggggcaacacagaaaggaccccatctcaaccaaaaacaaaattaaaaatagccgggcatggtgccacgggtctataaccctagctactcaggaggctgaggcaggaggatcgcttgagctcaggaagttaaggctgtagtgagctataattgtgccactgtactccagcctgggtgacacagcaagaccctgtttcaaaaaaacaaaacaagtaacaaccaaaaaaaaaagaaaaaaagaaaaaaaagaaacccacaaacccatccagggttaaaattcagatgccctaatccttgctttcatgtttttgttgtcgttgccaagacccagaatcactacatacaaagtctgcctgcctgctctgtgacacctgctctgtgacgaccgctctgtggtgcccgctctgtgccgtgtgaggagcgaattcacacttctctctgcatcgaaggcatttgtatgttctatgcaactgccacgagggtgatcacagataaatattctcatgtaggcaagccacaaaaatgtcaagttcaggacaggcactaatgaacagccacaaagtagagacagaacatgaaatctgtagagggttttgtttttgttttaaattttactttaaggtccaggatacaagtgcagaacgtgtcggtttgttacattaggtatatgtgtgccgtggtgctctgctgcacctatcaacccgtcatctaggttttaagccccgaatgcattagctatttgtcctaatgctctccctcccctcacccccacccctctgtagtggggttttcagatgagctgaatgactgaagtactcaactggattgagaggttttggtaactgtatgtatggcctaagctgttttcctcttgaaaagttccaaaatttgatgtggggcaaacaccaagaagaaaaacattacttcatcatgaaaaaaattacttcaaactatttttctctggtaagaagagccagggtcccgattacagagggtgtaaccaaacttaaagtcagagaacgcccaatatagaaataaaatctcaggggaaatgcaaagtttactgcctataatcagttcagatggtctaattcagaaagcaggatgggggtagattcctattaccttgctgccctcaagtacataaggaggtcacagtcgttaactccaggcatccagaccagttcctcatgttgggtcactgtatcaccatctggagaaggaaatggttgcagatctggaagtttggcctgtaagacagggatgagtaagtcacaatcaaggcatgtattaattataaagagctatctcaataagcagtctttaggaacatatacaatgttttactgagactctttccttggacagcagaaaaataacaacaaaaccatgagtcatttaaactgacctatttcacatgtcaggatcatttcaccatagaagatttcacaatagactgcttaatatctgcttaacagtgtcaaagtaaaccagtgccagcatgataccaagagtaaaactgaagcacacacatatgcataaaataaacaaaaaaacaaaataatgtctttagatgataacagctattgataaagaaggaaacacacatacatttccaatataacaagttgacaaagaagacatatgcaaatgatacctcacctaaggatatttgctaaaaaattaagtgagctatcctattagaatagtgttactcttaagacagtcaatagcaatataagtcatggtcaataccaaaactagatgagtattaagtaaacattaaaaaatatagttgaggccaggcctggtggctcacgcctgtaatcccagcactttgggaggccgaggtgggtggatcacaaggtcaggagttcaagaccagcctggccaagatgctgaaaccttgtctctaccaaaaatacaaaaagtagccgagcacggtggcgggcgcctataattccagctactcaggaggctgaggcagagaactgcttaaacccgggaggcagaggttgcagtgagctgagatcgtgccactgcattccagcctgggagagacagagcgaaattccatctcaaaaataaaataaaattaaactaaattaaattttaaaaatttatatatagttgaggctgggcatggtggctcacgcctataatcccagcactttgggaggctgaggtgggtggatcacctgaggtcaggagttcaaaaccagcctggccaacatgataaaaccccgtcactactaataatacaaaaattagccaggcgtggtggtatgtgcctgtaatcccagctacttgggaggttgaggcaagagaatcgcttgaacccgggaggcagaagttgcagtgagccaagattgtgtcactgcactccagcctaggtgacagagcaagactccatctcaaaaaaaaaaaaaataaaaaaaaaaaaataaatatatacacacacacacacacacacacacacacacacacacatatgtagttgaattgacctgtggtaacagaaatcagggcagtgatttctttacgaaagaaggaattgcttgtgaagaacaggaaggacctttctgggatgacagaaatgttctgtgccttgatacgaatcatcacggcagattgaaaagcatacataagatacgaacaattcgctgtacatagagtatacctcaataaaaagaatttaaaaaaatattcgagcaacagtgctccccaccaagactgtaagtgatcagatttaaatacctgtggcattttctcacccacactctgctgggacagagcaagagcaagcaggtgccatgaccaccataaccagcagagacctgtgaaaagtcagatatttgcaagatactcatgttctcatcctgtcaaatgatgaccatgggcacatgagtctgatagagctccatgggacatgaagcctgggcaaacaatttaagtgaatgcagcaggctgaatataagccagcaccatccaacagaaataaaataagaattatatatttaattttaaatattctagtagtcacgttaaacaaaatgccatatcccaatctggactagccatattccaagtgctgaacagctatgtgtggcagtggctcccgacctggatgtgcaggtgtgaagaactcaagagtgaagtggaccacggggaaatggagatagaaccgccccatccagggaatgctgccacacaggaatgggacccagtgtgtgtacatcctccatctttttccaaattccagaaatcttcacatttatgtaaaagtttgtggttttaaatgttggtattcaagtttttgaggcaactgcatagcaaaacatcacattagtaggccatgtggctctcaggctagccatcagcacccacacagctttacaggctgtcttccatgcctctaaatgtgtatcaagctgactttctccaagcaaggatgttcttctttggttaagtattgacttctctaacattgaactgagtgtcacaattagttctgcttaacacatagtgaaaatagtgggataaaattaaaacacaatgggcctggcgtggtggctcacgcctgtaatcccagcactttcagaggccgaggcgggcagatcacctgaggtcaggagttcgacaccagactgaccaacacggtgaaaccctgtctctacgaaaaatacaaaaattagccaggcgtggtggcacacgcctatagtgccagctacttgggagggtgaggcaggagaatcgcttgaaacctgggaggcggaggttcccgtgagctgagattgcaccactgcactccagcttgggtgacagagcaagactctgtctcaaaataataacaacaataataataacaacaacaataacacaacaaatgttggagtcaaaaggtctttgacactagtactgagttctgcttccccagcaccgagtacagtactgggtacagcagttctctaatgtctgttattaatcgaaaagtactattactgtgagcaggaccaacctcccccccattcttgagaaaaatggactagaaatataattagacagtttacagaaaaagaaacgaaaatgcctcttaatcataagaattgatgagttggagacggggttttgctgtgttggccgggctggtctcagctcctgaccgcgagtgatccgccagcctcggcctcccgaggtgctgggattgcagacggagtctcgttcactcagtgctcaatggtgcccaggctggagtgcagtggtgtgatctcggctcgctacaacctccacctcccagccgcctgccttggccccccaaagtgccgagattgcagcctctgcccggccgccaccccgtctgggaagtgaggagcgtctctgcctggccgcccatcgtctgggatatgaggagcctctctgcctggctgcccagtctggaaagtgaggagcgtctctgcccggccgccatcccatctaggaagcgaggagcgcctcttccccgccgcccatcgtctgagatgtggggagcgcctctgccccgccgccctgtctgggatgtgaggagcacctctgctgggccgcaaccctgtctgggatgtgaggagcgcctctgcctggccgccccgtctgagaagtgaggaaaccctctgcctggcaaccgccccgtctgagaagtgaggagcccctccatccggcagccaccccgtctgggaagtgaggagcgtctccgcccggcagccaccccgtccgggagggggggggggggtcagccccccgcccggccagccgccccgtccgggaggtgaggggctcctctgcccggccgcccctactgggaagtgaggagcccctctgcccggccagctgccccgtccgggagggggggtcagccccctgcccggccagccgccccgtccgggagggaggtgggggggtcagccccccgcccggccggccgccccgtccgggaggtgaggggcgcctctgcccggtcgcccctaccgggaagtgaggacccctctgcccggccagccgccccgtccgggagggaggtggggggtcagcaccccgcccggccagccgcccagtccgggaggaaggtggggggtcagccccccgcccggccagccgccccgtccgggaggtgaggggcgcctctgcccggccgcccctactgggaagtgaggagcccctctgcccggccagccgccccgtccgggagggaggtggggggatcagccccccgtccgggaggtgaggggcgcctctgcccggtcgcccctaccgggaagtgaggacccctctgcccggccagccgccccgtccgggagggaggtggggggtcagccccccgcccggccagccgcccagtccgggagggaggtggggggtcagccccccgcccggccagccgcccagtccgggagggaggtggggggtcagccccccgcccggccagccgccccgtccgggagggaggtggggggatcagccccccgcctggccagccgccccgaccgggaggtgaggggcgcctctgcccggctgcccgtactgggaagtgaggacccctctgcccggccagccgccccgtccgggaggcaggtggggggggtcagccccccgcccggccagccgccccgtccgggagggaggtgggggggatcagccccccgcccggccagccgccccgtccgggagggaggtgggggggtcagccccccgcccggccagccgccccgtccgggagggaggtggggggggtcagccccccgcctggccagccgccccgtccgggaggtgaggggcgcctctgcccggctgcccctactgggaagtgaggacccctctgcccggccagccgcccagtccgggagggaggtggtgggtcagccccccacccggccagccgccccgtccgggagggaggtggggggatcagccccccgcctggccagccaccccgtccgggaggtgaggggcgcctctgcccggccgcccctactgggaagtgaggagcccctctgcctggcgagccgccccgtccgggagggtggtgggggggtcagccccccgcccggccagccgccctatccaggaggtgaggggcgcctctgcccggccgcccctactgggaagtgaggagcccctctgcctggccagccgccccgtccgggagggtggtgggggggtcagccccctgcccggccagccgccccatccgggaggtcaggggcgcttctgcccggccgcccctactgggaagtgaggagcccctctgcccggccacgaccccttctgggaggtgtgcccagcggctcattggggatgggccatgatgacaatggcggttttgtggaatagaaaggcgggaagggtggggaaaaaattgagaaatcggatggttgccgggtctgtgtggatagaagtagatatgggagacttttcattttgttctgtactaagaaaaattcttctgccttgggatcctgttgatctgtgaccttatccccaaccctgtgctctctgaaacatgtgctgtgtccactcagggttaaatggattaagggcggtgcaagatgtgctttgttaaacagatgcttgaaggcagcgtgctcgttaagagtcatcaccactccctaatcttaagtacccagggacacaaacacttcggaaggccgcagggtcctctgcctaggaaaaccagagacctttgttcacttgtttatctgctgaccttccctccactattgtcctatgaccctgccaaatccccctctgcgagaaacacccaagaatgatcaattaaaaataaataaataaataaataaataaataaataaataaataaaaaagaattgatgagtcaacctctctgacaacagaaatgcaaattaatggcacatattcaattttgcatctatcatactgacataaagccaaatgtttgacaacacataaagccacgaaaaaaattagcactcatattagttgctagtgtcaacacaaactgatacaatctctgtggaggggaatgtggcaaaacccccaaaattatatatgcacttgtcctctaagtcagccatcccgcttctggggatatagccccaagatacactggcaaaaacatcaaaatctatatgcacaggctattcactgcagcattacatgtaatggcaaatgactggaatcaactcatatgcctattaatagggatcagatgaataaactgctacattcatacatggagttctatgaaatagtattatagaagggaatgagaaggagctctatatactgctatgaggagaacacaagaatatactgttaaaagaaaggtagcaaaaggatgtatattatgttattatttatctaagaaggggcagagggaatgaaaataagaagcttaaataataataatctcattaaaactacaccaaatggaaagaaatgcaacaattgagctggttctactctaggaactgtttcaagtaactctaagatatattaatttgcttatacagccctggcaggatatacataacaaaatgcaataccaagctgttttcaataagcatactgtttgtagccatgtgattattgctattctgggctgttatatgtgtattatggaattgaagcaaataagtaattttgttggtgtcattaaaaaatgggatttgagtcacgggaaaaaaataaagatatacataaaagaaggacagaattagtataaaggccatagaaaaatctgaatttgaattggatgtatcagcataaatttagaatgtattttatctttaagaaagtagggaaataaaacacctatttcctattctgtctactgaaaaggcctcgaaatagcaaccaacccagtaagaatgaataccccagcacccagtatgtaaataccacttcccactacaataaaagagggctcttctgagacaagtttaattccacatctagggaagacaatgtataaggtgaggcagtaaaatcatgtcttactagagaaaaacgattaagtgaaaaggacaaaaaccactgggattaagtgaaaaggacaaatacgaaggaagatgctcctactggcccaaaatggatcttttaatcatcaataagaactgattaaagttgattatagattaaaaaataaaatccactggtaccatggaaagataagggtgaagtttcatttatttgtacaaggaataaatggatggcagaattagaatatcactgttttgaaatccctaataaaataatggatctaagaaataatcagtggtggccaggcgcggtggctcaggcctataatcccagcactttgggaggccaaggcgggtgtttcatgaggtcagaagttcgagatcagcctggccaacatagtgaaaccccgtctctactaaaaatacaaaaaagtagccaggtgtggtggcgggcgcctataatcccagctactcaggaggctgaggcaggagaatggcttgaacccgggaggcggaggttgcagtgagacaagattgtgccactgcactccagcctgggcgaccgagtgagactccgtctcaaaaaaaaaaaataaatgatcagtggctgctaattacaattaaaaaagagacatatgagcctcctggcagaagcacttaccaccacccaggaagcatttttctggaaggcagggtaccaaactagaatgaggccgaacctctagatttaactactaattctcaagtcatgcaaagagcaaagtaacaaatttaatgcaatcagccaaatctagactgcagaacaccctacaggatgaaatagcttctttaccacatacactgggggactaggggaaggacctgggaattaagagagatttaagagatgtatcaaccaactgcaatgaatggctctcatttagattctaatttgaactatgaaaatataaagaaagagagaaagatacagacagacaattagggaaatctgggcatcgtatacacttgaatattaagaaattggtaatttttatatgttctgatatattgtgattgtgtccaaatcccttatttttggaacatctacaaggaaaatgatgtatttgtgaggcgtttaaaataacggcaggaagaggtgtgagggggaataaatgaaatgggtttgactaggatttgatacttgaggaagctgagtaatgaagagaaggactttactgtattattctttccctgcttttgtatatgttaatattttcctaataaaaaggttaatttttttttttaaagactggttctgtcaccaggctggagtgcaatggtgtgatcgtggctcagtgctgcttcaaccgcctaggctcaagcaatcctcccacttcagcctcctgagtggctgggactacagacatgcatcaccatgcctacctaatttttgtattttttgtagagatggggttttgccatgttgcccaggctggtctcgaattcctgagctgaaatgatctacccaccttggcctcccaaagtgctgggattacaggcgtgagccaaaagtcaaaaattttaaaaaggtaaatgttgccaattcatttttaaaagttttattatttttggtgctccaaaacatttctttttgaaaatgaagcacacagaatacatttaaaatctgatgtaaaaaaccaaacatctgattttaaatggtggtatacaaaaatccaatcacagtaaatttgctccttttccaagaatgtaagcatcttttccttaggaactacattttcttttatggtaggaaaaaaaaaatctataaaataaaagtctggtacaaagatctcaagacactggaaatacacagtgagagggaaaaaatgggtagtaaaatacagtgcaagagaaagtagagaatgggagacgaaactgagtggcattaggttgagtatcaggttcccagaccgaaaatacagccccgaggtggcagtcaggcccacctaatggaacacaccaacaaaagactctacttgaacaagcagacactgtcctcctgcagcttctttcagtctgtatcagttataaccccaggtctgggatgagaagtatcttctataaactatgtgaccctgatagtttttgtgttcacttcacttcataactccttcacttcttaagttctttcattacagagttaaaataggttatttaaaaatgtaaatgacacacaatttagaaatgctcaaaatctagacagaaataataactagacagacgactgaaatctctatgcacttccaaggctcactgctgcctgtatcccatgtctttagacatgatggccttagctgtggattccccagcatccattccaactcaagtgctaatcatgttaaactctttcctcatggtttagaaatagacacatgacccaatccatggcaacaatatgtgggtctactggggacctgctggggaaattttccttgctcctaaggggaaaagaagtccaattctttcttcctctcaacacttgctaaatttcattcattgtaagatccactgttattttatgtgcactgagaaaggataaaatatagccaataaattataaccacaccacagaatgtacaatgaagcccaactataggagcaaatgtgaaggaaaaaagtgtatcttagaattagtcaaactgagctgaggatgacgccacctccatggaggccagctgggtacaagagagtctcagagaagcacagcagagccccagtcctgcctgaccaggatgtcatgacatgggagacagaaacagagccagagtcctgtcagtgaaagcatcctaactgatactgagatcaaaacagaatatgccgggcccagtggcacatgcctttagtcccagctactcagaggctgaggcaggttggactgcttcagcccaggaggaggtcaaggctgccgtgagccgtgatcgtgcctctgtgctctagccttggcaacagaatgagacctgtctctgaaaaacgtaaaaacaacaacaaaaaccaaagagctgtaataaatgcaatgaaataagaaagagcaacagtcgtgacacagcaaccctctgactgaaaagtgtcctaaccatcttgactctcctgaaggaaaagaagttgtttatttttttgcagacagtctcgctctgtcgcccaggctggagtgcagtgtcgcaatcttggctcactgcaacctccgccccctgggttcaagtgatttctcctgcctcagcctcctgagtagctgggattacatgcgcacaccaccatgaccagctaatttttctatttttagtagggatggagtttcaccatgttggccaggctggtctcaaactcccgatctcaggtgatccgcctgcctcagcctcccaaagtactgggattataggcgagagccaccacgcccagccgggaaaagaggttttaaacatcttttatctttttttttttttttttttgagacagagtcttgctctgttgcccagactggagtccagtggccacagtcttggctcactgcaacctccgcctccggggttcaagtgattttcctgccacagcctcccaagaagctgggattataggcgcctgccaccacgcccggctaatttttgtatttttagtagaaatgggatttgccatgttggccaggctggtctcgaactcctgacctcaagagatctgcccacctcaaccttccaaagtgctgggattacaggcatgagccattgtgcctggctttaaaaatgttttaaataaaaatatgtgatcaagtgttcatcaatggatgaatagataaacagtgatacgtacatacaatgggtcatttagccttaaaaaggatagaaattctgacacatgctattaacacggatgaaccatgaggacattatgctgagtgaaataaatcaggcacaaaaagacaaatactgtatgattccattcacatgaggtacttttatgaggcagaacagtcaaaaacagagagaggaaggagaatggtgattgccaatgctgcagaagagaaatggagttactgtttacgggtacagaatttcagttttgcaagatagaaagagttctggagatagatgacggtgatggctatacaacaatattaatgtacttaactactgaactttgcacttaaaaatgggagatggtaaatgtatgtggtgatctgaggagggtggaaaaaaaacctctgtatttataaaaaattcccgatagcaataaccacattctaagatgctgcgcaacagaataaagtgccagcagagtaataagaaacaaaaacctattaaggaagctatgaaaatgaacttcacctgatgactaggaccgacacgaatctccccctgggtactgttcagcctcctggaacagaaatagagcagattaagttagcgcaatacagttttgacataaacattcacacatttttcaaaaaaagtaattctcttcaaataaatgaggaaaaactgaggaagaattaacgtccccactacttctaatgttctgtatacatacaccacccaccaccacacatgcacctctaaaaccttttcctttgaaaatcctaagaactgcagcttcctttcatgagaaccttcctacatcatcgttctttttttgagacagagtctcactctgtcgcccaggctggagtgcagtggcacaatctcggctcactgcaacctccgcctcttgggttcaattgattctcctgcctcagcctccagagtagctaggatttcaggtgcctaccaccacgcccggctaatttttgtaattttagtagtaaatttcagtaaattttgtaattttaataatttgggttttcatcatgttcagccaggctggtctcgaactcctgaccctcaagggatccgcctgcctcggcttcccaaagtactgggattacaagcacgagccaccacacctggcccctataccatcattctttcatgcctcagagagatggacattcctgtagtacaattccagtcagacatttcttccgttcaaaacatctcagggtgccctaccataagccttataaaatacaaataagaaaacttatcctaggacatatactgagccatccatccatccatccatccatccatccatccatccgtccgtccgtccgtccatccaacaaatatttaagtacctactataagccaggaattgtcctaggtgttggggataaagcaacaaacagggacaggtacagaggctcacacctgtaattctagcactttgggaggctaaggcgggaggatcgcttgagcccagaagtttaaaaccagcctgggcaacacagagtgacgccatctctacaagaaaattaaaaatcagctgggcatggtggcgcacgcctgtagacccagttactcaagaggatcgcttgagctgggaggtcaaggctgcagtgagccatgttcgcaccactgcactccaacctgggcaacagagcatgaccctgtctataaaaaaggcaacaaacaaaacagtgtcaaagaagatggcctaaaaggaggcacatgctcttgtttttctctcatggatctgatacccatacccactgtgtttgaaattgttaaaaatacattttggaaagctatcgtttcctttagggcacctgggcccagtactttcttcttttaatccaatcattttctcatgaagaatcttgcttgggcaaaggtggtggtaaatgtgacaaaggaagaaaaaaagaagaggaggaagaaggggagaaagggaggaggaagacaaggaggaggaggagaagacgaagaagaggaagaagaagaaatgtggtggcccagtcatcaagaatcttacaagcctccagctggcgaggcagcatctgtaccaaaacaccagaacaggccgatgcccgtattcatcaacataagacacttcaaaagacacagtacaaaaatgtgaaggggaggtaccaaaatgaggcggcttcaagagaagacacagaaggagataataggcctagcagcaggaaaaaaaaagaggactttccaagtagaaatgaaagcatgcagaggtggcaggctgaaagggaggggcggtgacagggaaatgcttgcatgtgggctgacttcatcatacaagtcatcttcatttcttcattaggagaatggtatgtggaaaaacgaagctaaaagatggattgttctcataggtttatgcaggaaatggaagaagctgttttaggaggtatgtaaaggaatcaaatcagccacaagttattttaatcacaagcgcttctttaagaaaaacaagcaagcagtcagcgttaccactatttcccttccaacttgtccttttctattttctaactagctgtgagcaaaacaagctgccaaaagctctaaatactttccaaatgctttcttgcctacaagtaggtctagccagaatgtatcatttcagaaaccttcagccacagcccattcagtaacttctgcctgcagctcaacctttgggttcttccagaaggtctgttactctggagttctccagtggttggatatcatttccatatcatggctacactgttaagtccttgataattccagaaaaaacattcctgcttgatttttattttattttggagatgaggtcttgctatgttgcccggtctgttctcaaaaccctgggctcaaagggacccccacctcagcctcccaaagcgctggaattacagacatgagccaccgcactcaccgcccaaccccatttttattttaataagccaatttatcatcatatttagcttaaaaaaacccaatgtaccatggtaatgaaacaaactcccaaataccctgttgactagaactacttatatctcacgtatttccataaaaataggatgcagataattattattaaactaataatacaaatgagacaaaaaaatgtattgggccatcttaagagacttgaaaattgtttaagtttataacagggaagagtactaataagtaggctataacatgaaaaccaagataaaataaggaaacttcttaaaagcttatttaaaaatccctctttgcaacaaaagtatttttaaattgtatgtaacttttaaatatcagggttctatagcaagaaatacaacaaagttctttttgagcaggtaggatctgaggtgcagacaatggcattagcctactatatgcaagagttacagaatatagaataaatggcaaaagtactttttaggtccaagatataaagaggtagatagcaacacaccaccttagacaaagcttgatgcagctgacagaaaaactgtcagaatatgagctgaaggtgaaagacaagaagtacacatggtggggaagtgccagcatccagctgtatctggatccaccgagcaatcagaatcctccttactgaactaagtatccctcccctgctgccgcactgctctcctctcttttttctttttcttttttttttttttatcctgtatccccagacagctgcatcacccttgataggtcaggcagccacaacaccccagaatgtttccctggcacatggaaaaagcacccccatgaggctgcagccaggtgcaaagtgagtctgtgaactgctcccttcttgaatgcacctttgtggttcacacctcactcattaatgatatttaaacatgacagtatcaacagcttgtaggaaacactcttttttttttttttttttttttttttttttgagacggagtctcgctctgtcgcccaggccggactgcagactgcagtggcgcaatctcggctcactgcaagctccgcttcccgggttcacgccattctcctgcctcagcctcccgagtagctgggactacaggcgcccgccaccgcgcccggctaattttttgtatttttagtagagacggggtttcaccttgttagccaggatggtctcgatctcctgacctcatgatccacccgcctcggcctcccaaagtgctgggattacaggcgtgagccaccgcgcccggccaggaaacactcttaatcatcaattgcaatcttgatgcaatgactacattttgtcttttacttaacatttctcaaacttttaggtctctgtacccttttacactcttaataattactggagtgtgtcttggtggtcccagaatctgtctcttgtttcaacaatgtctgaacagcacatatcctgggactccatctgttccagcctccaactgccctccaatctcccctccatttgcaacctccagcacccttcttctcggccatatcctgcttctgggaccagccaccactgtttttgtggttagctcctcaaccccgcaagctctgggaggcatgagtgacttcttccacgaatcggccaagaagattcagggcactgagtgtctcttgaagatgtgtgtgtggcagcggcacccatttccaggatgtggagaagccatctcaaaatgagtgggggtaaaaaccctgggttccatggaagccaccatggctctggggaagaacctgaaccagatcctcgatctttaggccctgggttctgcctgcacagacccccatcttctgtgacttccggagagccacttcctagatgaggaggtgaaactcaacaacaagatcggcgactaccagaccaacctccccaggctgggctgggtaaatgtttcttccaaaagactcaccctcaagcaccacgaggagcctacagagcccagcaaacttttaggagcccctctcaaagttcagggctactgcctaagcagcgcctccagccactaccctggacccctctcccaagccgtggacaaaacagaaataaagcttattacaaaaaataaaaataaaaattactgaacatcccaagaaatctaaatttttgaaaactttcaaaatattgatttaaaaatagcaataagcccattacataacaatatacatattcttataaaaagtaattgcatttaagcagaaacctttagtaaaaagtgaggcattattttatgtttttgcaaatctcattaatatttgacttaatagaaaagacagctagattctcctatctacttttgaattcaatctgctgcaatatattgttgtggttaaattatatgaagataatacagcctaacacagtgatgtaactagaaaagggaagaatatagcctttttgatactacaccaaaaactcaacaagttcccggcactctggggggccgaggtgggaggatcacttgaggtcaagagttcgagactagcctggccaacatagtgaaaccctgtctcgactaaaaatacaaaaaattagccgggtgtggtgttgcatgcttgcaatcccagatactcaggagcctgaggcagcagaattgcttgaacctgggaggcagaggttgcagtgagccaacatcgtgccattgtactccagcctgggcaacaagagcgaaactctgtctcaaaaacaaaacaaaacaaaacaaaaactcaacaagtaatcatttcttaaagatgtgtacacaaggtgagtctaaaagcctatcaatagtcttttgactgtgctactctgaaatccattggtctgtcttgcctttgaatgaatggatcttctactcagatgtgattttgtaatgtcatgcattggttttatagagaatgtcagtttactcagttctgcagatctttcaaatatcaaccagttctttatacagcattttttaaaaatcatattaatatcacctatctcataagaaatgcctttcagtgtagagaagctgtcaggctcagagtggtgagtacaagcttttcgaaattctaatttttacttgaaagttcaaatcttagccttgtcaaatagtatcagtgttttccttgaaataacaagctcacttaattcatcttcaagaaagtttctgccaaatgcccacgtctgaatgaccacagtttgtctgtcagttgttctttcaaagagtaactgatattccatgaaaaaagtggctagcttcgcttctaactcaaatgtctcgacggaaccaaggcttctcctcaagacaatcactgtcttttggtatagggcagaagacttttaagtcgggaagccaagtcttgggattaaaaaatactaataggctgggcgaggtggctcacgcctgtaatcacagcattttgggaggccgaggcaggtggatcacctgaggtcaggagttcgaaaccagcctagtcaacatggtgaaaccccatccctactaaaaacacaaaattagccataccgggtggtgtgtgcctgaatcctagctactcgggaggctcaggcaggagaactgcttgaacccgggaggcagaggttacagtgagctgaggtcacaccattgcactccagcctgggcaaaaaaagaatgaaactccgcctcaaaaaaaaagaaagaaaagaaaagaaagaaaagacaagacaagaaaagaaaagagaaataataataataataatgaggtccacaagctatgctctgagaagcactgattatggcacattctgaacttcagcaagtgctggaggctaaaattcatctagaagactccagctttcttctttgatgaataacaacagtagctaacatttcagcacttactatctgtcctaggtgctctacagtattatctcatttctaggtattaaggcatttaattcatgttttgatattaacagacatgttagtattgctattcacagaaattcaggtgtctttctatcctgtgttcaaagcaacacagcactacacgtggtggtgcacacctggaatcccagcactctgggacgctgaggcaagaggacagcttgagctcaggagtttgagaccagcctgggcaacaggctttataaaaaatgtttttttaattagctggtcacggtggcacgcacctataatcccacctactcaggaggctgagccaggagaatcacttgagctctggagtttgaggctgcagtgagctatgatcacaccactgcactccagcctgggcaaaacagagctagactgtctttaaaaaaacaaacaggccgggcgtggtggctcacctgaggcaggcaggtcacctgacgtcaggagttcaagaccagcctggacaacatggtgaaaccccacactactaaaaatacaaaacttagccgggcgtggtggcaggcgcctgtagtcccagctactcaggaggctgaggcaggagaattgcttgagtctgggaggcagcggttgcagtgagccaagatcatgctactacaccccagcctgagtgacagagcaagactgtctcaaaaaacaaacaaacaacaacaacaacaacaacaaaacatagctactaaagaggtttctgcttggatgtacaatgctgctgaattaacaaagtaggtctagtcaaagccagggtggtcatcaacttcggaagaaaaatccagaccaaaggcagtatgaatcctagccaagacatataaaggatactactgtatgaattaagaaaccaaagatgcaagtaatatccagaataatgcaacatacacacacatctatctttatcctcatcttaagagttttcacatacgttatcttaaatctaggtgtaggccgggtgcggtggctcgtgcctgtaatcccagcactttgggaggctgaggtgggcaggttacccgaggtcaggagttccaaaacagcctggccaatatggagaagccccacccctaaaaatacaaaattagccaagcgtggtagtgggtgcagtagtgggcacctataatcccggctacttaagatgctgaggcagaaaaattgctcaaacccaggagatggaggctgcagagagccgagatcccgccagtgtactccagcctgggggacggagcaagactctctcagaggaaaaaaaaaaaaaaaaaaaaaatctaggtgtattatagttacataacaaacacaagcaaaataataatactagctatcaattactaagtgctttctatgctgggcacatattatttcattattccacgacaactctatgaggcagtatctccataggtaataataataacaatactaattttaacattaataaagcaactaatatatccattgaacatttactatgtaccaggcattgcaaggtaagcaatttccatttattttcttatctaatcttacaggcgaccctgtaagataggtgctattgtagtaagtgtacaggtcaggtcactgaagccaagagacgttacgcagttgcccaagattaaacagcaaataagtggagaaatcaggaatcctactcaaggtcagctgactccaaagtcagagctctcaatcacactcccatatggcagaatgattaagttactgaaccaaaatcacacaattaattacaaacagaatgatgagaatccatatccctttccctattttggttctatgtttatttcaaacacccaagcaagacaaaatgatcaaaagaatttttttaagtttgaaagtcatgatgaaagagaaaaacctatcaaagttagaggccaatgtatataatactcttgaaatgacaaaattacagaaatggagacacattcgtgattgccaggtgttagagatggtggggagagggagggaggcggagggtgcgaccacaaagggagagctttgtagtgatggatagctctgtctcttcattgttgtggtggttacacaaagctatccatgtgataaaatggcacagaactacacgcacacaatctactaatgccagtttcctggttttggtatcgtattacagttacaaaagatgagaccactctgtggtatctttgcaacttcctgtgaatccaaaaaatttaaagttttaaaaaagtcaaatgaagggggggatatactacaggcagatgggaaatcagaaagaacaccagacatgagaaaagctgattaaaggacaaacagatcaacctcaaattacactgtacacagctgaaccagtaactgaagaaagagggccacagcttattagcaatgagattcaagaaattaactccaagtgacatatttattttttccttatgtttactaaggatttctgctgtggattcatcatcttggagacatctttatactgtgaatcatattacaaaaaccgaattaagaagtgtcactatcatccccagcaaaagaaggaatttctctgtgtagctaatgtaaataatatgtttttcaaaacaacttaagttcagcctacattattctacaaatctttgttttagaatatgaaaaaaatagttccagaagccaaattacaacaataatggtaagttgttgtttttattcctgaagtattaaaaaaacagaaagtcattgtatatgaaatctgatacaaaaaaaccccagtgtaacaaagcagtatccatagcaactacaacttaatatttcagtcctcttcaactgcagtggattaaataaaatgacaagatgttccctttgaaaagtaacctgttaccatggaaacgttttattctaagaagtaaacagggaatggacagaaaggagcagggagcctgtaaatgaatatcaaaaagggagaagcatctttgcagaggagatggaggtggcgatggcaggcaaagggagggtctgtgagaagagcatgcctgctagatgcaggatcccagcccaacccagaggcttggcccagaacatgatgcggccacttcttcaccctgaagaaaggggaaggggcaggaaggcaatgttctgtgaacattcaccaaagacgcccaaagatctctatgtgatcacggtgactgcttaagataggcacttgattctacaagggaagatgagggaggaggatagagatatgggaagaacacatgaacagaaggcaccaccatgaagcaactaagggcaagagctgaccccctcattcagcccctccccaagccttgggtcctaacagtcgtgtagcctgtggcccattcccaaggtgctgggacagaaaaggctcaagtcagacccttgttctgtggctggcgtcatgtatgaatgagatcactgagaaatctctctccctgtccttcagatggtaaatatcacacagcagacattcttatcttttccacagggtattaagttgagcaggaagactgacatggcatcaacagaatgaagatcttagaaacgctacttagtacacatttagaaaatgaccacagaagaagtctgtgggtccagaacaaaatacactacattttaagaaaaccaaaaggcaatttatcagaatcacttttttagatggattgtgaggtaggagtgaaagcgaggattaagaaggaagactagtgcaatatgctgggtttctcaattttccccagcatgaacacatacttcaaagctgccctgaacaagtctgaaatttctttttaaaatctaacatagtatcttaaaaagccatgcgaatgttgtattctatcccatcatatattcccattcatttttagagaaaaatttccataaatctgaataaaatcattgtgctggccgactctgggcacactttctgtgggttagccctgctccttaagaaacagcaataaataaataaacaaataaacaaacaaacattaaaagaaacatcattgtacttcctattaggatctcccatgacactgtcacacccacacctgagtctagatgttcaaaagcagggaaagagcatggtcttcagaattaaatgaacctgaattaaaattttagtatcaggccaggcatggtggctggctcatgtgtgtaatcccagcactttgggtggccaaggtgggtgggtcccttgtgcccaggagttcaggaccagcctaggcaacatagcaagacctagtctctgcaaacaaacaaacaaacaaaaaacccaaccaaccaaccaaacaacaaaaacaacaaaaattaaaaattagccaggcatggtaaaatgcacctgcagtcccagctagttgggaggctgacacaagaggatcacttgagcccaggagttttgaggttgcagtgagctatgatcacaccactgcactccagcctgggcaacagagcaagaccctgtcgctaataaaattttaaaaataagtttcagtacccaggttttgtttgctctgtgattttgaggacacaattaaatctaattccttagtttcctcatctatgatatgaagttgataatgttattatgcaaggttgctataaaaataaaagatgatttatggaaagaactagacatagtacctattgcttaggggtcattaatattattaaactctatatactggcaataagtgagaatggaagctaatcctgctattatgagttcccgaagtaccacttacctctccttccacccatatcacagtcaggattttatatttattttttgtagttatttctttgaatggctgtcttgccctctagactggaagtacatgcgggtaagaactaaaactggttttggtcaccataatgcagaactcactggctcttactagatacatttttaataaataaatgactccaatattctaactcaactactgcttagccacagacagcaagcaagggctctgctgcaaagcttagctagtgaagtccccgtgacagaaagccagccctccaagcaaaattaacttaaacgtaggtttgattaaactgcctaacaggaacaaaattcattattcaatcaaaaataaaactaaaaacaaatacaaatgaaaaaacaaagagatttagtcaacttaaagttaccacttccatattcacacacaaataaatacaaaggccaacacaagaacttgtccaaaatccaaaatcataaaattctaaattttctctgtggaaagttcctgagaggccattgatccaatcttctagcttaatagaagaaatcaaggcctgaggaaagaaaagtgctcttttaaggggtcacactgagttaattactgaagaagactccaggccacaccggcagctctcccacagggtcctcctaaatataattcagggtccagaactagaaatttggcattgcctgaagaataataagaatttccatgctggtaagatgcagtaaatatggcctccacacacaataatgtatgagtaatgtcaggaaaaaaactggtcaaaaaaatttaacaggtgagaaagatccagtttcaaagtgctatagtgactttgctccgttgtctaaatttcttatctgccttctctctcttctccattatgtggtaacctaccgtgtatctggcaacgtcataaaacaacattccaccacaggctcctagggaactttactgtaatggcctgtggcaaagtttaggggctgcggcctaacaaagctgcctgcacacacatggagattcagccaaaaaactttttaaaaaaaaaaaaaaaaaaaaaaccactatgaccgaaacccacttacaaagcagcagtcactgtagattaagctgctctcctgacccaagatggtgctagctttctgcatattgaaatcaaactgtataacaaagctgaatgaagcacccccagaaaaaaaaagggactttggaccaagcaagcatgtctacaacacgtctaaaggtttctttgtcccctcagggaaatgttataaaaaaacatgacaattgccttattcctcctcgctgcagtggtatgaatatagaaggaagagaacacaaacaggcaataactaacacacacacatgcacctagtgtgtgtaagtgagaaagtggcaggaaatgtttaatgctgaacacacccaatattataaattatggaagtagagcttctttttttcaaaaaaaaaaaaaaaaagaactccaagatgtataaagaaaaacataaacactcaaagagagtaagaagaaagtggatcagtaaatagttattaaacatactggtggttaataattagtgtaattcctaaaacaatccctagcattgtcttagttgaacaggctattaaaaataaaaagatgttggccaggcacagtggctcatgcctataatcctactattttgggaggccaagacaggaagatagtttgaggccaggagttcgagaccaacccaggcaacaaagtgagacctgcatgcctattttttttaattaaaaatttaaaaatatatgttgttgttgagataatcatatctacatgagcttgagactgtacatttgacctgcgaattaataacaataatgtactaagcaactatgtgccaagcacttccaagttgttttcatctaatctttacaaaaactgtaagaaatatttatttccagattacccatgagaaaaatgaagctcagaggagggaaggaacctgtcgaatgtcaccgcttgcccaattgtcacttattaggtggaatctgaaccacactacctggctccaaatctagcctttcctcttaccacagatgatgcattcatttattcaacatattcataccaaagacccatttgccaggtactctactagaaatggagaccgtaagaatagacttggcccctgccccaaaagcttgatgtccaatagggaaaaaaatcaaataatcacaaataaatgtgtagctcaaagaagtttgatagaaataatctctaattttcccagttgaattaagtgttttaccttagactcaaagtatcatagagtatacaatatgagatcagttatctttcagaattgttttaaaagtacattcaagcatgagtctcattagaccaaaaagaaaaataaatcagactcatgctttatcacccacagttgcaggaatacaggcatgcccctatcagaaactgctcagaagagatgataactaattatctgtgcttatttaggagaagatttgtgaatgtacacaccatctaaaatattcctttagctattattttctaccttctctctcatcctgtcagacatttatgttacagtcttagaatacacggttttctggtggaagacaactcggttgagtaacaaacaaaaagtacctggcaaatgcgtctttggtatgaatatgttgaataaatgaatacacaaagtaaaatggaaaagaaaacaaattcagaaggaaaagaatcaggaaaaaagaacaactagagaatcacagacatctggtcttagatatattagagtcttctaattcataaattaacacagtagccacgagtcaaggaagaagtgaaaagaagattaagaatgaagtgtcagccgggcagggcggctcacacctataatcccagcactttgggaggctgaggcaggcagatcacccaaggtcaggagtttgagaccagcctggccaatatggtgaaaccccgtctctactaaaaaatacaaaaattagccaggcatggtggcagatgcttgcaatcctagctactcaggaggctgaggcaggcaaatcgcttgaacccaggaggcggaggttgcagtgagctgagatcacaccatcatactccagcctgggcaacaagagcgagactccgtctcaaaaaaaaaaaaagaatgaagtgtcaggccaggcacgctggcctgtaatcctggcactttgggaggccaaggcagcatggattgcttgaggccagaagtttaagaccaacctgggcaacaaggtgaaatcccttctctacagaaaatacaaaaaattagccaggtgtggtggcgcccacctgtagtcccagctatgtgggaggctgaggcaggagaatcaccttagcctagggaggtccccagggaggtcaaggctgcagtgagctgagatcacaccactgcactccatccagcctgggtgacagcgtgagaacctatctcaaaaagaaaaagaaaaaaaagtgacatgtcaattaaacacaatcaagttcattctagctttcaaccaaagacagactgcaaaacttatgttgacagaggaacgctttaaatgtgaggctccctcagattcgaattcgagattctattacaatgataagaacaactaataagatattaactttgtgaacttctctattttttgaaacatctacttgctacattcccaacatttcctgatattctcaagtgcaacagaagcagaaccataagccaaaatgaaacaaactagcatcttttccatgttcaagctacacagaccaaagacttcatcaaccaccagagtaacttcccatgtgctgttccctcacctcctccaccagacaagcacagaagccctgaagcaagcctttagcattccaaaaaatatttttcccagacaggataatatagaagaaatacataccacactcattagagttactttattggatttgaaacatagacaaattcgactcttaacaacagaatatccacagatcacagtcagcaaccacaagtcttcaccatcaaatagatggcggcatccaagctccataaatacagatttgtactaggcccacacaggccagccacaccagtggcaggaacctgatccagagctgattcggctgtgagcacagcttcctgttcacatttttatttgttaactgtaaagaaagtttcagaagaggtaaagatctagaacagaaaggcaatattctcctgactcaaacaatgagtttgttccttgagcatgaaatgtgagtcctgcccagatcccacaagtgcatgacagaaagtggtgcagtgtccagttcctctcgtctattgaagggatacttttattaaaagaagcaggaaggaagagcaatggtgcttttaaacagagtaaaataaggcgagttccagaagcaacattatatggtatggggtacctccccaaaactccccagtgcaatgcccaaataaatatggtcacaatgggaagaaagccctcacatgggtaaaaaaattgatcacaaaaataataaacgcacaccctaaattatccttctacaattcatctccttagttgcaatcccaaaattgaatctgtaagaatacagattatacttcagtaatattttcagtgactagaattcaccaacattagccttcctaaaaactttccactaaaatcaagggcctccctggaaagagttgaccatgcaacactccaaattcacactacaccactaagagcttacacaaggaatttctccttgtatcaatgcatagtaaatttcttctccttcctatgagggtttttcagttgcacattcttctatattgtatgctttcttccatcctcacaaatgcacaaaatttaggtggcattcaaattttttctaacctttatcagaagaaaaaggagtggaaacaaaaaggagcaaacagtataattcaaaaacttcatttaatatctacttgggtaagaattcaatttgtcctaaatcttattctgactggctccctaaataaaccacagtgaaagccatctgtctgaacctgctctgcaacaggacaccccaaaagcacaacttcccctgggtagaagaaactagtgtctggctatcaagcagtgggtacgaaatgaggccttgtcaatgactgccttctcagcaccaactactctttttactccatttaagagaatagaattccaagtcacatgacaacatacacatatgcaaaaaatgctatccgattctaaaacagatacaaaaataaacaaaatacctaaacttcaatttctaacacaaaagtcaatgcatactttttttaattgccaaagaattttccataagctctaaaaggaagatgagtctgcttccttttgaaggcaagagactaagtaaaaactgatgtgacataacctttcatttttaaaaaaatcaattttaaggtgttattgttgcaatcataattcacaactgttccctgaatatgtcagacttcagaaaaagatcacaaaaattataatttgctctggcaaacaggctctcaatcaaaacaaggttccacccaccttcaaagcaaccaatagaagcccacctaccatccttcctaaaacatccaaacagagctgctctgcggcccaggcattccatactagccacaaggcaagggggcggcctgcaggcttgctctgcaggtcttgaaggcaaacaagcttggcaacacacacccagcacgactgaggttaagattatactacgagccgaagaggtaaggggaagaggacagggacagagggacccgcaaagcttcacattctatatctgctgaatgcctctccggtagtccccattcttagttctgattttacgcttcacaataccacctacatggccagctagggctgaattaaaggctctcaggaacatgcactatgaatgatgaaatgattcataaacaccttcagaagtgagaaagagcagcaaaacccatcactgtttcggtgaggccaggggaagatagcctacctgcaggggctgaatggatcatccatgactaacacgggctctggtgagtctagctggattcctgaacctttactttctgctaaaactctgcccttttctacactaacaactcaaaatggaggcacatgcagtctcagagacctcatagagctttcactgagcttgtgctatgacctaagccttcacgcagaacgcagaaacttcccctcactctgacaggactgagcatgtgctgtgaccctccctcatccacacactgtctctccacgacgcaatcaatctcaaccctgctgtttccgtaaataaagcccagccaacagactctgcagcttctccctgcacaccaagctagtgtgcagggaagtggggccttagaaaggggatccaagacagccaacagcagggaactgagcaagcccagccatggagaggcttcagttaaatgccctgctctgtcaggaactcagcaagccaagccacggaggagcgtcagttaaatgctctctgctctgtcagcacaacagcaagttttgtctttttttttttttttttaaggtaaatggtgattttaaaaagcaagatcaccaagaaatagaatcaaaagacagatatgaatgactacacacaagatcaactaatagaaatactgcaacacatttaaaaacatagtagtagctacttaagagaagcaacttcacaaatttctttttgaaactctaaacattttgaaaaagaccaaacaatccgggtaaagttatggagtgcttggccttgtcacacaggtacagacacagtgtagatggtattgtgagcagggtagctaaagaaaactgtattttctgcaaacagcttaatcttccttagataagaaactaaaaataataaataaaacattccccaaataataaattaaaacatttcctaaagtaatactagcccaatcaagtctagcttgaagaatctaattctaacaattagaaagacaggaaggttcaagattcaacatcgtgccacaaacacatgaacatccaaaaatctcatttgaggtcctgattcaaaatactaaggcagatccatataagaaatcctagctttggatgtgcaggcttagtttccacttacaaactaagaggtgattctatagattattaatcagttacaaaaagaaaaagaaatggaagaccatgaacctcgccaaaattataaaggacaagatagggcaggaaagggcagtgccaattctgtttcccagaaatgtaatggaatgtcaggaaattaaagcctgttgaaaagaacacacagtgtcctcaagattcctacagtgaatgcagaatcaattccatttccatagcactcccgtttatgctatgaaataaactaaattctgaaactatgattcaataaactcttatcctgccgataatgtaatttagaaaatacaagaaatgccaagtacacttaaatacgttttcctttgacctaacacatgaaacaagtatctacaggctggaagaacattttcccttattggtatgtgagacaacatattcccaaaactgctgttactaccaacagtctagagaaaaatactttctaaacacaaaagcaatggaattagaacctagcagccaaataatatgaatatgagcagcaaagaatttcctcccaaaagtgtatatattaaaaaaaaacaaactatctaaccctttcatatggaaaatgtttacttgaagaaatcaacacaaaataatatgtaataaattcatcagtctctgaaagcccatgaaactgttacatagagcacactataaaaacggttactgtaacagcaagttaagaaatgtggattctaattttggtctcattagatgccctgagttaccaaaatccaatggccttcccctgtgataatggattccaatggtggcgccagcctttgtggatatcctcttcattgtctttcctggtgctggcatctcacagttggcttcacatgccatgccaccaagacagacagccctttctcttgttacccctcaggggcagcgtaccccagcggccacaccccagatctcctctccttcacactctctcccgtggaaaagtcacccacactaccaccatgccagccagctccactctgaagacacttccttcctggcagcagctcagaaatgcaggagcccccggaatcctctcactgtacctctctggggaactgcacctctcttattagattctaagtccttcagggacaaggacactacctaaatcatctttattggaaccacccaactctcctattttgtacctcaaagaactctatctgaagcagtggaaagggcacagtatcactcatatagtatggctggccaaaattacataacctagatctaatcgtggggaaacgtcagacaaactcaaactgaagaacacttgacaaaactggcttctaactcttcaaaaaggtcgatgtcataaaaaatctttaaaaaaggtgaggaaacatgttgtgaaaacaaagagagacaagggatattaaagagacacaacaattaaatgaggcttatgatcatggggaaaattactatgaaggccgttgttgaaaaaactggcaaaatctgaatatgaactatattggactatatcatattgtattaatgttaccttttctgattttgataatcataccatagttatgtaagataattttcttgttcttgggaatacacactaaagtattcaggggaaagggtgtgatgtctatatttcattcccaaattgttcaggaaaggaaaatacaggttgagttatcctaatcccaaaatcccaaaccaaaaatgttccaaaatctgcaactttctgagcaccaacatgatgctcaaaggaaatactggaacgttttagatttttggattaaggatatagaataagcaaatattccaaaattccccctcccccaccaaaacatgaaatccaaaacactcttctaaccccaagcgtttcaggtaagggacagattcaacctgtaccacagagagagtcagacagcaaagatggtaaacacagacagcaatacagcaaaaaaagagatagaggttatctcataaagtgtatatttctaataattttgtgcatgaaacaaggttttgattgggttttgattgtgatctgtcacaggaggtcaggagtggaattttccacttgtggcatcacttcggtgctcaaagcattctggattttgaagcattttagatttcgaattttcagattagagatgctcaacctataatagagcaaacctataataaagtttaaaaggtaataaaataaaataaatataaagcaaatatggcaaaatactaacaactggtgaattgagtaaaagatatatggaggttctttcttgtactagtctcataactcctctttgaattatgaatataaaattccaaacagaaaaattttaaatatattaaacaaacagaaaatatatccaccagcctccacaaccatcagttctcccttcttttttttttttttttttttgagatggagtctcgctctgttgcacaggctggagtgcagtggtgcaatctcagctcactgcaagctccgggtcctaggttcacgccattctcctgcctcagtctcccgagtagctgggactacaggtgcccgccactacacccaactaaattttttaattttttttttttttttagcagagacagggtttcaccgtgttagccaggatggtctcaatctccagacctcgtgatcctcccgcctcggcctcccaaactgctgggattacaggcgtgagccaccacgcccggccacaaccatcagctctcatggcatctggagagctgacacaaggggcaatgaatgacctgcctccctgcctgcagtcatggtgctctcacccccaaacagaagtcaattaacacccagctccaaactcactccaatctcaagaatataggatcagtcctcctcctcctcctcctggtcagagaatctcaaggagtcttgaaaccgagcagttccataattaggttagccactaggtcacattcaaccacaaattccaattttagaaatggggctctgattccatggagcaagccttgctttacactgagttcaccctggtaccctactcagtgcttaagggcatcccagagaggggccttgttttctctcctagttctcttgaacacgggctgcctgtgtactgatgctgactacccacctggacctcactcctgccaccacattttctagcccatcgtttgccagcctgcagggatgtacatacaatctgcaacctggcaccctcgtatttccatctgttgccaactgccaaggccttcccagaagtcctgtgatccccatgtacatctataatctctggatcccagacatccttctctcctcctattaatcccaagtgaacaacaggtgtaggattagcacttctgaatagactaaatgagagctgagtgggagagaagaatacacaattcaaatcaattttttctaaaattaaaaaaaccactttgtccactataatacttaaatttgtagtgagtagattatgtacctctatcaaaggtaagtaaaagctgtaacatgaaaattgcctaagttttatcttaaagaatttcctacttcccagaaacaaaaaatgtctacaacgttgtattcattaacaagaaactttaaagccaaaatggggaggcggggcggggaggggaagcaacactcaggaaattctagagaaaaagtttggaagagatattctaattagtactaacttcacatcaagagaggagaagtattcagaagcagtttatttaaatttcatttactaattgccccgcatatctagacatggaactgagttttcgttttctttttttttttttttttttttttgagacggagtctcgctctgtcgcccaggccggactgcggactgcagtggcgcaatctcggctcactgcaagctccgcttcccgggttcacgccattctcctgcctcagcctcccgagtagctgggactacaggcgcccgccaccgcgcccggctaattttttgtatttttagtagagacggggtttcaccttgttagccaggatggtcccgatctcctgacctcatgatccacccgcctcggcctcccaaagtgctgggattacaggcgtgagccaccgcgcccggcctgaactgaactgagttttctatctatctatctatctatctatctatctatctatctatctatctatctatctatctatctaactttctatctatctgtccatctttctatctatctgtccatccatccatccatccatccatccaggaagcttgctgatttacctattagctttaacaatttggatgggcccgggggctcacaaatataatgagaggccgaagtggtgggtgacttgaggtcaggagtttgagaccagcctggccaatggggtgaaacccagcttctactaaaaatacaaaaataagtcaggcgtgatggcatgcacctgtagtcccagctactcagtagtctgaagtgggaggatcacttgagcctgggaggcagaagctgtagtgaggccagactgcaccactgcactccagcctgggcaacagagcgagactccacctcaacaaaaaaaaaaaacacaacacaaaacaaaaccaacaccaacaataaaactaattttttcacaagttttctcagatttcctatggtgaaaattatactttattaataaatgttcattttttcatttccaaccctcacatattttcttcttcaagtcttaatggatattgaaatcctgctattgtttctggtttcagaggaaaaagtttccacactctgcctttaactatggtgcttgctgtaagtttatggtaagtattctgttagattaaggaaattcattctacaattaattttccttttctaagagtcccctccccaattattacagagcgttgaattttatcaagtgctttttctacattaagatgattgcatgggtacaaaaaaagaatgaatgaataaggtctagtatttgactgtgaaacagggtgaccatagtcaataataatccaattgtacattttaaaataactaaaatagtataattggattgtttttaacacaaaggataaatgcttgagggggtggacaacccattttaccatgatgtgtctataatgcattgtatgcctgtatcaaaacatctcatgtaccacatacatacgctatgtatccacaaaaattaaaaattaagaaaaagatgattgtctatgttttcttcttctatatgtcgaagaggcaacatatgctaacagataaattattaaggcattcttatattctataaatttggacatgcatatttaccttgctagactccgtttgttaacatttcatttaaacattttacattcatgttcataagattgaacctataaattttatttttttaacctggttttataataaaggttttattagcttcataaaatgactcaggggacccataacaactttctctgttctctggaacactggtagaattcacctgtaaagcatgagtctgattcatttttctttttctcttttatttggggggggtccggggaggggggagacagagtttcacttgttacccaggctggagtgcaatggcacaatcttggatcactgcaacctccacctcctgggttcaatagattctcctgcctcagcctcccaagtagctgggattacaggtgtgcaccaccatgcctagctaatattattatttttaatttttttttgagacagaattttgctcttgttgcccaggctggagtacaatggcacaatctcggctcactgcaacctctgcctcctgggttcaagcaattctcctgcctcagcctcccgagtagctggggttacaggtgcacgccaccccacctagctaaatttttgtattattagtagagacggggtttcccatgttggccagactggtcttgaactcctgacctcgggtgatccacctgccttggcctcccaaagtggtgggattacaggcataagccactgcccctggccctttttttttgtatttttagtagagacagggtttcaccatattgatcaagctggtctcaaactcctgacctcaagtgatccaccgcctcagcctcccaatgtgctgggattacaggcatgaaccaccaaacccagcctgatttatttttcttttcggtctaatgagattaaaaaaattatccaatgcaaattataaaaactgcctttaaagggagaaggtatgcagtttttacctatttcctctttcttccaggcggaaatctggatgtaatggccatcactacattgccaaccttgaaacaagagaacagtggcagacaaggtagtaaagggtggacccctgatgactgtgaggtcctagtctaggagtgcttcctttcaaactctgcttacatgagagagaaatgaaagtgatattttatttaagccttttacacagtctctttctgaagcttccagtatttgaagttctcgggtgtgtcttgctgtttgtctcatctgaccacagttaatggtacatggtttcttccgatatttctgacggtgagcttggcattcaaggatattttatctgtggggatcctacaggatcttggatgagggtgtctcccattaaaaaacattttacatatgcttctgccaggtatcttgaagggtttactggcatgagaccactttttatattgccttcttatcctagagttctcatattctgaagggcccagaatcccaaccctaaacaggtgggtttccctgttactcccctctaggttggaaaatgttaacaaactcaatccagcctcaccatgagctactgaaagatcagcttactgctttagttttcagtttctcttaattctttggagctcagctccgcagttaaaagttttgttatgtgttattccattactccaggtaacattcctagatgttatctgacaaagggtttttgaaatgatcaaagggtttttgaaatgatcaaatcaaatgatcaaatgaaaaacaggcttttgtcctgttttattaaagttatcttaacttcagtaggctttgttttccaaaaatacatgtactctcaaccatctccaatattttccatctcaggtaaatgtttctgagaattcaaatgtgatggcagataaaagcaaacaggaaaaaatttgtatccagctctagctgctcatcttcaaaagctacacaaagaccacgagctgtggtgagtggaaaagggaactgttactcaaatgcaagtaaattttagaatgtctcaaattcaaattagttgaaatacaggtgttttagattgttaacttttccacttaagtataaagatttatgttgaggaaaaaaatggtcccaaggtcacagagcaaagtgacagaaaattaagaaataaagacattaaaaataatgaaataaggtttcttaatgttaaagaagaatgttacacataaggaaaagggaataaactagcagaaattctgtagtactggattgaacttggagaatttcacatgaacttatgaatatacacacataaatacaaaactataggtgcaagtgtgtgcattatatatgcgatagatacaaacacacgcactccctagctctgtttctcagaaggtcagagagcagcaacacaaagtaatgagcacacttagcaccaaatctaggctttaaaatatcattctccaaacactgggacaatctgacctcaaaatgaataacaacagcagcaggttataaacaattaaataaaataggaggccattattccgctaaataaatgaataaatcgaaagtttgatgaagatgagatctacacagtcacaaagcaacctcccacaaaatggttattaattaaaaagggaaaaagagacaccgtacaatggcaaaacctggcagacatcacgtccagcaactggtcaaagtgaacattaccagcaactggacaaataagaattgtatactgacaggatacagaagaaaagaacacaaaatttctgtgatacacgatctaactctaataataaggaaacaccataaatgcaaactgagggacagctgggcacagtggcatacaccagtagtcccagctactagggaggctgaggcaggaggatcacttgagcccgggaggatcactgaggggggagggaggatcacttaatctaggctgcagtgcacttaaaccgtacctacgaatagccacctcactctagcctgggcaacataataatactccattgctatttaaaaaaataataacaataacgcaaactgagggacaggatacaaaataattggcctattctcttccaaggtcatgaagccaagaagcaactgaaaaactgttccagatttagggagactaaacaaatatgacaactaaatccataatgccaaacaagatccttctgttgtaggtttttattaggaacaccggcaaaatttgaatagggcctgagaataccatggtaataatattttcattgttaatttcctgattttgagggctgtattgtggttatgtaagaaaatgctcatgttcataggaactacacaaaatactggagtatgaaagagcttcagggtgacaacatactttcaaatgattcagttaataaaggtcttctactctacttacaaggaactattctgttttaaaacaaaataaaatgcacacagtattctaactaccacactaactcttaactcttgctattattaacattattgcagttgtcagtctaggagagagaaagtatagtccctgtaaatgcctcaagtttatgactgctcctgaacataatgatagtaacatataagcctcaacactgctgcaaaactacacttctaggaagaggaagaggagaagggagaaaaggatgagaagaggtgggagaaaagcggacagcctgcaggagatttagccgggcatggtggcccctgcctgtaatcccagcactttgggaggctgaggagggcagatcacgaggtcaagagatggagaccatcctggccaacatggtgaaaccccctctctactaaaaatacaaaaattagctgggagtggtggcgggtgcctgtagtcccagctacttgggaggctgaggcaggagaattgcttgaacccgggaggtggaggttgcagtgagccgagatcacaccactgcactccagcctggcgatagagcgagactccatctcaaaaaaaaaaaaaaaaatcagatatttttcaatcttgtctctaaaagaaaatttgtaattacttctgcaattcccaagaagaaacaaaaaatctgacagtttacagaagttttctgcagggtagctttcatcatccccatcttactgatggagaaacagagtccagaaagtgcatgctttacccatggacacgaggattaagtagcagcacgggactagaacccaggccacccagatccaagaggtgagatcttaccagatggctggaaggatcaagccgtcagattaaatggctagaaggtgttagacaaatgaaaaaagcaactaaggacagtaaagagaggcatataaccacgtccctatggtcatctctttttgtaagctaagaccaatctattttatattttagtttaaccaccgacgctggtgttttagccaaatgcacctaaggcctcctaactggctttatttatgaagacctctgagctgaaatttattgactttattaagtttcttggcagactctggatcagacccttcaaacaaacagagaacacaatgacattacttgcagagtatgctcaccacagaagtaaatctggatgaatcttgttcacatgtacaaaactgaacactccctgagtgcagaaatgtcaaaaacaaactccaaaagcaaagcccaattacctcagggttcaaagtcaggtcaacattagatttaaggctctctcatttttcacaatctcttagtagtttgtattctacttgggcaaaaaattatgccccctaaatttttgcccaattaagttttgttcccgctgagtggagcggctcatacctgtactcccagcactttgggaagctgaggagggaggatcgctgaagcccaggatttagagaccagcctggggaacatagtgagacctcaactagacaaaaaatttaaaaaatgagccagggatgatggcgcacacctgcagtcccagctacttgggaggatgaggcaggaggatcacctgagccaggtaagttgaggctgtggtgagccctgatcacgccactacactccagctgaggcaatagagtgtgaccctgtctcaaaacaaacaaaaaaataagttttgttacttaaatttcatggctagcactaatacagagtcataatcccttatctaaaatccttaggatgagaggtttaccagaattcagaatttttattttagcactacagcaaatatatcacagcatgtaacaccccagcagtgttcatgtaataatccatattccatcatattagtatttttagagtaaaacttacacaaactcacacaaagtgaactgaattaagaatataaatagcctcctatcagttcaggttaggttcagccatcaaatacattttggcaccaaccttggcataaaatttgttagatcttcagaactttcatatttcagaatttaagataagagagtatggatctatattactatagatgctttatcagtattaataagtattctagattaaaaagaatgaaatataagtttatacctaataataacaaagtaattccatgccaattaccaagaaatccattcttcccaaatgttaaaggcaacaaattctagagtacagaacagtcagtcagtttcccactatcacacattattagttcaataagtggtaatccatcaggaacaaaaaaaatcagatccctgacaagatacaacattcagaaatataatgaccaggttagagaaaaaaataaaatgaagctgtacactgaaatttaaaaaggatctatgcaaataaatgtgaaaaaaattccaaaatttcagtgctgttcaatatgctaacaaagtatggaaaattacataaatcaacgtataactacttttggaaaatcagctctgagaaataaacagttccatcttaaggttcactttcaactgctcacttaaagttcctgcattatttaaggagacaacagtcatgaaagtctgcagtcatggaatcactattccttaaatttccagtggactttcctatatgcagtattgcccaggaccattacacaatcagaagaactttgacatttcctttctacattaacttacatacttacctaaataactcagggcactaagagtcagcatacagtacactatgtagccacgactacttactagtcctactcattaaaactgggggaaaactatataggaaaccagcttatcatacagcctcctccctcacaaacgtgaaacaaagacagaaacagaggtaaattctgcaagggtatgcaccctgggaattctaagaactgggctgtgcacagccagtttttctacactctgttaaattagatgcatttttggatcatttgagcagctgtgggaactatagccctaaccccaaacttcagagatataaggaaatgttcgggataacaccagcaagccaaggcagtaggctgcattagctccactgctgcaaatgtctacaacggcctttacacttcaactgtgagaagtttgagatttgcctcaaagtttacttataaatgggcacttaagtatttgttcagttcaagtcatccaacactactcaagcacttaaaacacacaaagcagaaggtggacatagggaacacaagtgtagaagaaaatcagtggtgactagaaaggtcactaagggaagtgattcaggatgcagatcctgtaagtgtgctgctatcatcatgtctctgtgttccttattgcatccatattttaaaacaaacccgatgggatgtattgccctgaaagactgtcagcagcacacaatgaaaaataagaaaagaacttgagtgagtgcctggtttacaaaggtaagttacatattacttttaataagcattcagcaaaacatgtataactaacatttgtaaaaaataattttggttagttgttacaaacctgagagttgaagagttaaaagacaaaagctactttagttaattaatataacttgtgcaacaggaaaactatcaagtgattaaataagcacaatatcactaaaataacatccaattcctttgtatctagagagaaatccaagttcaagcattttacaatttacctgggcaacaggaagacatgagaaggtagccaataaatgcatatgtaaaataaacatttcaaaatatcagatgcttaagaaatattaccactgaccagcttctttatcattggaacacggcatacttttgaaaaaacaaacaaacaaactcaaccatcatagttttctttcttttccttttttttttctttttttctcgagatggagtcttgctctgttgcccaggctgaagtgcagtggggcaatctcggcttactgcaacctccgcctcccgggttaaagcaattctcctgcctcagcctccagagaagctgggattaaaggtgtgtgccaccatgcccagctaatttttgtatttttagtagaaatagggtttcaccacgttggccaggctggtcttaaactcctgacctcacgatccgcccgccttggcctccaaagtgctgggattacaggcgtgacccacctacacctggccaagcatcacagttttctaaaggagaaaaggtactctttgatgagcattatattactatccatacatcaagcactatctagaatctagcttctgatgctgtctagaaaatagcatccaatattgagaggaagagagggagacagacagacagatacactaatgcgagccccaagagagctgtgggcagcttcataaaaccacaacaaaaaacacgttcccttctacccctacgttgactactcaacaacattctaagttttacatacggtttctgaaagtcctctagaaaaatgttctcaataaaatgatacccattttgcctttacacttaatgtagttcttttgctaacttctttgagccaagtattatttattatttatttatttatttattttttattcttttaaaagacagggtgtccctctgtcgcccaggctggagagtgcagtggtgccaacgcagctcactacagccttgacttcccaggctcaagcaatcctcctgcctcagcttcctgagtacctgggaccacaggtgcagcccaccacgtccagttaatttttattttatattttgttgagagaagaggtctcaccattttgcctagctaggctggtctcaaactcctgggctcaagcgctcaagcaatcctcccactgtggcctcctaaggttctaggattacaggcatgagccactgcacctggccggggatgttttatttccttctaaatcttcacatgtataaacatgtcttgggtgtccagagcatatattacttgatcagtggctaacatcctgtttttaaaatccttaataaaatatgcagtcacatgatcaatacagggcaagtatgaatatatacactcataaaaattcttccacgtgctacattaaagtagcatctatgacagacataaaaattgttaaattactctgaccctattgcttctcattttaaaaaaatagtaattcaaactgttacatagatcttaccaagatgttttgagaacttgatgtgtctgactcatactagtagtcttactaaagatatttcagtgtgtgttcctggagttttattaccaagagtgaacaaaacaaatgagtaaccaacaaactttccaaaattacttagtctttttcaatatggtattatggaaggcttgacagaatgtgaatcagggaaataatctaccaattcttaatacttaattcaaaatacagataaactaaaagtatatctttatcccaccttctttcaacccaaattttctcatttttctttttctgaataaaagtaaagagcaaacaaaaagccactttagatgtcaaagacattaattacaactcctcccaaagaagtttactgaaggactctggagtcattttttttaagtatgttactagtgtatgtccagaagcataaactacacacacacacacatacacacacacacaaatgagaaaaggaaaagagttctcaatgaatggacacaagtgactcacttaccttgtctcagggttatatcctaatatgtagaaaaatgaatccactcgggctttaaactctctagcagcaaatatgtcagaaaaatgggagatgttacacttccctctgggaaaaagagaaaaaaataattagtaataccctcaactgcttttgctaaccaaaactggagggggaagggtggaggaagcactgaactaagtccatgtgcatggagaatcggctacaaacaccacactttatttcacctattcagctgtttcatgactgcttcactgtacacctgtgtaatctgactgcttttatatcaccattttactaataaagtaaaattaattaaaacaacaaagataaactggagacaggactatgagaaagaatattaaacaaagtagaaatggagaaaaattaaaaccattgtgaatataagaaaaactcagtttaaagcctttctaaatcataaaaaaaaatgagcctttcttcctactatattatgataggcagaaagtttaactgtttaaagctaaaatgtggaatatttgacatgtctttggaatacagcttctggccaataaacatttttcttctcctgcaatgtgcaacaaataaagttacttggaaattaaaacctagagaaattttaacttttttgcataaacatgggccccaatatacaaggagttttcaaattttggggtaactttaaatggctataaggttagaaatcactttcccatagaaatactaaaataaagtggagtaaagttttcaggttcatttaccacctaaagttaaaccaacctgtagttgaaaaccctacaatacttactccaaaacggcttaagcaatgtttccatgcaccaagtatcaacgtaaatgccagaagcattatatcacgtggtgaggcctaacttccaaatccaaacacacacacgcacacatacactcactccaggattcccaaagaggcaggggaggcttaagaactctaactccctcctggtcactttaatgccaagtggaagccaaaggctacagtgaggttagatggaaatggaggaccaaaagttcccatttcatatcaaaagccgtgcagcatacttccaggacgtggcctcccactgcttgagcaggctatctgttgtgataagaactccatgagtatgcacggtaacaacatacacaccagctaatggccacagtgttaggaagagaagctggctgaggggttatcagcgtgggttcattcattcacttcctaccaagaaattaaaaagcaaggttcttctttaccttaagggcttaagtacctgtaaccaaagcagggtcagccaggcacagtgacttcacacctgtaatcccagcactttgggaggctacgacaggaggattatttgaggccaggaattcaagaaaaacttgggcaacattagttgagaccccatctcaccacacctggttaattttaaaattttttgtagatgggagtctcactaggttgcccaggctggtctcaaactcctggcttcaagtgatcctcctgccctggcctcccaaagcactgggattataggtgtgaaccactgcacccagcccccatctccattttttaaattaaataacaatgctgttgatataaagtccctttggcaactatagattagaaagtatctatagttctatagaatagaagctacagaatagaaagtattccagggttactgagcacttcaaacaacactgataaaactgagaactgaatttaaaattttatttgatcttaacaaataaattatttgatcttatgtaaatctaaatagctacgtatggctactagctaccatagtgaacaacacagatttataagacatttccatcacagcagaaagttctattagaagtgctatagtattcatacctactatttgtagatagtaagatccaattcaaggaaaaatacagactaagcatcaacttcccaggcccagaactgcctcttctagtatttaactagaactaaaataagcttctgggaaagaaaatgcaggtatgatcttttttacaaatgaacaactagctcactttgaaaccactcatccatacaaggtgatttaatccccgaaagccagaagaaataggttcctttagcagtaaaatagagataacacctactgcacttataaagacaaagcctacaaaactctactacacaatgctatgtaaagtaagttattcctattattgtacattactaaaggaaattgattcttcttttattattgttcgttatttcactcttaaactggagtaattaatgtatcaattaaaggtaaagaaaacccttaactctaaacacaaccactagaaatcaggtatgtttagggcagggtttatcaatcttggcactaatgacagtttgtactaaataattatttattgtcagaggctgtcctgtacattgtaggatatttaagagcatccttggcctctacctagaagcacccatacacatttcttcctcacaacaaaaaatgtctcaagacttgccaaatgtctcctgtgagggaagaaactactggcttacagaaagccaaaagcaacaggaatagaagcatttcatctgataaatgattatgaagttgtcgtaaatgggatttttctctaccatcaagccctttctctatttgattctgtttgtatatgtgaaaggtactgacatttaaacatttcacttttttatcctttcttatgcttctaattgcactgtacctctaatacaatgtggaaagagtgaacatccttggctagttcctgatgtcagtggaaatgtctctcatgtgttcctattaaatatgacactagctttacagacaatcaaaccataatcatagtattggaaataattgactggtttcctcctttagagttaatagtttgatatatgctatcaatagagtgaaaacctgaaccaaccttgcattcctggaataaatcccagctggtcataatgtattttttaaacaaggtattaaatttttaaaaaacaaaaagaatttggttaactacatctaagttttcttcctcccaaatttgtttttatctttattatttccttctttgtacatttttattgttgctattattcatgaaaggtttattcataatagcctaggaacaacccaaatgtgcagcaacagggaaataaacaaatcgtatatatgtacaataaaatactacacaaagatctagtgatacataaaataccatggacaaatctcaaaaattaaatgttgagtataagaagccagacacaaaaacagtatacactgcatgattccacttatatgagctttagaagaggaaaaaataatttatagtgagagaaacctgaacagttggtgattttgggtgggaagtttttagagggaaggatcttgagggaacttcctgagatgaggggaatatgccaggtcttgtttagggtcaaacacatttctgaaaatgtacacttaaaatctacattgtactgtatattaaaaaactactagaggaaagtaaaacaatgagaatcattaccatatagctgtagccatatggtaatgattcataatcttgccagttagccagccctcaaacactgagtattgagcagagctgaagaaagggtttccataaccaggtaaggccaccaggattggctctgactgggtggcacccatttgaagtattttacaaatcaactcgtgatgaacagtgtttacctttaaaaatgtgtgtatatgtgtgcagaagtatgggtatgattttaagtattcagtgttttttatcagagcactcttctcaccatgatctctgtcaaaagtaggacattatttgacattgtttacagaatagatgaggagggaccgttaagagaaaattgccatcacatccaccttgctgaaataaccagttccagagcctcctaaagtcttgtatactctgtatctaaagcaatgcttcactgttaacagaaatatgactaaagacagggaagccccatgtgttagcatcctttcattcaacagtaaaaaaggcgtcccggaaatgactcatttcagtaatccttccgagtggggcgggccccagagagttttacacctggggcatcatccgaagggtcttctggctaccaagaggaggtggctatatgaaaaggatgaagaagagacaagagagcccctcttaagtaaggagacaatacaaatgaaaactgtggcctagaaattcactctcttaaaattaccaataactgggaaggtcttcccgtatccccaggcatgcgcaaactccaaagactcaggacaacgtgcacgagcacacacagaatgtttacagtagcaaatctgttgaaagctattattatcattattaagatggagtcttaagaataaaaaattattaataataaaaaataaattattaataaaaaattcttttttttttttttttgagacagagtctcactctgacacccagactggagtgcaatggcgtgatctcgactcactgcaacctccgcctcccgggttcaagcaattctcctgcttcagcctcccgagtagctgggattacagacgcgtgccaccacacccggctaactttttatatttttagtagagacgaggtttcactgtgttggccaggattgtcttgatctcctgacctcgtgatctgcctgcctcagcctcccaaagtgctgggattacaggtgcaagctaccatacccagtctttttttttttttttttttttttttgagatagggtctccctctgtcacttgggctgaagtgcagcggtttgatctcagctcactgaagactcaacttcccaggctcacgtgattcttccagctcagccttcccggtagctgggactacaggtgcgtgccaccacacccaacaattttttgtagagctggggtttcaccatactgcccaggctggtctcagactcctgggctcaagcaatctgcccagcttggcctctcaaaatgttgggactacaggtgtgggccaccatgcctggacaaaaataaataaataaaaataaaaataaataaaaatatatatatataattttagtttgtacttccccttttgcccaggagttgcttaacaggaagttttaaatttccaggtgaaagggtcttctgttctttgttttccttagtaaactacaattttattgcattttaatcggaatgattttttttctgtgatctaatatatgaccaatttttgagaaggtggcaagatacacaaatcaatgtgtattctttattattacaggatagagttcaaagtatgtctgtaggccaggtgtggtggcttacacctgtaattccagcactttgggaggtcgaggtgggcagatcacaagaggtcaggagttcaagaccagcctggccaacatagtgaaaccttgtctctactaaaaatacaaagattagctgtgcatggtggtgggcgtctgtaatgccagctactttggaggctgaggcaggagaatcgtttgaacctgggaagcagaggttgcagtgagccaagatggcgccactacaaggatgggcgacagagcaagacttcgtctcaaaacaaaacaaaaaaaaaaaacaaaaaaaattaagattattagcttagggggaaaaagtccaaaactgtacaaaatctgtaacaaggaagatttttaaacactcctgaaagacaaaaaaggggatatgaacaatggtaaaacatccatgttcttagataggaaaactcaaactggcatttctccacagattaattaataaatccaatacaatcccagtacaaataccaacaagctttttttttaaaaaaaaaaaaacaaaatattaagcttcacatggaaaaacaaataactaaaaaagaggggaacatatattaaaacatactataaagcctctgtaattcagagtgtagtgctgacacatagacaatagaacaacaaaacaaaaaagcaagtacaaaatacatatggaaagcaagacaatggtgacatctcaaaccactacaatcaacataggtattttaataagtaatcctagaacaactgggtagaattattttttaaatatggtgtagggaaaggctttctaactatgactcaaaatccagaggcaataaaagactgataaatttgattagataaaaatacattttacacaataaaaaatacaacaaataaaattaaatgaaaactgacaaaagtgggagaaaaatatttgcaacaattgccatgtaccacggttgtataaagcactttttaaaagtaaaacaaaaagaaaacccaatagaaaatacataaacagacaatttacaaaaaagagacaaaaatatccttcaaacatatgaaaaaatgttcaaactcattgttagtgaaataaaataaaaacatggagataacacttctcacctatcagacttgtaaaaatttaaaaagacaaaacattctattaggaaaacaggctgcttcatacttatcagaaggaacacaaattggtacatgccagctgaagggaaatttggtaatatgtaacaaaccgcataggcataaacctttcaacccagcaatcccactattataaatgcaccctgacgttcccaatgataagaaaatatatatgcacaaagatattcattgcagcatcatttataattgcaaaatcctaggaacaacgtaaatgctcatgcacaagagagcagttatatcaactacagtatatcaacataaggaagtaaaagagaatgagaaagtcctctatgaactgataagagcaattcccacaatatactgtcatcaagtgaaaagagcaaagtacaaaagaccatctacagtattctacccttcatataagaaagacggggttttaagaaaagaggcatgtatctgctgatttgtgaaaagaaaatgctggaaggatgatccagcaagtaaaatgatcagtaacctagagcagcaaggtgggagcgaagagggaaagaagtagaggatgggaacatggtggcagggttgaagagtatcttcttataaccctgactcttagaaccacagcaatagtccacatgctctcacacacccataaaataaacagtccaggtcaacaaggagaaaccaaaaataggatgtaaacagcaacaaatgaacctaaatgtattacaaataaacaaatgcacataaggaggtaagaaagaacagaactgacctaagtaagaggaaaagcagtatttggcactataagaccgaaaacaaaaagagtcaataaacgggtttctcaccaagacgtgggttacaaattctgaaactaagttgtatgcatttgagaattaaacaaaaacaagtaagtatattttagacaatgagaactgagtttcttctgtgttggagaaagcagttataaataacggaaagtgaagaataaaatcttcaggccaggcccagtggctcacgcctgtaatcccagcacctcgggaggctgaggcgggtggatccggaggtcaggagctcaagaccaacctggccaagatggtgaaaccccatctctactaaaaatacaaaaaaattggccaggtgtgggggtgggtgcctgtaatctcagccactcgggaggctgaagcagagaattgcatgaacccaggaggcagaggttgcagtgagctgagatcacgccactgcactccagcctgggcaacagagcaagactctgtctcaaaaaaaataaaataaaatcttctagtgttggactggaattgaaattaatataaccttacaagtctggagttaggggaagttaataggcacaggctggtatacatacacatcctagctctgcctgctaactggatctagaaacaatgatatccagtagtaacacacatgcctaatacccagatcttggtttctaaacactgctctccactaaagggaaccccggttcctcacagaatggctaattccagcgctggaagttagaaaataaaaaacgagcctgagaacatcttgtggagctagaaataagaaagtgctcaaaaaaatacagaagtttgctgataaagtgcaggggccaatctgaagtagctcctaatggccaaagctgggcaataaaacaaaaaataataaattataacaaaacaaaataaatatccgtaagttcatgctgatgtaaatactcaaatagatttatgggataaaagggagatttctttactacagtggaattccaattaataagtgtagaagaaaagaaaaaaaaatgaaaaaccaccataggcaagcttcacaaaagtaacttttacaggtgaaatccactgataggtgcttaaaatcactgggtgaaaatttaaggagataaatgatttgcagagtgtcaaagtatctcccaggttaattaagcacaggggaaaatctgctttacagtgaagaaacctggcagaagccacattcatcaagtggacaaggtcaatgtcaccagtaattagacattatcaacctcatgaagcccatgataagatgcactcagaaacatgtaatttctgtggttcttgcccaaaatgcctaacttcagaaaagccaaattgagggacatttgacaaaacaattgatcaataatatttacaataccaaggaaggtcatgaatggtaaggaaagactggagaaccattacacactgcaggagactaaggagaaataattaaatgcaatgtgggatcccatataagatcctagaacaacaacgaggacattgctgaaaatcaaagagaatctttagtctaatgctattgtatcaatgttaattccctggttctgataactgtactatagttgtagaagaagttcacattgtgggaggttaggggagggatatattgaacctgagtacttgtaactttgctgtgtgtctaaaaatagctccaaataaaagaaagtttttcaaatactatgaagtactcaagggcagacggaatatcttactgggtaggttcccatcaccaaatatagagcccttcatctactagtagattaataaaaagtgttaaatgatgaatgaataaataaagcaattgacaggttatgatgtctaatgaagtactaagcatgtatagacaaaacaataaaaatgctgtaggtcaaagttatttcacatataaaaacaactgtagattaaagccagataaggattcttaaactgcaaaactaagagctctgagacaccatgaaactccttacagaacttgcaggagctaaagggtgttttttgttgttgttgttgttgttgttttttgttttttttgagacagagtctcgctctgtcacccaggctggagtgcagtggcacgatcttggctcactgcaacctctgcctcccaggttaaagcgattctcctgcctcagtctccctagtacctgggactacaggcaccagccaccacactcggctaattttttgtatttttagtagagacggggttttgccatgttggccaggctggtcttgaactcctgacctcaggtgatctgcccaccttggcctcccaaagtgctgggattacaggcgtgagccaccgtgcccggccactaaaggatttttaaatgttttaaggaatggttgggaaactgtccacagatgtgactaatctgtttcaagccctaaacatatacatgaacctagttgctcataacaaagtagggagataaattaatttataatgaaaagaaacagactggaagcctcaaacagctaatttagggctccttggccctggtcttccagaaaattcatcctaaagcatcttcctataataggagcccctgggtaaaatgacagcctataacctgacctgcagtaggatatttctttccccaagtgactcctccaaataggaagcaggtaatcagaaagctggaaaacagtcctcagtcagcaagacacttacgatctcctgtgctgccctccacaatcaatactggagaatgcactgatgcgagtacacaataaacccaagaatgttccccaggtcacatgtcctcagtccaatcacaaagcaatcactccagatccttggatccttaataaaacattatccttaggggagaaaaagtagcacagaaaacaaattacaagttacaagtttatctgctcgttcttggagtgtgttgagatagctccctaagctgaactcttctccatatacctgaaggaatctaaatatctaatccctcctccgccaacaggccacagagaaatagtaaaataagtgtatgctgagtgattacaccatcattaactcagtacaaaattacacttaatttcactttttcttttcttccacttatacttttaagaactcagcagaaattcaatgagctatggagtgtactacacatgttactagggcctgagatgctctttgagggactttcacactccttaccatactggatgtggaaccagatgtgtgtgtttggttcaggattctgtcattagtcatgtgaccttgaacaagtttgtcaaaggttagctcaaacgttaaaaaacgtgacactggccacaaggctacagcagagccaggactcaaacacaagtcctctaacttcagtctattataccacaatgccagccaaaaattcttacccgggaataaacagaactcaaaaaatattcaaaatgctaactttactctatggtggttatggataaagtgtgatgaaataagatcagcagctgtagaaacttaccttgaaaggtagagataagggatagctaaggtcaagaattcaaaactaacagcaatgcagtaatgctgaacttcaacacacatttctacaactgcgaagggctcagattttcttataggaagaaactctggtaggaaaaagctataatctcacaatttacaaagaaactacagggcattttgttttccttttgattcaccatggctaaaggataaagctctctctcctcctttataacccaactctagcaccagcttgaaagcaaaccttatacatcagtttcctcctgagtgaatggaatggcaagagccccctcagagttactgtgaccggatgaaaccacacaaccgagccctttgatcttcaagaagaatggtgctaagcactaacatgatcagtctttttcttttttcttttttgttccccatggtttttttcattacatttgtttgatcccttttcatgtgcccacagactattttatttgtatctctctcaaaattgaatttatttttagtagtactggtttataactatggagaaagaataaattatttctgtgaataaactatgagaagaaaattggaaaaaaaaggtaaagcttaactttaaccatcccccaccaaatacaccccaaacattttttaagctaatctaccttcgtgaagagaaagagaacaaacagagactgctggggggcactgccatcccattctgttttatgggagtaatgggacaggcaaagcttctttcacagtgagcgctgctgccaagagcgaggccggatcactaagtgacagcaacgcgaccctgcaccattagggaagtgcgtccacacacacgtgtgaccctgcaccactgggccagcacgtccacacacacacaaaactgcaccactaggccagtgcgttcacacacacgtgacaccacaccactaggccagcaagtccacaaacactcatgacaccacaccagtaggccagctcgtccacacacatgtgtgcaacactgcaccactaggccagcatgtccacacacacgtgacacaccagtaggccagtgtgtccacatatacgcgtgcaacacagcaccactaggccagtacatccacaaacaatcgtgacaccacacaagtaggccagtgcatccacacatgcgtgtgcgacacaccactaggccagtgcgtccacacacacgtgcaaaattgcaccattaggccagcatgtccacatgcatatgagacactgcaccattaagccagtgcgtccacacacacgtgacactacactactaggccggcacgtccacacactcatgcaaaattgcaccactaggccagcacatccacacacacacgtaaaattgcaccattaggccagcgcgtccacatgcacgagacactgcaccacaaagccagcgtgtccacacacacgtgacactgcaccactggatcagcacatccacacactcacgcgacactgcaccattaggccagcttgttcagtgaccaaacaaccacctgtcatctgatgtctttgaaaaaaatccaagtcacaaaaggatgttgtatttgacacttacaaaatcaaattcaaggtaaaagttttataaagcagctaccactttttatgaccactttaaagaaaacaccacaggagaaaaaaaaactaattaatgaggattataattatatacccagtgaaaagaagataaagtattaccactgtagcactccagctgtggtggccagtgaaaggacagtgacttacacatttacacatctccaagaaacatctgattgtaaacttagctacagtaaattcatggaaatcagatggaattatttaggataacttgttcttctaaaaatgctaaagataaaaatgggccagacgtggtggctcatgcctgtaatcccagcactttgggaggctgaggtgggtgatcacttgaggtcaggagttcaagaccagcctggccaagatggtgaaaccctgtctctactaaaaatacaaaaattagctgggcatcgtggcacatgcctgtagtcccagctactcgggagactgaggtaggagaatgaatcacttgaacccaggaggcggaggttgcagtaaagtgagccaagatcaagccactgagctccagcctgggtgacagagcaacaccccgtctcagaaaaaaagattctacaaatctcaataccaatgataagtactcaaatatgttgattttaagcatttatgtcaaaacatgttgaatacagttacatatctcacatatttgttcaactgaaactctaaatcgattaaaatcttttccctcaacccgtgagacaagacggaaacaggaaggaaagagtatgcaaaccagtgtaagaagtattccaggatttggctgagtgcggtggttcacacttgcaatcccagcactttgggaggtcaaagtgggtggattgcttaagtttaggagttcaagaccagcctgggcaagatggtaaaagctcatctctatgaaaaatacaaaaattagccaggtgtggtggtgcacacctgtagtcccagctacttggggaggtaggattgcctgagcccaggagtttgaggctgcagtgagccataatctcaccactgcactccaggctggacaacagagcgagatcctgtctcaaaaaaaaaaaaaaaaaaaagacaagaaatattccaggattaagtcatcggtcccagctaacaatattccaggattaagtcaccggtcccaggtaacaatattccaggattaagtcaccggtcccagctaacaatattccaggattaagtcaccagtcccagctaacaatattccaggattaagtcactggtcccagctaacaatattccaggattaagtcactggtcccaggtaacaatttaactgttccatcaatataatcaaccctgcattaacttcctttgttcagcaagtgagcttaagcttggaaagccaatcttaaaagtcacacaaagcttgtggaagttcacaagaagtttataaaacactgagaaactctctaaattcatctaaattcctgtaagaagtcaaacctaactacatccatgccataccccacagcagagttggcaaactatggccagaaaagccatatctggcacaccgcctgcttcctgtggcctgagagaagagttttcccatttttaaatggctgaaaaagaaagcaaaagaagaatatttcctgacacatgaaaattaaatgaaactcaaatttcaatatccatcaagttttactgcagcccagccacttcatttatttccatgttgtctattgcttttatgccacaatggctgagctgagtcactgcaacagataccatgtgaaacatcagctgacccgaaaagcttgccaaagcctgccctaaagttgctactaatttaccttgaaataactgactttagctatgtagctttgcaaaaaagactccaggtggttttcctgaataccatctgagcatcagaatggagaaattattgtaactcattgtagttttaagataaaagctaccaaaatcctagtattttgttaaaaccatattacagtacttaacaaaaaaaaagtagtctttcaccactttatttccagtgaggaaagggttttaagaatatcagtagtcttacttcctataccacttaaaaggcacaaagtcagccatacacacacaaaatgagccattatgggcatccttttcttgaaagagacagaaaatacccaaagatgcaaatgtcatggtcatttttttgacataatttctgaagacattatgactggctggaatgttaccttctgcctcagaatgaaatcttcaatatctttctacccatctcctccccctgccaatgaagctgtatagtaggaaatttttcagacatacagaaaatggaagaatagttcaatgaaaatctctataaattttgcctgggttctcaagtaattacacgctgccatatctgcttcatccatttctctgtcttttctagtggcaggaattaaatctttagaaagtaaactgcagaccatcagaacactttttcccacctcagcttcccaaaatgccaggattacagatgtgagccaccacacctggcccatcggaacatttcacccacatacttcagcaaacaataccaggataataatttccaaggaaatgaagatacaataatatagaaacagcattaaaaagtaaattatcaaaaaaaaaaaagagagagagaagtaaagctagattagtgaagacacggagaacctctgcaatctcaacaatccagagcggacactggcatgttcactgaggccaaaagaggagtctgattaatacagtgactactaaaagatcaggagaaattactctccacctcctgcactcagtgactcctccttcacatggaagagcacgtctccagtacttacctaagggcagcagcatggtaagtgtcaacgtaatcagaaatgaagagctctcggttcttgataactgggtctgtaatgacaagttctcttccagagtctgtcaaaaaattaattaagacgacattaaaactgagtttcccaaaacaagtaaaaaaaatttgtaaaacttttctttcacgtttaccacccactaaataaccgggcctggttagcatcgttaagtatgcaaaatagagaagaggaatcataaattgcaagaataacaataacagaatgtacagtttttgtcaacaaagtatcttcttggctatgttttataccccttagtaagaccctatattttgccaaaatggattaagcacaaatggaaaaagaagaaaaacaactatcttatcctagcacctccttcaactaccaaaatacttagtgatcctgtcttatttttcttgctaaatattacaaaatggagtgaacttacacagtttccattgataagaatatttttaacaaggaactataatttacacgctttaacagaggtttttttatagtttcaaagaaggaaaaaaaaaaaacagaaagataaaaaaagaacatcattcttccaagctgtttttcattggtttgttgactgtgagaaaagtggagcaggatcagggccaggcaaagtttgatgccagcgccagcactgccacttagacaatgcatggccccagcaacgtccttagcatctctcaacctcagtttcctcatctggaactagagagggacagacccacctcacgtgactaactggtagccaatgtgaatcatcaagcataaggcctaccaacactccaaaatccatttttcaaaaagttatcttcatttaatgaaatgtctttagaaagaactttgcccaaagctaagaaacacacaaatcaaaccacaaggacatatttaccattttcattatgtcgatcctgaaccaaatgctgatacacagaatctggaacctcagattgacggtagtaccatttgacgttcatgaggagatggtccctcttactctgaaaaggaaaatctaacagcattaggaacaggatttcaggtggccacaagtgcatatcatacccatgaccaaaagcccctgtaaacgggtggacacgtagatagggagagacacaattaccatcaggaccacaacaatacataagtcagttatgaggtcaagttttgttttttaaaaacacccatcaatagatccctctcaccttacccctctaaactgcttatttcaggaaacaaaaggagaccagtcttgaatctgtttatctccccagtttaactaatccattcaaaattacatttttatttaacattaactatacaatactacattaatatatccttctattttaatctttaatcattttggtaaatatttagagtcagtgttagctgactgtcaaggctcattaagggcaataaggctagaaagaacttaccccacaaggcctggcacaaaataatctcttctccaaggtttgcctattacccagactaaatcagattctccttccactgtttagccacagttattgttaagtgccaaatgaatatagcgaagaatgggtggtgatgaaggtactatgagtccagagacctcatctcatttatttccgaatctccagataatagaacatcttgtataaaattatttgtgaataatgaagaattttatgattatcacataaatgatcctgtaaatgtttgtaggacactgcactatgttatccctaaaagttaattttgttcccagtttgttcagagaataaaggatcaaatattgcccttccattagcaagttatggggctgcagcttgcaaaagatcatctctgtggctggtcaagaaatagctcaacagggagtgcactgaggttccctgcggcctcctaaaatacttttccaacccatgtgcggccttaacaggcttctccaaggtgaatgcagtatcatgcctttcagcagcctctacgttctcatcacaggcccgttggtcagtaatgaatgagagctaaaattcaagaaatgcctcatgtttataaaggggatgcctaaatcctaaaatatgataaaagagccctcattaatgaaggaagatgcttcctgctttaacgagcaagtcacaaatatagccaacactaaaacaccaggaaggttccaaaaaacctttgctaaaaaacacttaaaagccatttaaagaatcagaaagatgacaattgccacaagtttcaacagaactcaaatgtgaagatgtgttatttcttttttttttccttttcttttttttttttttgagaaggagcctcactgtgtcgcccaggctggagtgcagtggcgtgatctcggctcactgcaacctccacctcctaggttcaaacgattctcctgcctcagcctcccaagtagctgggattataggtgtgtgccaccatgcccagctattttttgtatttttagtagagacatgttttgacaatgttggccagactggtcaggaactcctgacctcaggtgatccatccacccacctcggcctcccaatctgctgggatttcaagcatgagccaccacgccggccgaaaatgtgctgttttaaagtaaatacaaaaattagccgggtatggtggggcatgcctataatcccagctactcaggaggctgaggcaggagaattgcttgaacctgggaggcggaagttgaggtgagccaagatcgtgccattgcactccagcctgggcaacaagagcaaaactccagctcaaaaaaaaaaaaaaaaaaaaaaaacagaacaaaacaaaacaaaaaaccaaagtaaataacataaataccaagattctttttttgcatttaactgtgccaaatacacatgcctacaaaaatacggcatcatcactggtttaattacactttatacatagaataatcctacatgatgagtactctttaatatttatgcattttatgcctttatattaaaatttctgatggcaaaaaaaactttctacactgtttatgcttcagatgggaaaaagaggacataccagtatgttaaataaatagaataaatgttacatgtagcagtttagagaaataattactttcagcaggggattatggatgtgctaacatctgacttgagaaaaaatgggagagatttcaatgaattttttcattgaaataaagatagacaaactactgaacatatccagaccccacagtccatctgcatgcatcaacgaagccattctggggaaatatggagaagaacctgagtcctgactctgtctggcctttagtgagcttacaggacaactggagttttctaactctattgctgaccaaatacacaggcagcaagggacaaatcgccaggacatgggagagcagctagaaagtgtaggagatcaggatataccacctcaaaatatgctctctggcacaaggattatttagccaagaacttaagaggggtagaggaaaaattatattttgtctccaagaaaacttagtttcttccctcggcaggataataaaaagcaggaccaggataagattactcattatagaaaaaatatatataaaccaggggaagaagcagcacctgtttggcagtgcttggggatgcattcagttaaaatacgctgtctataataaggacttgctcaacctcagcactactgacatttgggccagaggattctttgttgtggggatctgcctgtgcactgttagatgcttatgacatccccggcttctaaccactaattgccagtagcacccatcgtccagttctgacaaccaaaactgtctctaaacattgctaaatctcccctgtggggacaaaattgtccctagttgagaaatcactggtctagtaattcattttgttttgttttttaaggaaaacaaaatcagaatggcaaaaataaaacctggttcgagcactacagggtagggaagatggcctactggaaagaagatgggaaggcctgtggccccctccaatctcaattccatgacttcccatgtatgtgacttggggcacattaccgagattctcccaatctccccttttctgtaaaaaggagatactgaaatctacctaaaataattactgaaagaatagaaaagacagaaagcatctagaactgagtaggtgctcaatgaatattgtttcctctattggtaggtgattgtaaccaatagttcacagaaaaatctgaagaactgtgccgagaagtgtgggagttacttcttcaccagaacttggtttcctacaagggatgatagtgatctctagtcactgagctactaatacatgcttcagtgctcacagaaatgtattacttcactgagcatacaggagtccagatctactagcactcctaacaacaatcttttaaaatctaccatctatgtatttctgcaacacatttaagacatctgaaaacctgaagggcaacagaaataccttttagatacagtaactcaaatttgtacaatgtctatctttcagaaccaagccagggatactggtgatcttctgaagtacaatatctatgttatcttatggtgtaggaatacctactgattacacacacaaataaattaactgctttggtttatttgtacctagatgtatgactcctaatattatactttacaatggcagtgaaggaactattggattccccaatgcagtactatgcaataaccagggagtggcagcattgtgctgaaaagacttcacaatcaattccacagataaaacacacaaaggtagactggaagtaaacaacaatttgaaacaaatttaagtagctgtaatatccacaatctttctaaataggccggtaacttaattaaaaatgaaaagtccataaagggaggcagtgtgtggtttcagcagtactagattacaattaggtaatctaggattacagttcagtctgcaactgctagttgcaacctgagtggagtcccccaaccctatgaaaagtgaaggggtggaacaaaattgtttctatgctctctttccattcttacatgtttatatctagatttcctcctcaaacaaaaccaagtagataaaatgatgctgtgggagaatctctaattttttctctgtatctgtgcaatggcactggctaacggtgccatcctaaaggtttacaaattaaaatgtcaccttcagtggaagctggccactgctataatactgagggaagaagagagcatcccctccctgagtaagtgttcccagagctacctcagacacaaaagtattgctagaaagttagacacaggtaattatgtaattcctactactcactagttgaagaattttgttcaaaatcacagaaaattaaagccagacgtgaatttagagatcatgcgattcaagcaaaactgtctaagtttgaatcctggctctgcaacttactaagctatgtgactttgggcaagtaacttctccaagcctcaatgctctcatatacaaaatgggagaaaaccaagtttctaccttatttggttgtgaggattaaataaattaatataaagcaagtggatgagctcaaaaaatgtcagatattactatcattgttttacagaaaaagagagcagcaaagatagagagaaaagaggtcccttaaagtttttgcttttctaagattcaaaattatgttagtaatagtgtcatacagcaaattaagaggaaaatgtcttcatttttccaacaattctagaagcttgtcaagaatttctcaacaaataagcctcattttttactaccaatataatttaacaatggcataaatgtcaaaatgtttataaataatatatttcaaacagaatgcagaataaagagggaagtgaagcttcctgtgtgaaagcaccctagggtgtacttctgaatagtaagaggagaccactgggaagtaaataacttctcaccagtttgtttgtttgtttgtttgtttgtttagagacaaggtctcactctgttacccaggctggagtgcaatggcaccatcatggctcactgcagcctcgacctcccaggctcaagtgatcctcccgcctcagcctcctgagtaagtaggaacacaggcacccagctaatttttaaaatttttttgtagaggtggacatcttgctatgttttaagccactaaacaggagcacatccaatctgcttaacaataaagtttcaggactctgggcaaaaaaaaggggagggggagttgtttctgggctaaattatagaccctggctggatttctcttgaaatgaagaacatatgtcgatttaaggagattaatagaggacaaaatccatcccccaaatctgggcttagaaaaaagatccttatggtagctatctgggagcagaatagcaaagatttctacacatctttgaataacagacaatagtctgttgagatttaacaaatttaaaataactgaaatgaaacactcagaactagataactgacaagcggtagactaggggaaaaggaaggcaatggaaacaggcaaggccaagaaaaagttgctgttgaagggcaactgtgttgtcatcagcaacacacaacacagtctgcccaaacacagacacagggtctaacgttgagatggaaacttcctttcctagagatctttcatgattattaatttagtgttttatcaatttaaatagcctgagtctttcctagaaacagtcttaatatcagcctcagggcaatgtttttccacaacataaaaatagtaataataatcgagggggtatctggatagttcataaataccaataggactagggcagagagagagagagagtccttcacacagaggtggcctgcaagccagacagaacaactgtaaattcacctacgatacagaggaaagagcttctttgtcccactgatcaccagctgatgatacctgccaccagctcacagcagggattatcaggtccccaaagcctccaaaacagaccactcctgtccctctgtgttatcaaatgtgacagagatatcaaggccaaagacagcctcaacagagtacaaagatggatattagcaaataaataactttgccaagtcaaaacaatctgctggagagaagaggagtaacctcctgcatatatttaactgcttagtcatgggggctcttgattcagaaccaagtgaaatcagatcaaaattcttactctataagccaatatagccaaccaagtttctccagaaatttgggatgaagtggctaacatgtgtatactgtatggcttaaaaagatactttctgaagaaacttttcatgcatttccacaacatggtgataataaggttaagagttgtctgaacattagaggtttactgtataattcagaaatgtatacataaaacttttaattggtagtcagacactaattaagcatacagaggggggaacaccgtctcccagagacatcactatctcccttcaagtgtgctcaccaaccagtttaaagaggcattaactctgccagttgagcccacctccacttacaggacaatgactgttagacgtgtcaccttagctaagaccttggggacacagtcataatggctttgatcattcctgacttcaagggagaagggtagggacagacaatggggtcaaagatcactattcttcaaagatcaaagctaactccagatacagactgagtaacctcttatccaaaatacctgggaccagaggtgtttctgatttcagaattttctagattttggaatctttgggtatacataatgagatatcttggggatgggacccaagtctaaacacaaaatttatttatgtttcatataaacctcatacacatagcctgagggtaattatataaaacattttaataatatatgcagcctgtcacaaaggtcagatgtggaattttctacttactgcatcatgtcagcactcaaaaagttatggattttcaaattagagatgcccaacctgtatttatttacacaggtaaatcaaaactaaagataagctttctgtaccagtcatagttacccaacttcatggataaatatctgaaattaaatttaattcaattaaaatgaaattagatccaggaatcccacttctgtgaatttaccaaaatatttaaaatcagtttgtcaaagagaagcctgcactcccaagtttatcacagtactattcacaataaacaagttagggaatcaacctcagtgcctatcaacaatgaatggagacagaaaatgtggtgtgtgtgtatgtatgtgtgtgtatatgtgtatgtgtgtgtgtgtgtgtgtgtgtgtgtgtgtgtgtgtgtatatatatatataaaactactattcagtctttaaaaagaagactcctgtcatctgcaacaacatgaattgaactggagaatattatgctaagttaaataagccaggaattgaaagacaaataccacatgtgcttattacatgtggactcaaacaacccaactcacagaagtgaagagaagtggttacagaggctgggcagtggggggaatggggagctaatgctcaaagggtacaaaatctcagtaaagaagaataactgggttttttaaatgatcgactgcacaacatgattaatatagttaataacagtgtattgtacatttcaaaattggtaagagagtaaatttcaaatgttgccatcataaaaaatgataattagcttgaattattctacattgtattaatgaatcatacatcattttgtactccatacatatatacaattataagttgtcagcttacaacaaaatgaaattttaaaaatgaaattagataggaaatatcttgtaatatttcaagcctctaccctatttaacataagactctaagaatgcccgggcaccgtggcgcatgcctggaatcccagcactttgggaggcagaggcaggtggatcacctgaggtcaggagttcatgaccagcctggccaacatggtgaaaccctgtctctactaaaaatacaaaaattagttgggtgtggtggtgggtgcctataatcccagctactcgggaggctgagtgaggcagtagaatggcttgaacccagaaggtggaggttgcagtgagcggagatcgtgccactgcactccagcctgggcaacaagagcgcaactctgtctcaaaaccaaacaaacaaaaaggatctaagaattttacatatctatatatattatccatataactttacagccattacagctcaaaacgccaggaaagaggtatagaaaaacctaaagcagagtataccaccaggcctcaggccatcaaggttcatgtatcccagggttctgctctgacatggggaccagtgggtaaggggaaaaactgaaatactgactccacagactcttctcaggagaaagaaaggactgaatatactttataattacaccatcctatacacatctcccaaatgcactgagtcattaaacattttgtttcattttgagagggcagagtgaggcctcgcaagtaaatttcttattgccattgataaagtatccactcttgtttgatcctggaacaccttctcccaaccttggtgtattttagtgtagcgctggaactgaacagacctaaaaatccacagggtcgtcttctgcatccactctcagtggggcctgaatccacctatggaaggaccacggctgtggcacagctcccctcaggtggccacacaactcccatttctaaaataccttaaaacaaggggcaggtagaggaaaaataaaacaaaataaaatacctgggctgggtgtggtggctcacacctgtaatcccagcactttgggaggccaaggcaggtggatcacaagttcaggagttcaagaccagcctggccaagatgatgaaaccccgtctctactaaaaatacaaaaattagccgggtgtggtggcgaccgcctgtaatcccagctacttgggaggctgaggcagagaattgcttgaacccaggaggcggaagttgcagtgaactgagatggcaccactgcactccagcctgggcaacagagcaagactctgtctccaaaacaaaaaacaaacaaaaaaaaacctgaaaacaaaaattaaatgggacacagaatcctgttggtggtaacatcacatttattagcatttccaaatgggtatacctggaactactggtacatccaatatatagcagacttctggagggatctgctcacaactggaatagtaattttttttttttttttgagacggagtctcactctgtcacccaggttggagtgcagtggtgcgatctcggctcactgcaacctccgcctccagggttccagcaattctcctgccttagcattctgagtagctgggactacagcatgtgccaccacacccagctaattttttgtatttttagtagaaatggggtttcatcgtgttagccaggatggtcttgatctccagacctcgtgatccgcctgactcggcctcccaaagtgctgggatttctggtgtgaggcaccgcacccggccagaactagcataatgaatttttaaagagaagttaagtagatgaaagaaatagaagaccatggccacatccatctgactaggctgcttactgcttgtaggcactaggatcaaggttagaggctcattttcaaaacctatgagtggtattcaattcaaaagactgttgtcaagagataacatcagcatctgggtctgtgtgaaaggatttaaatcaccttctatcagatgttgaagcatgaagggggaatggtaggaaggcagatgactattcacagtgtttacaatcaagatatacaaataactggctacatacaaacactcagaaagatgatgtaactatgaatgtactgaagcacaggctcagatgatgggcaataatttcaaaaccactgtttcttgatgatgccttgtttgttaaacttctgccgctgttaaattatttttacactttaatatggagaaaaatcaaccaatattttggtaggaactaaaacagtgcatgaaaactaaatcatctctgaaatgctagctaaggagtcaaaactcattaaggattttctacttaggattatattgtgtatgaacactgaaattttcagacaattcattcttgtatttgtttgtagcagagaggccaaaactaagcacaggtaaaaccttgggaatatttgtacttcttgccctcatctgtaaactacaaggctgggtaactagatgacctctgttgtccttaatatcacacacacacagagataaactgtacgtcaaggggacttagcagatagggacagacatagcaaactaaagagcacttctgtagctccccaaaagtatcccacaatgtacttcaacctgactgtggggttaatatcaggtgtctgaactggattaagggacatctagatagttggtaaagcattatttctgggtgtgtctgtacaggtgttcctagaggagactggtgtgtcagatggtagcctgtgtgggaagatctgccctcaatgtaggtgggacagcatctaatcggctggggtccagaacagaacaaaaaaaagcagggaaaaggagactttgctctctctccaagagctaagacacctttcttctcctacctttggacatcagaactctaggtcctccagcctttggactgaggactcacaccagcggccccccaggctctctggccttcagcctcagacagagttgtactataggttcctttggttctgaggcttttgaacttgaactgagccatactatcagcttccccgcatctccagcttgcagatggcctgcgatggtctaaatgtttgtcaccctcagaaactcattctgaaacttaatccccaatgtaacagtattaacaagtgaggcctttaagaggtgattagatcacaaggagcctgataactcattaattcattgatgcattcatgggttaacgacttatcacaagagtgagtctcttataaaaaccaggttggctctctcttgtgagccctactgtcctggatgccttctaccacattatggcacagcacaaagccctccccagaggccaaccagatgcagccccttgacctgggacttcacagcctccagaactataataaatttattttctttataaattacccagtctcaggtattcagaaaaaaagactaagacatggctatcatgggacttagcttctatgatggagtgagatttattattcccttaataaatcccctctcatctgtctgtctatccatctgtctatctttctatccagccagccagccagccaattggttctgtctctctggagaaccctgactaatacactgacaaatactaaatgtcagattcagctttaaaagttcagttttgaagggtcaatttggcaagacgaaatttcgcagataaattaaaatcctacccttggacctccaaaatctgctgaccaaacacaaaaatgaatcccattctaaacagtattctcccagcagctctggttttatcagatcaacattctgaagcacaaattttctctttggtccaaaggatttctcccataaaggaagaaaaaaatagctattcgtagagagtgtaataagaaattgtcaaattcccccttaatccctactaaagctttaaacagtccattaaatttctttaaaagcaaaaaaaaaaaaaaaagagtacaaatatcacaaaatttgacatttttgtaataatactttggttgttgtttggtgacggcggtgatggcagtgatattattcatttggagggaattaatgacttcttacacatgacatagccagaaaagttacagagctcaaccacacatcaatggtggggtcagactttgcggtaatgagcaggatgtcaaagaaagggtggggaatttctcacattatttaacatcacattattttataagtaagacttaccaacttatgattaaagatacatggcagagattttacaattaaaaaccgatgatgagctaccatgataatatttccttgaggttgggcacagtggctcacatctgtaattccagcactttggaaggcagaggcatgaagaccgcttgagcccagtagtttgagactaacttggacaacaaagtcagactctgcctttacaaaaaatttaaacattagacaggcatggtgtcatgctcttgtagtcccagttattctggagactgaggcggtaggatctcctgagcccaacagctaaaggctgcaataagctatgatggcactgccacactccagcctgggtgacagagctagaccctgtcttaaaaaaaaagaaaatattttattgactcaatacactttttacagaaggacctctcaaacatcttaagcttcaagattccttagattcttaaaaattattaaagagtcaaagaacatgggttatagcttatcagtacttactgtatttaaaaataaaaaaatttctggctgggtgcggtggctcatgcctgtaatcccagcactttgggagactgaggcgggcggatcacgaggtcaagagatcgagaccatcctggccaacatggtgaaaccccgtctctactaaaaatacaaaaattagctgggcatggtggctcgtgcctgtagtcccagctactcaggaggctgaggcaggagaattgcttgaaccggggaagtggaggtgaaagtgaaattgcgccactgcactccagcctggcgacagagtgagactccatctcaaaaaataataataataaaaataaaaaaataaatttttttgtaatttatgaattcattaataacagtaataaacccactacatgctcgtgttaacataaataattataacaaataactataatttttagaacgaacataatgtaggaaatgagtaacacttttatttctgcaaatctcttttacttctggcttaataagaaaacagattcccatatctacttctgcttctgtattcaatctgttgagctatatcacacatcatttagccttttgtggaatgcactgtacactcctgagagaatgacagtgaaaaaaagcaaatgacgtcttggtatcattatgaaaacagttcaaccctacagacccctggaccatagttaagaatggctggtctctgagatgaagtcgacaagctgcacagatggctccaggtgccctctcttttagacacaatcatttaaataaaaagtatgctcccgaaacagcacaatgactagagattttaaggcacaaattcatttagatgtcagatactattaaaaaagatttcattattatttatacaaccaaacactccagacattccagtagagagcagaagttacacaagaagaaaaatctaaataggaagctctcattgtcaaatttaaggtatctttccaaaaactgagctcaggatataaaagaaatatttaaagcttgattcaaacaagtatttgtctacattaaaaaggtatactactttaaaacaacggtgaacccttgaagctgaaagcatgcagaaaataataacctagataatttccgctattccaggcaactttctggccatttcaaaaatgatactgcttcctacctgagaaaactggcatcattaaacaaaacctttaagaaaaagaaagatattagcttacaatgttaactgaatcatatcttttataatgactaatatacctaatttatgtgaatctagcaatattccgccctctcctggtgatatgctttttgtaccactgctgtctgaattaaaccctgagtgtagagttggtaacacagtaaagtaatttttagcaacacaaatatttgcacttttaagaagcactagagacacagttttagaaattactgactcaaaagttggcctgcataataggaatccaagtacagccagcaacttaccaataaacaaattcaaatagttggataagaaaagggaaaatcagcaggaacactaaaaaattatattttcctggtttacgtaaatcagtctgtcttatcttaaatatcttaattatttcttctcttcctttaacttaaaccaaaacaaagacggtaacctttaatactagttagtctatttataaccgttccatctacaaacatttttctaatacaaacatgccctgatagcttatcttggtgcacatgccagacaacaaaggcccactggcctgctggagaggagaaatggaaagcaggaaatgagaagccttagttaatctccaaataatcgatcagtgtattcagtcaagtgtgagctgagctgggaaaatgctgctttaaaaaagaaagaaagaaaatcaaagagcatgtgactggagccacaattcattttaaaatagggtaatttttgtcaaaaagattctgcatcacgttcaagcaccaacaacaacatacggaaatgttcatatcttctgcagtaagaccccttcctttaaaatctcttgtcatcttttttcaaaaacaagttccaacttttgggctttgtttcttatttcagtttatcttaattattgaggtataatttacatacacacaataaaattaacttattttgtttctactagttttgacaaatgtatagagttgtgtaacctccaccaaaatcaagataggcaacattcccattaccacaaaaagaccaacttccattacagaatcaacatttgctgtgatgaaaaggctttgggtgccagtgttgccagaaaagcaacattctaatctaacttccttcctccattttagcacacagagaagttaatatggagaaaaacaattcagagtctgctgtgactcttctatctattgctagagaatactacagacaggaatcccatgatctttaaatcaagtaatcggctagataaaacttctgggctaagaggtaatatggtctcaggaaattcctagaacatacaacagttttagcgacaagtgatataaaaataaacaaaaataatttcaaattagatctgagatatactttcctcaaactatataaggaatatttattgggcatctgctaggcaccagacactgttctggagatggttgctgagtatatagaagtgggaaaaacaggaagtcccagtcctggtagaacttccattccaatggaggagaagaccccttaccaattcccccaaccctctcctctaaaatgtccaataacggttaagtgcttttagaaagttatgatgaatgaaatctgccacttagtaaccataaatcctaggcaagtaacatttatttacactgttatttaatctctttggatattattttccttaaaattagtggtcttctcaaaagtacttcaggatagcaggaaaaactgtattgtgacctgatatgtcatatacagagacaggtttaaataaccctaatgattccatacaccagtttctctacctacaggacctaggaggaaacctaaatgtcttgcttgcttgctatcctgagcgtgttcatgaaaactcccaaaggtggctctactttcttgctttatctttcttatttttctttttaaagttttattatgaaatatttgacaggcagaaaggtataaaaataacagaaccatctgtaccaaacatacctaaagcaacaaaaacattatcgaacctaaagaagctgcctgtggaacctgcctacagcccagaggtaaccaccaccttgaattcactgatcattcccatccagtacttcatgcttttacttaatatatatatataactaaaaatacataaggtattattttgcatgtttttatactgtacataaatgacactagactctttgagttcttctataatatgctttgttctttcagcattacacttacatgatccatccacgccctagttcacttattttaagtgacatgtattaccttcatatacagcacatcacaatgtgttcatacattttcctgatagtagacatttgggtcatttccagttttccaccattacaaccttggttgtaataagtattcctatatatgttttcacacataaaacttttctattcaaattatttcgattactctgaatgtttggtatcacagctaagtgttcaaattttggtattggtaaaatgttgttcacagtgtcttactaagtaatttaaatatatattaaaggctaaaaaagtttatgtctaagcatggttttagataaagccattaactgtgatgtgttgccttttatttctggagacagtctcactctcacccaggctgcagtgcagtggcccaatcacaggtcactgcagccttgacctcctgggctcaagctctcctcctacctcagcctcctgagtagctgggactccaagcaaatgccaccacgcccagctaatttttgtactttttatagagatggggtttcaccatgttgcccaggctggtcttaaactcctgggctcaagcaatcctccctcctcagcctcccaaagtgctgggattatagacatgagccaccgtgcccaaccaatgtgttgtatttccattaataattcactgcaaaatattttctaatttccactgtgatttcttatttgacccacagactatttagaagaatctgggttccttctacacatctgtgtatttcccaggtactccttttggtcttgattcctagcttagtagcactatggtcacagaacatgttctgtatgatttcaatgctctgaaatatgttaagactatgatctatatatagtcttttttttttttttttttttttgagacgcagtctcgctctgtcgcccagactggagtgcagtggcacgatctcggctcactgcaagctccgcctctcgggttcatgccattctcctgcctcagcctcccgagtagctgggactacaggcgcccgccaccacgcccggctaatatatttttgtatttttagtagagatagggtttcatcatgttagccaggacggtctcaatctcctgacctcatgatccacctgcaatattatatagaaatgaaaatactgcaacttacaaaaacatgaatttcacaaacatgctaagccaaaaaaatcagacacgaacaaatatatattgcatttcattcccttcatatacgaagtacgaagacagacataactaatctgtgatggcagagctcacagcagtagttacgcagttagtggctaggagagggcacgagggtaacctctggagtgcacacattttatttcttgataccagaagttagacagatgtgttcactatatgaaaattcactgagctttctatttagaatgttctttcatgaatatatattagacttcaattaagtctaatttatgaaattaaaaattaacatctttctaaaattaaaagtctaattcgcaaatgctaaaatttacatacacatatacacattaacacgtatgcacatgaagtatctctggaaagatacaagaagctggcaacaattgttgcctctgaggaggagaaccctaaaacaacttataccaaaaagtaagaaagtgctcaaagaatgtgaaagacacgcgaaactcagcctgaaaggacagacctgctggactagttctgctagaacaacttgagaatcaacacataatgttagtaatagagtagaaactacaaagaaaaccagaaatcgtgcatccttgctgatataggtaaatgaataaagtgaatagttgctaaataaccggacactttcagagtcacagggcacctttccataaaatattaactgataacaaaggatgaaaaaagtaacctttttttttttttttttaaagacactgttttgctgttgtccaggctggagtgcactggtgcaatcacagttcactgcagcctcaacatcccactctcagactcccaagtagctaggactacaggcctgtgccaccacacctggctaatttaatatatatatatatatatatatatatattttttttttttttggcagagacagtgtctcactatgttgcccaggctggtcgctaactgctggctcaagcaatcccccaacctcggcctccaaaagtgctgggattagacttgggccattgtgcccacctcaaagaaataactttataattaacttttgggccttgtaaacccaatcttaagtgatcaaagtgaatgccagtaacagaaggaaccaaaattgtgccctacttggcagggtacaaggaaaagatcccaaacctgaatctaataatgaagaaatacgatacaaatgaaaactgagaaacattctacaatgtaactgaactgcaatattcaaaagtgtcaaggtcatgaaaatcaggggaagactgaagaactgttctaaaatgaagaggattaaagaaacataactaagtatataacctataattctgattagatccattccctacacagggcattgaaacaaaagccaaaatgtgtacagggtctgaggattagacagtaataatgttattaatgttaatttttaggtttgattgttgacttgagggctacatcagaaaatgtccttgtaagaaacacacatccattatgtatcagtgtgtaaaggggtatttatttggcaacttattctccagtggttctagggaaaaaaaaaaaaagttctctgtgttgtacctgcaccttttctataggcatggggtgggttagataaaagactggagaaataaattttagtgccaattataaaaatatgtaaccataggcagtggtcactaaaagccattttgacaaacaatcagagttaaaactcagtaaataagaagaaagttacatgtaactgtaaggataaaagcatgttaatgccagccagttaaaaattagtttcaggaatttagtccataataaagattaaattacagaatagcagggaaagatgaactatttaatgagtttgtagagattcctagaaagtcatctaaaaaaaattaagttgtatctatacctcatactgtatgattcaaaatgatctgaaatgagtctaaatgggtcaaagattgaaatgtaaagaataaaaccataataaaaaaatgcaaattaaacttatatgaagaatatattgctcatactggcaaatatccaagttgataacactctgctggccaggttatgggaaaagggttgtcattatgttttacagaaacataagctggcacaattgtgttatagaaagagtaactgggcaacatctaccaaaattacaaacatattcatctgtttctccagcacttattgaaatttattctaaagatacatttgtgctgggcacggtggctcatgcctgtaatcccagcactgtgggaggccgaggcaggcagatcacaaggtcaggagatggagaccatcctggctaacacggtgaaaccccgtctctactaaaaatacaaaaaaattagctgggcgtggtggcggcgcctgtagtcccagctacttgggaggctgaggcaggagaatggcgtgaacccgggaggcggaggttgcagtgagccaagatggcgccactgcactccagcctgggcgacagagagagactcaaaaaaaaaaaaagatgaaagaaagaaatttcatatgacttttgaatttttttgtttttttaaattatataaatgtattacctattcaaaaactatttttaaaaactcacagggtgtttgtttatgtcataggcctttgctctctctctctcccctctctttctatcctagtatattgctgctctttcttttttatgtagctagccttccagtggatagatggtgtctgaccaacagaattggaacctgcatcagccatatactgttaagagaataaaacggaacagaaacaagcctgtataattacagttggtcatgccaacagtctggtgaccaatcttttacacttaaaacttaaagaagttacacgttttcaactgcctgtagaagaaaatcacatactccttggccccccatactcatcatgctgacacagatcacttgagcttaaaaatgctcacaatgtttctgaaagtgaataggcacagagccttcaaatatgagatctagagtatctcactgaatataagatattccactcaatgctaccttataaaacaagccctagaatcaaaatagcttatcactacatcttattcattgtgagatataccgctgaggctggacatgcactttaaaagggaaagaggagccgggtgcagtggctcatgcctttaatcccagcacttgggaggccgagatgggcgatcacctgacgtcaggagtttgaaaccagcctggccaacatggcaaaaccctgtctctaccaaaaatacaaaaaagccaggtgcggtggcgggcgcctgtagtcccagctgctcaggaagctgaggcaggagaatggcttgaacctgggaggcagaggttgcagtgagccgagtttgcgccattgcactccagcctggatgacagagcaggactccatccgggaaagaaaaaaaaaagggcgggggggagaggaaatcattaataaggtgtaactgaaacctgtcctgaaagaaagcaatgagcacctctttttatcataacatattttgtctatgtttcgtatttccacaaactcctctttgattacagattatgtctttccaagaagactatttggcagcaaagtgctgacaaagtattgatggcagacctccttacacaaagcctattagcatttctattgctgcactgcacactctggtattataaatcacacacactcagcatcatgcccaataatcaaacagttacctaacaactaagggtattacaaacgcattgaactaatctttgaatatatgctgataattaaattccattatggtttctaactttaaacctaaaggcaggcaacactgaaatcaagtgtcatccactgtgccctcacatatgccatgaaatgtcatttatattatatagttcacttccaattactgaatacaccagccagagcatctatcactaatattaaaacaagcagaacccagcagtagagcagtggaaggcatcacatggtttaaatggatttctcacctttcaagtgtcaaggggtctttccaagaacatctcacttagggggttgttggccttttaacaaaggaagctgctccagttgaaagaaacattcaaaagacaagacatgctgtaaagcacagctcagagctagagacatctgccccttgtgttaaaacacaaaacagtaaaagatcctttatatgaaaaataaatacatgtaaaaattgagcttttgtcaaggttactaacaaagaagttatgttaatatctaaggagcccttgtttaggcacatgccccacagaaattagggagccctcctgtccagaagatctattaatttcccagtttttaagaccaaagaaatgtttcttgaaatccttgcttggagccccaaagttaaagcagccatcaagcacaaagctatgccccactgtgttccgctgtctgtgtccatgtctgttactcacgcagaaccaccacgattagcacaagttaaatttcatggctacgtagaaatgcacattccagctctctgcctactaccatcacatgatgatctttaaaacaagaatcaagaaaacgttcctaatcctctgtgttcagaaaagcttttactgtcaaaagaaaactttaatagctgactcttggtaattaacacataatagagccaccactaacctattaacaatattaccgtattctataattggagggtaaaaattagctatagagggaattgtaggaaatcattttctagctctaccatcaatgttatgtcagataggctaacaagaaaaactgttagagttctaaatggcagtaaataattattggaacataaaatgaaacaacgcccaagaaaattcaatctgaccacacagaagaaaagatagtggaaccaggcctagggaatttatagagactactgcctctgcattaataaagaaatcattatctggtaactataactcaaatcaggctctagaacaatggttcttaacttttgctacaactaccccatctgaaatctgcatgccatgcaaactactgcctaaggcggggcacagtggctcacgcctgtaatcccaacactctgggaggccaaggcaggtggctcaccggaggtcaggagttcgagaccggcctggccaacatggtaaaaccccgtctctactaaaaatacaaaaattagttgggcgtggtggcgcatgcctgtaatcccagctacatgggaggctgagacaggagaactgcttgaccctgggaggtggaggttgcagtgaactgagatcgcgtctgggatccagcctgggagagagagagcaagactccatctcaaaaaagacaaaaagaaaaaacacaagataaaggatgcttaaaacctaaccaagtatcaacagtaaaatcgaaggacacttagaaaattaactgacattatagacaacgtcaagtaatttgacatcatctcttctttgaaattcaccatcccatcatgtgagcctatgtatacagctcctagtagcggataaagtaggcaaacttacatgaagaaagaattccattactataagctatcattaaacaacttaaatatctagagaaaattcatgaataataactgaggtgattcagagtccacagcataaccagtttaattgcatttaccacataactggtccatatacactggaactctgaacgtgctagacgagtgaaagcaaatgtgaaagcttttatttcagttctaatgtactgcataataaaatttaaaaacacacacaactaaaatgtggattaaatccaaaaactataatttcattaaattgcattataagattttcacttactaaaatacagaaaatgttttctaatatgcattggacttttttagttatactttacatgtgaaatgcagagatttttagatacactatttagtttttataaaggctcaactcaaaacagttctatcactccagaaagttctctcaagcactttcccagtcaatcctcaccctacccatagaaaacctcgatctagctagctagctagctatttttggagacagggtctcactgtgtcgctcagactggagtacagtgtggtgtgatctcggctcactgcaagctccacctcccaggctcaagtgatcctcccacttgagttgtgtgccaccatgctcagctaatttttttatttttgtttttgtagagaagaggtgtcatttcactatgttgccaagactgatctcgaattcctgggctcaagggatcctcctcccatctcaggctcccaaagtgctgggattacaggtgtgagcaaccagatcctgctactactctgatttccatcacagattaatcatagggcagattcatatttaactttttaagaaattgtcaaactattcaagtggttgtaccatcttcattgccaccaacaatgtatgagaacttgcattcctgacaaccttgctaacattcagggttatccatctcttcaatttagccattctagaggctgttttggggatcttattgtgacttaatttgcatttccctgatgaccaataatgatgggcactttttcatgggcttatctgccattaatgtgtctctgtttaagactctgtcaattttaaaacactgatttggtcttatcctataagagtgttgtttgttggaaggtatttttttaaatgtattctgcatccaattgctttctcagacatatgagtgacaaatattttcttacagtctgaagctgccctattttcataacaatgtcttttgatgaattccaatttttttcatttgtggttagtactttctatcccctcattaagaaatcattgcctaaatgaaagtaaacacactctcctgatttcttctacaagtttttataggtttgagattatatttagatcaatgatccatctcaaattaatgtatggtatgaggttgggttatatcctgtttttcacatagggattatccagttgttccagcccatttattgaaaagatttttttcccactgaaaataatttgatcatatatgtgtggattcatttaattttgcattcaagagatataaagcacatctcagtccacaggatcactggcattttaatcttactttgtatagtattaccaatattggaaagcatcatttcctaatattaatatacctcatatttacatgaaacaaaatattggtgtaataggtacatagagattttttttccatttgagttatgcaattacacttcttaaatatattattatttaatatgtatgcatatacactggaactgttgtgacacttttaatggctaatgttcatgtttataaaatatgtaaattttcagctattaatataattgcttgctggtatataatatcagataaaatgtatataacaaaaataatcatataaaataacaccgtttcctcaaatctccaacctcagctaccacacagttgctcctctggttcaatgtaaaattttcctcaaaagttaatatattttaagttattattttaaagagagagggtcttgctgtgttacccaggctgcagcgcagtggctatccacagggctgatcacagcacacaatagccttaaactcctgggttcaagcaatcctaccgcctcagcctcccaagtattaatgactgggactataggtgtgtatcactgtgcctgcttttttttttttctctctctttctttaaaaactttttttctttttttttttttggggggtagagacagggtctcactgtgtcacccaggctggtctcaaactcctggcctctacctcccaaaatactgggattacaggcatgctccaccacacttggctattatattttaagggttactttctaaaccataggaaaattagctgggtgtggtggtgggcacctgtaatgccagctactggggaggctgaagcaggagaattgttgaacctgggaggcagaggttgcagtgagctgagactgtgccactgcactccagcctgggaaacaagagtgaaactccatctcaaaaacaaacaaacaaaacacacacacatacaccctgaaatctctaacactgataccgggcaggggtagtggtcacggtatagagaacagcatattctcaccatcaaaggtgaaatttcacaggccaattagggtactgatttaagatgataggaccagggtctcttttacatagatc

SEQ ID NO: 24243 - DNA, 865 bp, Homo Sapiens
ggcaatgtagtgagactccttctctacaacaaagtgttaaaaaattagccaggcatggtggagtatgcctgtagtcccagatactctggaggctgaagcaggaggatcacttgagcccaggagttcaaggctgcagtgagcttccaccgcactccagcccgggtgatagagcaagaccctgtgtcttaaaaaaaaattaagacagtatttagacttatcagttagattgttttatttaaatccttctaacaatttaggcaattctacattaattttcatcaaaatttatccagtcaaaaaaatttcatgaatactccagatgtaagagagtcacaattttctacgataaatcagacatcttatttctagggtgattgagggaggtggaaagcgcaggaggaagccagtgaagaggacaatggaatgctgagtcaatgacattgacttgtgttcctatctgccatcttgggtgtgggtctttatatgtggttacagatcctttagtttgagggaggtgaggtagagaaataggatgccagcaggtaggaggccgatgtcagtcctcccagcaaagctgtgtcatttatctgaatggaaatgagaaaataaatatgtactcaataagtcacatttcccagaaatgtgattgagattctcaaaaaatagactcagattcttggctgtctgtttaaccaatcacgatatgggatttgagaaataaaatttagggaattttaagagacatgaaagctactaggtcagggaaaataaaaagcttaaataactatttttattgtccagatcctctactgtaatagattaactatgttcaataaatttctagacaaaaaaaaaaaaaaaaaaa

SEQ ID NO: 24244 - DNA, 2409 bp, Homo Sapiens
tattctggagttctaatatattttcatggtttttaaatgtttagttctttaatcaagttggaatttttaaaatatatatgaagtaggatgctaatttaaaacttttcctccaaatggatatccatccagttgtctcaacatcatgtatagaaaaaacaaattgaaaatgctatcttatcatattatttactaaatttacatgcatatacatatacatacataacatatatctgagtttgagtctgaattcactactgtttcaattgctgtagttggtcaattctagtatgacagagttttaattgctacagttttggaatgattatggggttacttttgagacagggtctggctatcttgcccagactggtctcaaacttaccggctcaagcgatcctcccatctcagcctcttaaagtgttgggattataggtatgaaccactgcacctggccctggattgcattttgactgtggccatagaagtttccactcagatcttcaagagaacctactctggggactacaagtgactgacagccagctgccacccctttggaactaccatgcattcatgtcaatgccacatatctctggagtcgcccccagctagtggctgagcacagcaggagtactaaacttgttctttcttgcccagtgcagaactcctctaacgggcaactttggcttggggaacttctcatcagcctggatgagactatcttagaactacagtgtagccgaggctctttctacccaatatttccttctcttctttttacagaagtcagacctgcaccacagtctgaagtctctctgccaatccctgagccttcccactttatccttcacaaacatttcccccaataaatatcttgcatgtctaatcccttcttggcatctgcttctctgaggaccagaacagacaggtggtttaccaagtggtgcaagaaaacagatagtaagatgggttttgggcaatggcttacttggtccctggcacaaagcagccatctgagtcctgatttagccagcagtgacctaggaaaacatcccagagaagggaaatcctcttgctcgtgcaatttaggcatttaaaagatatggggtatacgatgcctacaaagaaagcagagctggccaactgttactaagacaagtaatgccttgcagatggataatgagaaaccgagagcacttaaacagttaaaggttaagtgtgggagccgggggcttctctggagcttaacaaacttttatttcctgcagcggaagagcagaaatgggattggatggtcacagagctctaaagatatttgaatgctcagcctagggagatccagtatgtagtcagggccctggttggggaaaccagcctgaagctttgaaacatggaatgggtgcccctgaggattttggctctgtagatacctctggacactcaagagcttacagaactggctcatacttcctagtaagagcaagcacttccctcattacagaaagacctcttccataattgttctcagtttttctcctggctgccaagccatggtaactggggttaacatctcagcataatctgcctaggaactgctggccctgataagaaaggaaagattacacaccgaaggaattgaaataagttaccatgactatcaggagccagagaagtatacttaggattggattttaagggtgttcaattaagggggctggaatttaagacaacataagcaagacttcatggacttggggtacttttttgggacagatttaacctcagcaagtagtcccgaggttagcttttcaaagcctggaaaaggcgatggctttgaaaaagtggaaatgaattcacaccatggcagcttttaacttgaggagaagatagctatttattttggcatatttatgtggttactgctcacttactagtcgcaattgttttgtaaccactttttatttattttttgagatagtctcattctgttttctagactgtgctacagcctgggcgacacagtgagactccgtctcaaaaaaaagaaaaaaaaaaaaatatcatattgtattggccatcccttgtttcatattcgttaataaactttgctactttgctttctaatttcggtgaagaacaagcacaagattaaggagtaagactatgtgaaactgggttataaattgaaaggctgttggctgttgtatcttgtaaacaattcaacgcaatgccaagtgaaaatgaagttgttagtccctctatctagaattctttcccaaatagctgcatatctttttcctctgcttcatttaagtctgtgctgaaatgttatctactcagagaagacattctggatcatttcatattaaatagtaacttttatcactccaaaaaaaaaaaaaaaaaaaa

SEQ ID NO: 24245 - DNA, 1885 bp, Homo Sapiens
gccgccggggccgcctagagaagaggctgtgcttcggcgctccggctcctcagagagcctcggctaggtgtggaaacaggaagagaactagaactggaagtaaagcattgaagatgtgactgaattgctgcaatctcatgatcaaatttgaatggatgaggagttgctttttagggatgagcaaagaaagtggtttctcgagatggaatctactggttgctccttgagggcaggacagttcttatggctttatccgttgcgtaagcacagagaggtctgcgaggtcaaaactattgtcatgatagcaagatgcctgtctttttcatttattcacacggtgtgcagaggctacatgatgtgtgatgacatcctcattgatgttaatgaatggtgctatacttgaattttctaaggtgtcattaggtaggtttaggtatgcatacttgtttttagaaattatttttttcctttttcccatttttagaaatcaactcattttttaggttatgccttcagtaatctttgcaacctcaatattgtgtaatggttactttaaaatactgtagttttctttgtgcctaagtataaacataagtacattttgttgttttgtttgcagtagtggtttaaatattttcccaaaatacccaaatttaaaaattctacaactttagaatttaataaatttattctaaaatatttatatattttttcatttaagaatggatcggcttaaaaacactgcttctcatttacttactggctataccatctgtatactaataaaaaacaagatttgatttggaaggactgactcaaactaacgaaaacatgaaacctgtctttctgctttggagatatttacctaatcatgttctgcagtagaataatttagttctttagtctttttttggagatgaggtcttgctgtgttgcccaggctattcacagctgccatcatagtgaactacagcctgaaactcctgggttcaagagatccttctgcctcagcctcctgagtagctggaactataggcatgcgccaccaagcctgggcttttaaaaaaattttaaaaagaattttgagacaggatcttgccatgttgctcaggctagtcttcaactcctagccctgagtgatcttgctttgggcctctcaaaatgttgagttaataggcgtgagccaccatacccagccaaaaatttttttagagatgggaatggaatgatcttgaatagtgttggtgccacctatgttgtggcatcattttgaaaccaatcattcagagtgctttttttggtaaggcattattttttaatgcaggtatgccactactgggaaaaaaaaaaaaacaggttttaaagctagaaatgaaaagctacttaactatcttaaaggataagttactttattatacactagaaacatacacaatagctgaaaaacttaaaaaatctcacactgctgaatgtctctgctggctgaagtgtaagtaaaagatcatagtagtgccgctgttgagtgatacagcaacttgtcattaaagatgtgtgtgcagacatggattctgagttaatatctcatctgtagaagtatatatttgtcccttgctttgggattggtttctggacaccactcccccacccttgctggccatttgccaaggacaccaaaacccaaggatgttgaattcccttttataaaatggcgctgtatctgcatacaacttacacacatcctcccatatactttaaatcatttccagatttcttatacttcatacaatgtgaatgctatgtaagtagttgttacattgtgtacttatatttgtactattgtattaaatattctcaaatattttcagaaaaaaaaaaaaaaaaaaaa

SEQ ID NO: 24246 - DNA, 852 bp, Homo Sapiens
cggacgcgtgggcggacgagtgggcttcagcctcataataaaggaaagttaattaaaaaaaaaaagcaaagagccattttgtcctgttttcttggttccatcaatctgtttattaaacatcatccatatgctgaccctgtctctgtgtggttgggttgggaggcgatcagcagataccatagtgaacgaagaggaaggtttgaaccatgggccccatctttaaagaaagtcattaaaagaaggtaaacttcaaagtgattctggagttctttgaaatgtgctggaagacttaaatttattaatcttaaatcatgtactttttttctgtaatagaactcggattcttttgcatgatggggtaaagcttagcagagaatcatgggagctaacctttatcccacctttgacactaccctccaatcttgcaacactatcctgtttctcagaacagtttttaaatgccaatcatagagggtactgtaaagtgtacaagttactttatatatgtaatgttcacttgagtggaactgctttttacattaaagttaaaatcgatcttgtgtttcttcaaccttcaaaactatctcatctgtcagatttttaaaactccaacacaggttttggcatcttttgtgctgtatcttttaagtgcatgtgaaatttgtaaaatagagataagtacagtatgtatattttgtaaatctcccatttttgtaagaaaatatatattgtatttatacatttttactttggatttttgttttgttggctttaaaggtctaccccactttatcacatgtacagatcacaaataaatttttttaaatacaaaatgaaaaaaaaaaaaaaaaa

SEQ ID NO: 24247 - DNA, 2680 bp, Homo Sapiens
acgcgtccggtactatttacagatctgtcctgttttaagatttgagaattgtgaacaggatggagcaatggttctcaaacttcagccagtatcagaattgcctcgaggtcttgttaaaattcagatagctggacccacccccagcatttctgattttggtctggagcctgatgatttgcatttccaacaagtttccaggcgatgctgatgctgccagtccaggaaccacactttgaaaatcactgggtctgattctcgcagtttgaaagtctcagagaccttcagagtctgaacgtcttttcaaccatgtatttatttactcagtgtaaaaaactgatctctggagacatttttataaatctggtgccatgactggaacatttgtggagaaaggtctccatggagcgacaggccctttggattggccaccacccctcctcactctcacccctgctggggtctgcactggctcttccgcagtagggtgaaggagctctttggttttagggtgagtttgcttttgtgtacgctgctgcctggacatcagtctggaagctgtgcatttgtttggtgtgcttagggtcaatcttgatccacatgcatggaagtgagaatcctggaaagaagccatcagaatgccatgagagtgcacctagcatgtatcgaggcactaagtgcaggagtccctgtcctaagatggcagtgacatggagcatcgaaaaccacagataatccttaaataataaaatactagttttgtttttttttcttcggggcagagtctcgctctgttgccctggctggagtacagtggcatgatctcggctcactgcaacctccgcctcccggcttcaagtgattctcctgcctcagcctcccaagtagttgggactacaggcatgcgccaccacgcccagctaatttttgtattttttagtagagacggggtttcaccgtgttggccaggatggtctccatctcttgacctcatgatctgcccgcctcgggctcccaaagtgttgggattacaggcatgagccactgcgcctggcaaatgttttagtttttatggttattattatttttttttttggtggggggagggtggtgagggcaaaggatttgtttttcaaattatgtgtttctcaggttaacaaagttattttagattctctgccatgccagcaggtgttagagagagcctgaagtgttacatatggcagaaaataaatgtctctgattactttgctacctttaaaaaaatctatatgtgtttgcaaaacagcctagggggatctaccacctacacagcatgaattattcataagtcataggtgcacatgtatgagcaagttatttttgagaaagaaactgcctataatataataaacctgtcaggtctttgggtattgtttaatttgtgtgttgttgctgttttatctggactgcatcttggggggtactgggctctgcttctggtttttagtttgcctttgaatttactgagctactagaaagacaaaaaaaagctatttttatggtaatagaatacagaatgacttaggtgtaaaagtacacgtgaagaccatcgtagaatatacagctttggagttttcttaagacacagtccttcctactgaaaaggcttgctcacctttggagaggattgtttatattttcagcctgggttcctttatgcagtcccaacttagaggggagcttcggtttatttacactttgctttgcacgataacttgtatgcgaagacctctttatatctttcagtaggtcagagggctctttgtcctggttgaagtcccaaagtgtcagtgcagctgagaatgtttctcagcctccccctttacagaggaagggtcctggattttcataaatccagaccatgcctgcttcctataaatccatgtatatgacattgtactgtatctgatttctgtgccagtcatctgacctgattctttaaaccccataaaggtactggctatatgtagtagtagtatcctaggtaaatatggtgattaaaatacttctcttctaaattataaagataatgagttttgcattttattaaagggtcctgttgttagtgacacaggatttttttttaatgcttcatacatatagttcttatctaaacttgttcagctaacttcatagatcagttacttagcaaattcatactgagtcttattttgggaagtcttcctgagggaagctgtacaaaactgaggtggtcaggttcatctcttcaaagtaccagttatacagccatctaaataggcataacttatggcaaaattataacaattttttttctttgcagtaaacgatacctcatctaagaggctctaatacctaaagagtttatccttaaaagtaaaagtgactttgtaccataaaataaccccaaagccactctctagggtttttattttcttctttctttgtctttatcttttctaacttagttttggaattacgttagctactttggttccatagaacaagttttcaacttggggtctacagttcctacagtgtgctcattgtctcagtgaagttcttttgttttcaaagattcatggtaacaaaatgtattttactgctacaactaaaatgtatttataataaaatgcctttttaataaaaaaaaaaaaaaaaa

SEQ ID NO: 24248 - DNA, 1705 bp, Homo Sapiens
cgcgtccgctatttttgttttcagataccctacaaccaattttttttagtaatcttttagaattgaaattatcataaatgatcgagaataatcatcacatagtttaagattgtatatgttgagtagtttaaaacaatctttgcattttacagtaagaatcaaagtcccttcagtgtgcctttgtcagctaatatgtgaccagcaatgacaaccttgggagtatttattaaatattatgctatgaatataggcaacacagaacagggtttgcagtatagcgtcttgatgctaaattctcatatacctctacacgagaaatatggaggagaaaaacaagcatttacatatattcttcgtcactttgaagatgcatggcctgaactcgactgcttgtgtttgtttacatatcaggcatacccaggcatctcctgcagccagaggttccattgctgtctttgctcagtcctcttttaaaatatgaattagtggacaggcacggtgcctcacacctgtaatcccagcactttgggaggtcgaggcaggtggatcacgaggtcaggagatcaagaccatcctggctaccactgaaaccccatctctactacaaaaaaattagccgggcgtggtggcgggcacctgcagtcccagctactcgggaggctgaggcaggagaatggtgggaacccgggaggcagagcttgcagtgagccaagatcacgccactgcactccagcctgggcaacagagcaagactctgtctcaaaaaaaataaataaataaattatgaatgagtattttctagaaattcaacttgctaagcctgtaatacttaagggtagtttatctagatacagtactttcttccctgataagtagtatcattggagcccttaggtataggagaagaggaagaagtttaaaaagtgtaagtgggccgggcgtggtggctcatgcctgtaatcccagcactttgggaggccgaggggggcggatcacgaggtcaggagatccagactatcctggctaacaaggtgaaaccccgtctctactaaaaatacaaaaaaaaacattagccaggcgtggtggcgggcgcttgtagtcccagctactcgggaggctgaggtaggagaatggcttgaacccaggaggcggagcttgcagtgagccgagattgcaccactgcactccagcctgggcgacagagcaagactccgtctcaaaaaaaaaaaaaaaagtgtaagtggattaaaagagaaacttggtctagttcataatatttttaatagggctttccctggctgctggaaaacttaggccagtaagcatctctttgtttaaagtcctacaagacaatttgaaataattcattgttcatgccaaaattctaagtactgtttttcttagcaagtgtaacataatcaggaacaatgggtacaagtaaaacattctttggatgatattcaaagccttattagcactgcacctgaataataggtcattttgcctcactcatttgccaaagtagccatttctaagttaaggaagtttttagataggctcatagccttgtatttcgttttagattgtaagctcaatggcagggatactatattggtaattatgttttcatatagcaaccaccacagtatattcttggtgcttaataaatgtttataattgttaacaataaaaaaaaaaaaaaaaa

SEQ ID NO: 24249 - DNA, 1779 bp, Homo Sapiens
gggggagctaagtggaatcccggttggcttggggcgcaggcttccaacttcgtactctggcctctggcgtctcggctcgtcggttgggtacccgaacccagctactgctgcttgaagagaagatggatggggactcctcgccgtcgctgcgccgccggccttccctgggcggacgtacacctttgcgaagcgtcagtgaggacccagggcccctccttggaatagctcttatttctcaagcgctgcagcgtgaagctcgctctgcgggtccgagaggcctgcgatctgaagactgaaaactgggaagagacgctctaccctgtgctcctcgccggcttcgataggagccgcaggtgcctgggattttctcaaactttgtcccaaacttcagctgtgggagtggaggaacaaacaggcctctcccagaattgtgaaagagatcgccctggtggatgaaacaaaaacaaatgcacttgacttccaccgcctgcctggcgtgtcacgcgggtttaatgtatgtgtcacatttaaattcaaagtattttcttctaagggcctggacacatttcttttctccctgtatcgtgaattggaaaataccttaggatattaaaagttatctaagataaccccctttcttctgtaagttaaatactaaacggcttaagacgaaattttggaatatagagatgatgatgcagactgcagtgaattatcaaatatgcatctcactgtcctccacattaaacatatttttgttgcgtaaattcatgttaagacgtctataacaattacactttggtaaaattgttggatgttaacatctctgatagctcccaatagaaatctctgatgtactaaccagactggtaaaccattatcatgcactttgaaaatataataaaatattataattaaagctgccattaatgaaataggctgagcaacaataaatttacaaaggaaaataaaagtggatagccttgggagctctcacataaaatatggagatttcaaagttaaacttgattaattatgttaggttaaaaagtgaattaaagcaacaggactatttataaaataattagatttagaaagcagtcgtagaaatataagcctggagttgccactgaattacatatttaacaaacctagaagctaaatcagtttgtcttttatcaaaactgcaactcctctaagttgaaagcacagtgacaagagaaagcattacaaattcttgagaaataatagaaattaaagctcttttcaaacctgtgaacaagtatagtaccagaagtataagattcagataggcccaagttgtagttcttgttatgagtcttacaaccctatggactttggacaaattacttctctgcgtctgtttcctcatctgtaaaatgaaaataatttctgtttcatacaggtatagtctaaatagggataattacacctacttcaaagttgtaaaatacacaattacaactagataggaggtataagttctagtgttctgtagcactgtaggatgactatagttaacaatattgtatagtttcaaatagctagaagaaggatattgcatgttcccaaaacaaagacataagtttttgagatgatagatatgctaattaccctaatcactatatgttatatgtattgcaacatcactatgtacccccataaatatgtacagttattgtgtattaaaatttttttaaactaaaattataagacattaaaaaaaggtatcacatgtaaaaaaaaaaaaaaaaaaac

SEQ ID NO: 24250 - DNA, 4303 bp, Homo Sapiens
agtctcattggcagaggcgggaccgacggtgtgtgcggaacatggcggagcgcggcaggaagcggccgtgcggcccgggtgaacacggccaaaggattgagtggcgaaaatggaagcaacagaagaaagaggagaaaaaaaaatggaaggatctcaagctgatgaaaaaactggagcggcagcgggcacaggaggaacaggcaaagcgcctggaagaggaggaggcagcggcagagaaggaggaccgcgggcggccctacacactgagcgtagccctgccgggctccatcctggacaatgctcagtcgccggagcttcgcacctacttggccggtcagattgccagagcctgtgccatcttctgtgtggatgagatcgtggtgtttgatgaggagggccaggatgccaagactgtggagggggaattcagaggagttgggaagaaggggcaggcgtgcgtacagctggcccggatcctgcagtacctggagtgtccacagtacctgaggaaggcgttcttccccaagcaccaggatctacagtttgcagggctcctgaaccccctggacagcccccaccacatgcgtcaggatgaggaatccgagttccgagagggcgtcgtggtggatcggcccacccggccaggccacggctcctttgtcaactgtggcatgaaaaaggaggtgaagattgacaagaacctggagcccgggcttcgggtgactgtgcgactgaaccagcagcagcacccagactgcaagacctaccatggcaaagtggtatcatcgcaggaccctcgcaccaaagctggtctctactggggctacaccgtccgactggcttcctgcctcagtgctgtgtttgctgaggcccccttccaagatgggtatgacctgaccatcgggacgtcagagcgcggctcagatgtggcttctgcccagcttcccaacttcaggcatgctcttgtggtgttcgggggcctccagggtctggaagctggagcggatgctgaccccaacctggaggtggctgaacccagtgtcctctttgacctgtacgtcaatacctgtcctggccagggtagccgtaccatccgcacggaggaagccatcctcatctccctggccgccctgcagcctggcctcatccaggcgggtgcccggcacacctgaaagttctaaggggccgaggacatcagtgaagcagcagtgaaaccaggggctctgcaggtcacttgggacggacgccaccagacttgtctccaaaaatcaccacctttaatactccccggcctgcacacacccacagtctcactgggctccaccctcacttactgcccgccgtgatggccttgaggctgcctgcccgcgccaggatgtttggcacaaagagcagccccgaagcccgctcaatgctctcgatgggcaccaggaagcgctccagtgggatggcctcatccacaggtgcgttgggcatcacgtaggtgcggagctcaatttgcccacctgctgcctccaggatcagcaccttgaagaagtgtgtgggcactgccacgtggttcttgccgatgacctggtactttacgtaggatttcccaccagcctctgtcctgtgggcagacccaggcacacgtgggcagggggcctggatgaacccaaagccacctcttccaggcagccttccctgatctgtcctctaacttctgtcaacctgcaggaccacgccctcactgtgagacttctgtagcctgcctggctcctccttgaggctggaactctctccagggtggttaactctttccctctgttttccttatgcccaacactgggtcaggcagagtgggcgacaataaacgctgctaggagaatcgagccttctgaatattcacattcgtctgaggggagacttaacgactgtccatctctccccacagaggtgagcaacaagtgggcaaggaccatgacaggtgatatcccagcaccagcacaggtgccaggacaccggacgggggctccccctcagcagagtctcctcccttccaccaggccctaggaggcacctgctaatgaaatttgatcagtgccccaaccaccgccttggccagcctatgccgagcccttaccatggaccaggccctggggaagcatgtgacatcaaccaagaggtcacaggttttgcagagggggacacaggtcatttgcccacagcaccaaggaactaggtgatgaggcctggactccatcccgagcctgtggattccagagtgagctgctcagcctggacctgttgcctctcagccccagccctctgcaggccagaaaaaccacggagcacacccagaggtgctcagttgcttccacctgagaggcagggctgcacaggagcaagagtggaggccctgggtcaggcagatctagattcaaactcccgagaagggtggagggaagtgctccaagcagagcagagactgaaggcgggagagcctggtgcaccgcggacctgcagggggaaggcgtgagagctcggtgcactggggacctgcatggggaaggcgggagagctcggtgcactggggacctgcatggggaaggcgtgagagctcggtgcactggggacctgcatggggaaggcgggagagctcggtgcacctcggacctgcagagggaaggtgggagagcttggtgcaccgcagacctgcagggggaaggcgggagagcttggtgcactgcagacctgcggggggaaggtgggagagcttggtgcactgcagacctgcggggggttccatattggcagaacaagattgggtgggcatgccaagaggtgacagcagggagaagcgggggcagattcagggcctgctgctgcccatgggcagaggagagatggtcaggggtacccgacaggtctttggctgtggaggtggaatgaggggactcgaggcagggaagctgacaggcttgccaagaaaccagatgagtagggaactggtattgacccagagcctggggcaagcctggccctgtgagtggcagtaggggcctcaggtgagtgggaggttctgccgcccccctggtttccaccttacctgggcaggaagagtggccctgtgcagacatagacgttttggtagctgcgggtcaagctgcggctatatttctccaggttgttccaggcattctggttgaggtggggcacctggtaggagagatagggcttagcaggactgtggctgggacccttcctcctctatcagagggccgccccaggtcctgaggggatggacaggctcagagatatccagtgagacaagcggggggaaactgaggctcaaggaatgaaagtcactccctgaaacccagggctgatagagtgctagccaccaccctctgtccctcccacagcccaggtgtcaaagtcttttctcagctcccaagagtcgaatgaaggaagagcctgtctccacctttcagagaggactgaggcctgtccccagccccacccagggtctcctgggaagaccagcccttccaactaccaacccgttccttttcccagtctgagccacaggaagagcctagcggggaatgccatgaatcgacctccatcctgagctctccaggcctgggacaatggaaagtggatagggggctgtcttcccagaaggaagctgggtcagaggttggtgccccatgggctccacccagagccccatggcagtctccatccattggtgccaggacctgctgggaacaggctgagagggtggttggcccagtgcacagtgcctggcactaacaacctgatcgtgggccaggtgtctgcctcgaaactgcctgaaggcaggcagggtaggacaatgtctgggggctcacggttttatagactaggggtccccaacccctgggctacagactggtaccagaaccgggccacacagcaggaggtgagcagcaggcgagcaagggaagcttcatctgtatttacagccacccccccattgatcccacagcagcctgagctccgcctcctgtcagatcagtggcggctggagattgtcataggagctggaaccctatggtgaactgcgcatgtgaggaggttgcgcgcttcttttgaaaacctaatgcctgatctgtcgttgttgcccatcacctccagataggactgtctagttgcaggaaaacaagctcagggctcccacggatcctacattactgtgagttgtatatttcactatatgttacaatgtaataataatagaaataaaatgtacataaatgtaaaaaaaaaaaaaaaaaaa

SEQ ID NO: 24251 - DNA, 2012 bp, Homo Sapiens
tatagttagctaataaaaagcttttgtctacacaccctgcatatcataatgggggtaaagttaagttgagatagttttcatccataactgaacatccaaaatcttgatcagttaagaaatttcacatagcccacttacatttacaaactgaagagtaatcaatctactcaaagcatgggattattagaatcaaacattttgaaagtctgtccttgaaggactaatagaaaagtatgttctaacctttacatgaggactctattctttaactcccattaccatgtaatggcagttatattttgcagttcccacattaaagaagacctgagaatgtatccccaaaagcgtgagcttaaaatacaagactgccatattaaattttttgttgacattagtctcagtgaagactatgaaaatgctggctatagatgtcttttcccatttatctaaatatggactgctcaggaaacgagactttcattacaagtatttttaattaattgggccagcttttcaaacaaagatgccacattcaaaatagggtatattttcctatattacggtttgcccctttataaatccaagtagataggaagaaagaagacaaactttgcatctcagtatgaattattcaatttatttgaatgatttttctttacaaaacaaactcattcattagtcatgtttatctgcttaggagtttagggaacaatttggcaattttgtggttttcgagattatcgttttcttaaagtgccagtattttaaaatagcgttcttgtaattttacacgcttttgtgatggagtgctgttttgttatataatttagacttggattctttccatttgcatttgtttatgtaatttcaggaggaatactgaacatctgagtcctggatgatactaataaactaataattgcagaggttttaaatactagttaaatggctttcacttaagaacttaagattttgttacatatttttaaatcttgtttctaataatacctcttagcagtaccttttaaataagtataagggatggcaaagtttttccctttaaaaatactcactttatgcttataaataggttaatgggctgataaaaggttttgtcaaacattgcaagtattcggtgctatatataaaggaggaaaaactagttttactttcagaatgatttaaacaagatttttaaaaacaagatacatgcaagcgaacagcagggttagtgataggctgcaattgtgtcgaacatcagattttttgttaagaggagcaaatgactcaatctgatttagatggaagtttctactgtatagaaatcaccattaatcaccaacattaataattctgatccatttaaaatgaattctggctcaaggagaatttgtaactttagtaggtacgtcatgacaactaccatttttttaagatgttgagaatgggaacagtttttttagggtttattcttgaccacagatcttaagaaaatggacaaaacccctcttcaatctgaagattagtatggtttggtgttctaacagtatcccctagaagttggatgtctaaaactcaagtaaatggaagtgggaggcaatttagataattaagtgtaaagccttgtaactgaagatgatttttttagaaagtgtatagaaactattttaatgccaagatagttacagtgctatggggtttaaagactttgttgacatcaagaaaagactaaatctataattaattgggccaacttttaaaatgaagatgctttttaaaactaatgaactaagatgtataaatcttagtttttttgtattttaaagataggcatatggcatattgattaacgagtcaaatttcctaactttgctgtgcaaaggttgagagctattgctgattagttaccacagttctgatgatcgtcccatcacagtgttgttaatgtttgctgtatttattaattttcttaaagtgaaatctgaaaaatgaaaaaaaaaaaaaaaaaaaaa

SEQ ID NO: 24252 - DNA, 2060 bp, Homo Sapiens
ctgatacaggaaaccagtcttcttcaaaggtgatgagaatgccttgacaagatgatagggaccagcactgtacatttgttcccaagggaatactgcaacatgcaggcacagcccttggtcacctaatacatgtatttgtgaaattccatgggttcccttaagttgggagctaaaagggttagctttgggttagctgtggttttcactagtttctgcttgacaggatcagaagactgccgagacagatactgctatgctgaatttttcatgttcatctcagggactcactgcatactattttttaactacatgtgctattcagagttaggagatcttggatgggactccaaaataaatgatttaagaaattccataccttacattaggaccagagcttgtagtaaaggatgttgtgatatggttttgacccagaaggatgcttttgggtatcatcctcaagaatgtctgcaaaaggttttcagtgaagacaacaaagaatacctgtgctttcactgggaggaggaatgagcctgatggtagtagtgccttttgcttgtggtacatgtagccaaaagagctctgtgatgccaacaaacattgagaaaggtaatctttggtcactgccagctggattggccagtgcaccttgtattcagtactctatattgaagtatctgtcctttgactgtatgcggtgcttattgtacttagtttttagggccctgaaagctttctttgcacttactggttcaaatcccaacatcaactacatgttaaaagcagtcaggaaaagaatgatttggcttattttaagctttaagcataacatactgacagagcttatgaatatatatacaataaaatttatataataatataaatatataactagcttacacatcttaaaatttagatccagcacacaaaataacattttaaagctaaatactttggattttatgcatgagggaactacaaactgcacactttccacaagggagggaataaatacttttttctgtgtccttggagtgtgggtgggattcgtggatacatttctctggttcactatttcaatgatatgaaggagcctcatgttgcagcacagaagatttttcatcgttggaagttaaggttagttcaccttcattgattcctccctacactggactaaagcatttaatctagaaacacttaggtctctatatagcttgtcataatctctatgcatagaaaggggctttctagaacctgtcagcatattgtgaaatatctcctatatcaactgataataagaaatcagaattgcttaattgtggcattaataaagtatcacctagattgaactaagcaggaaaattttagatgagagtttaccatcacaagcaataaacacacaacagtccctgaatcctaaaaaggtggagttcttgatggtattagtgcgtatcttcaaattatttgctctctggaaagatgctgataaaattttgtccactaccatagtatccctgctggatgggaaccatatctttacaatagactctccacccattggcaaggtgatagctgtaaggacagtcaccttgcaagtgggcatgaagctgttaattttttttttttttttgtcaactgaggtttttctgctatggttctgaaccatttacctgatagactgggttatatattcccagttaaccactactgggttaagtgacctaatgatattagtagccacttaattattttcaagcattctgcctaggacatcgtttcataaaattaaggtttaacagactgaatcccaacattagtagtataactaaattctctcaggagctttttatgaatgccttagtagtactttggcttcttgaagaggagctaatgccataaccctttttaaatcatccatctgcagctgggcatggtggctcacacctgtaatcccaacactttgggatgctgaggtcggcggatcacagggtcagcagttcaagaccagcctggccagcatagtgaaaccctgtcttcactaaatacaaaaaaaaaaaaaaaaa

SEQ ID NO: 24253 - DNA, 3561 bp, Homo Sapiens
cggacgcggggtaagaaactaaatccagagcttttaacaggtacttagaaataagtattgggtaatcactaagaggacattgactgcaccaaaccaaagctatagaaagaaatgattgactttttaaaatatattcacattaactgtcctaggatacttctcttgaggctttggaaaacttcttccttgaaatttgcatatccactccagttctgtcaccaaagattttaatcttcagatcgcaatttcctctctcccagaaaaaagtactacaacaggctcaagggatatgctttggtggtcaagggattacactatggttttccttctgttcacaatggtatttacaggagaccttgtcatcagaggacgtactgaactatctttatgactttggatttgatcagaggtttaaaaaatagaaaaaaataaacaacactacttgacactgtaaatgatctttaatagagtcatgacctggagactgatggagagaaagaaacttccatggaagagagtgagctaaatcatttagaaccaaacaaaggtcactggtgaaacatagggcagcatgtacacagtgcagatcagggttctgtatggccagagccaacagcagtgaccggtgggagagtcagacaactggccaatgaattcaagtgttgaaaaagccacagtctggattttgttgtgatttctggagtggttgaaacgcccatgcccatggcaaggaaaatgcttggaggctgatctgttgtgatagtgcctttcttgtcgtagtgagtactagattaataatttattcagttacgcttttctgtaccattgcctccagtcttctgaggaggtttgaagggacagtatccacttaggatgaagggacaggatattgctctggaatgctgtgatttgatgatatttgcactagattctaaactctcctttaaactggagcaactgactgagagaaaaaccaaggacagctcaaagttaaaagaaaccaaaagcagtattttctgacagataccatttctttttctccttctttttttcctggaagaaaacttcacactagttggctaccgagctcaactcttaccagttctttctctttattttttgtttccatatggaaccatctgtgtgaattagtcatcagttaggtatagttaacgtaaagagcccctgccattgaaactttgcacaccttctctgctttattgaaggcaagggccagtgggcagtgatagcaggggagggaccctccagaaccacccagccctccaggaggccaataagcatggatatcatgtcaggagctgagctgacatatatttactcagaggacattggggtctgtagctaatcctaaagaatgctccgcaacagaaggaaaccaatgcattgtagaaaacaaagggagatggtgcccgaagtctgcctgtttctcttctcttttctttcccatctcaccaccatgtcctctctaacagaattatatttcatctcatatattacatgttactagaaaagtcatttggttccttggtttctctctttatcagtgggctggaaattcctccaaattaaatataaataccagtagcagctcccctgtgtccagccagtttctcaaatgctgtccacctggtcttactgtccacctaacataacttggaggctttggctggctcaaccacctgttcactttattttgttttcatttccatttgaacttgaagtgaggctatggaaaggtggaaatcatgggcaaggtttggaggctgcaattctagggcatagcttgtcaggagtttatattatctaaaatatatctttctataccccttttcattttaatctgttgccctgattataatttctttatatttgtggttatttttataagaatagagtccatttgctatgtctatttgagtactttttttctattgtccccacatggatgcagtaccaacctgttaatgaaatatctttttattatattattaatatgtaattctactgtagaccaaaaatataaaaacaaatttgttcattttaaagatataaagaactagggagtaaaagattaaaagttgaaggaaaagacagaagagcagtggttaactatgttgagttagaaatctaagagtagccttacctgttttttaaccagtgcttgccaatcataccatagttggaattatgtaatcttggctccttcatacttatgttctataattcttgtttgtctatttgttttctttgatgtaattgaggttgcacatcatgctattcttggcaatgcctgattctattgtattgtacttttgttagtcatttcctttagaaagatggggggaaacgtttatttcttcttttaatttaaaatttgtttaatgcactggaaataaaattggacatatttcactgtttaaaaaatcagaaacaaaacaaagcaaaaccatgagggaaaaaaacagcaaataagcaacaggggaaaacagctatgaaaaaaatatatttgtactgaatacacatacaaactacatcccacatgaaagattaatatcatcaagtaagaaaaatacatagtttaaactacaatgctgaaaatataaaaggaacctggtagttcaatggggatggagaaaacagagcattcctctgagagcagagatcttgtcattattgcaattaatgcccaaacaggttaaatgtggaagaaagtatggaggaaataaccccagccttcctcataccactggatttccacatcaccttttaacttatgcttgagctcccttttgagaaaaaatatttaaaaacaaattggctatgtaacaaatttgtgtgtgtgtgtgtatatatatatgtatatgcttatatatatatatatgtatatgcttgagaaagtggtttttcaagatgtatgtgtacagtacacacatggacacgcttcagtcctctgacttcccatgtgctacctcatgtgtttctcttctcatgaggatttgcaatggatagttgtacaacctggggactgtcagtgactcattggtatcagcatatgctaaagaagctcttgaatccaatcttgaaacctgatctcccttcgtcaacattccccaataccaaactggcccgtttacccatacaaatgcacagtaaagggaagaacagcggtatttttcctagccaactgactctatcatttgtttaatgtttgctggtttttttctggttttgttttgttttagagcaggggtgggagtggctgtaacttcacaatcctaatacagtaaatgttttgcatcttccatgttttatgcaaaaacagacatttaaatcaataaataattgtgccctagactgaaggttaatgtttaggagaggaaaaaaattgttggaattttttctacatttttttgtgaagaatcttttttggaaaggaaggatacatatttttgttgtgtaatattttctatttttgaatgcattttattggtacaagactgtttttttggtgaagacattatttaaaaaaaaaaaaaaaaa

SEQ ID NO: 24254 - DNA, 2267 bp, Homo Sapiens
ggggtaaagttctgaactataaagagtagtccttttaaatagatgcattgatttgtatatctttgaaaaagttgattatgattaaatgtgtgggtagttaattacaatttagggtaacaaccaggatgtatggattcttgaggttttggcttcttgagctttctcttgagtacttgatactgttttctgaatattttgaggtttctaattaatggtatgctagtttctactgttttatataaaaatttatctagtgttgtataaggactttagtattgtggatgatgggagtggctttttgtggcatatggttgttttaattgaaatattttttcagtttattacaagtgtgaaaaaacactcaaaactctggattgttttatttcatttttgttggattatgttaatacattccttcacgtggtttagattgagtcattttatctcacttacttggaaatgtgcagctgatagaagagggattgggtaggagattggcttttacttcataataaatatacagttggttattgtattattcaaaacttattaaatccattcagtttcttaccattttaagtgtattcagtgcctgtgaagccaggcagcagagtattcccactggcttaaaacttaagcgctgatgctcctacagtacagctagttataattccagaaccaaaggcaccaacattatttggtgaccttgactactactttgatagaacagactgggtaattcactgataatgagtcattacctttttaatatgtgattatctagttcagcattttgaatgtgtagtttaaggtctgatttagtaaaattttaaagctaaatagtctgatgactcttgaaagtttaattggtagtatgacatttatgtttttttcccccagactcacagccaatacaaagttttgagactcctaaatgttaatatttttgctgtttttctgagctgtttttttatttacttaccacctaagctgcggatcaaaaagggaattcttccattagaaatttgtagtgttgtgtggccagcacagtatttttcagatttgaatttcagtacctctgtgtagcctcagtactctcaacaccagtcactctttattgtcttaaaatattccatactttttgttgacccaaaattgttgaaaatattttgctcagttttcacaatgaactaactgaaaagtgtagttactgtgttgtaaacatttgtgtagttctgttaatacactgatttgaattttatttatctcaacttcctttagcgtctgcctccaaattttgtctttgctgtatacccactgagatcaattccctagacccctctggctcttagtgtactataatttgggctttataaaatatattgtcttaatttaaatagaatgtgagccctcttttttttttttaagccaaataactacacaaagtaaattataaaagatttaaatagtttgtctacagtgactagactgaaatataaaaattgattgagggtagtttacttcaggtgttagctacaaatgactaaatgtccttaaataatgcagatatctgccctctgaacaaaattttggcaaagtaaatttgtagcaacagacttaacatgatttattgcttatgttgcccatttctgctaatggaaaagataatttaaaaatatgtggcagaggacagatattagaaatactttttggttacagaaaccattgtaaactcatcctcatttataaatggtattatgctagggagtaattggactaggaatgtttaaagataagtaaggaaacaatgtgtgctcaatcgtcaaagaacttagttatatcattgggctttgaattatctaagttgattacataattctatattcttaaggagtcttaactcggtacttgggttaacgccagaaattacttttaattcattgtttttttcactgggatgagtagaactctgcttttagtaaaagtgacagaatataggtaaaatggatgatttgggatcagagcttttcatcttgatattttagcctgtaaaataaacagctatattgttttgccctttaaatgttatatatatttttctgtctttctttccctagttgtaaaagtaaagcatattctttatagaaaacttggaatatcctgaaaggaatcaagaagaaaagaaaaatcacccttataactctataagccatagaatatccacagtagacattttggcatgcttccaaaaaaaaaaaaaaaaaaaa

SEQ ID NO: 24255 - DNA, 2173 bp, Homo Sapiens
attggcttcaacatatggtgtttaaaagtttcccactcaaatgcacacttgaaaattgggtccctcagcctcattactgaactaaataagtgaagaagttgtatctttggggtaaaactttccagggccacttaattttttaaccagttaagtacgcatcttcctggtggttcagactttttaagtcagtgctaaagctgaaaagcgccttctaaatatgactgtgagtttagtttgtatcttacatttagtaactgttctgttgggccaggactatgactttaattactatgtacttattcatcccacactctgcactaaatacaccatagctactatagcattgtggcaggcactcatttttgtggactcattccatacttctgctggcatatttcgtttaaaatctagctaaagattttcatagtactgtgttaactagccagggctgaaaagtgtgacaggatatcaaattgactttccttggggaaaatgttgctttggcaatagtgaagtccaaccccttcatttacagaattagtgattactcatcaatttttgaaagttgtagattaagtagttttatttactaaattcttaaccactttgaagatttaagccagttgaaatgaaacattggctggatgcagttggctagcacctgtaatcccaacactttgggaggccaaggtgggaggattgcttgaggccaggagctcaagaccagcctgggaaacatagatttgaaatcttttcaaaaatgtataaaaatttaataaataaataaatgaatccttactcaaccataattatggctttaaaacccaaccaacagtaaacacttacttgaagccaaaacagtaaattttgaatgaaatttgaattatgcttttggaagctgccatgtcttaattcttgctggattttgattttcaattttggaagtttttatcaaaactgtccagtcatgagtatatcaggtagcagcctttaaggatctaagtttcattcctataaagaacaggaggtgctggtatttcttgtcttagcaagtgatctgatgcaggtctaaatgggggttagcatctatactatggcttaaaagtttcctccttggtcaccatttgggaggtgatggcttcaaagctaagctttgctctcatgtgacccttctttatcttaatacccaataagatataaacctttcagagtcaacccagtgtagactcaaagggtcttagcttcatctatcagataagatctatctgatttatacaaagaatggtgctgtttttatatacatactaaaaaaatctaattctcaaacaattttcttaatatttatgccagcaaggtcaggaaagactattttgtcctgtttaactttagtagtgaacaaactgctagagacatctgtcatccttaacaggccactgtggtccttatatactgaccctcctttccaattaacgtcctttaatcccatactagttccataagagacttggcacataaaagcagtattttttttaatgcctagtaaactggccagaaaaaaatattgccatggtggacctgtttctatccacctctttctatggctatataagtctatacatgccagttccgtacatactccatttccaaagagcccccaaaccctggacagtagcactaccatgaattttagggtcacaaaacatttccttctgaaggaagcagctgcctcagcagtgtcactttagtgaccactgcccaggcttacttcactttgcctccccctacacatcactgccctctttctgccaccaaacctcactattccagcaatgatgcctccctggtgtctggaaaacccatctggtgcactaaaatgctatgcaacaccaaatggcttcttcccctaatattgctcaacaatgtaaattcttcaggaataaacttcatgctaggttaacatcaatgtatggttacagcttccttttttttttttcccttttaaaatgaagcaaaccacctccattaaaatccatgttttggggcttgtttttgtctctcaagtgtgaaatataaatcatgtttttatgatttttgtaaatctttttacaccttgtttttgtaagcaaaagtttcttattaaaagaataaaatgacaaaaaaaaaaaaaaaaaaa

SEQ ID NO: 24256 - DNA, 4704 bp, Homo Sapiens
gctcagttttttcgttttgatggctggctgatcaacatcgagaactcgctgagtctggccgctgtggggaacatgcctcctttcctgcggtacctcaccacacagctgcaccggcaggtcccagggggcctggtgctctggtatgacagcgtggtgcaaagtgggcagctcaaatggcaagacgaactcaaccagcacaacagggtcttctttgattcctgcgacggcttcttcactaactataactggcgggaggagcacttggagcggatgctggggcaggctggggagcgccgggctgatgtgtacgtgggcgtggatgtgtttgctcgagggaacgtggtcggaggccgattcgacacagacaaggtgggtggtggctttcgtccaagggccagcggcccagtgcctcccctgggacctcatttcctcatggaccttccattcccgtctgcacctcaaaggaatgacagcagctgttcttcccagagtggggatcccgtggcactgagaaacaggtgtcctgccccggccaagctatgtccccactgaaacccctttcccggctatttctacaatcagataatgtatttttgtgtgggtgttaccagacagaggcgcgtcgttcccccgctgtccggtcctcggcgggcctgggcctcctgtcccagctgcgttccttgatcttccccgtgagggaagcctgcggggacgcacaggggcctgcagcgcctctcactgcggctcaggggcgaggacgggggaggtgcccagggtttggggatcggtaggtgtcatgacgagggagcattttctggcaaggcaggtcacaccagcacagaggaaggagcggggccaggccggtgcccctggcgtgggatgcgcagggctctgcctgcctctggtctatcagtcctgcccgttcccagagccccagggatgttctcagcccttaatttagctttaaatgagtaaattaatccaataactaaagagcctctttactgcccgtgattctgataatcgaatgagaggtgtgccagaggacaatgggaccgcgcagccacagccagttggggcccagcccctgcccccctgcccttgcagcagcgctgaccgcctctcccgcgccctcttctggcgggcttgtggaacgacgggggtgatgcccagcagcctccagtcgttggagctgatccgaaagcatggcttctccgtggctttgtttgcccccggctgggtgtatgagtgtctggagaagaaggatttcttccagaaccaggacaagttctggggccgactggagcgttatctgcccacacatagcatctgctccttgcctttcgtcacgtccttctgcctgggcatgggtgcacggagggtctgctatggccaggaagaggcggtagggccctggtaccacctgagcgcccaggagatccagcccttgtttggagaacacaggctgggaggggatggccggggctgggtgaggacgcactgctgcctggaggatgcctggcacggaggcagctccctgctcgtccggggtgtgatcccaccggaggttggaaatgtggctgtgaggttattttccctgcaggccccagtgccacccaagatttacctgtccatggtgtataagcttgaggggcccacggacgtcacagttgctttggagctgaccacaggggatgccggcagctgccacatcggtggcatctcagtgttgaacgaaacaagctcaagacacagcctccgacccctccgggtgccccccaccaagctggccagatgggtgggccgctgcggccggcagctgagtgggggctgggtccagcactgctacgaggtgagcctgcgtgggtgcctgctgctagacctcctcgtttgtttctcacggccgccgggtagtcgggaggaggagagcttcacctgtcggcttggagagatccaggtggtggacgctgccagcctgctggcccctctgccccaggtgcaggccgtcaccatctctcacatccgctggcagccatccgcctctgagcgggaggggccccctgctctgctccagctcagctgcaccctgcactggtccttcctcctctcacaagtccgttgcttccgaatccactgctggggagggatgagtgatgactctccgggcagggagctgccgaggccagagatgcccatgttcctggggttggcttttgccacccagtaccggatagtggacctgctggtggaagccgccgggcccggccaggatcgtcgcatggaatttctggtggagcctgtccccaaggaagggttccgggtacctcaggccgagtggggcagggcagttctgctttattcagcccctgcatgagcggatgctaaggccgggtggtctcctggcctcgggctgaggcctcttcccggctgtctgcccctggcctgcgctggacctgctaagtgcccacagtggcagcgaggtcccggtcccggggctggggtgggagaccccgggctgagtgctgtggctttctggtggggggcgatggaaacaggaaaccaagcagtgggatcgcagcgttggtcactgcgaggcgagtggcgggctttctgtttctgccttgtccctccccacggtacctggttcccaggtgaaaatgaaaggaggggagaagttgagaacagaacattccataaaggatatttcctaataggctgcaagatgctgatgccgagaatgatgattttctttcctgcagatgaaactattagaaagggtcttagattgtggcaggtaggctttggagcaggcgccgagacatttctgagcatgaggacgagctacagcagctcctggggtggggctgcctgcgggatggcgggagaggatgccctggagaaccgtcctcccagtgtggaaggcccttttccctgaggagtgggcattctgggccagccggcgctggcttcgtgcctccacgtgggccagccccagctgctccgtgtttcctggcgttggcaatttactgtgctgctgagtgtgaggtcatctccggagcgttttcagcagcccctggctctgcggcgtctcttccgggctgtgggcatgcagggaagtggctctgaggcagtctgcgctgtggccctgcctctgcccagcgagaggccgtgggctctggacaagccgcccttcaggctggggtagcaggtcagtccaggcaggaagcagcacctgccccccgcgccagcccagccccagcctgagtgcaggagctgcaggacccgcgggggcttttccagctactctgttccttcacgtcctcccttctcagcctcgtccaagcaccgggaagacctccaggctgaccccttgagcagcagtcagcacaggtgcgtgggggcgtgagggaggcagggtcttcaccacaggcgccttcctctgtccttcctgctctttcttctctgcccaggccgctgcagctgcacagcctctgctacacctgggctgcctgggaggcttcctggtgtggtgtctggaccccacggccttgggtcatcctgtggctggtctggggtggggtctgttgtggtccttccacggtgtcagtggcctgaagtccctcgcttttggggggggggtctctcacccccaggccacatagggccagtggtaggggttccctctatgtcgggcagtgctgagggctgggatgctctgtgaccccagctggagcccacacctaagggctggcatccacatcatttcaccctgcagtgagggaagaggccaccaggtggcagcacagccacacccgttcccacgtcagaggagggcaaggctgggtactcagcagccactctgagccggggctccttccaggagctgaaatccacctgtctccatcttccttgcctgcctgggtactcatgccaagcagagactgggattaggggttctgtgctcttgcctaattaggaacattctcccatgtctcttgtgtggtcccagaaggagaagtgagtttgccaaggatatggggcaggaggctccctctgctgaccccctgcagcctggagccagcccggggactgtcctgggtggagggcaggtgaacacaagctgctgccggggactgtcctgggtggagggcaggtgaacacaagctgctgccggggactgtcctgggtggacggcaggtgaacacaagcggctgccgcatgtagccactcactcgactttttttcagctgtgaccattcctgggagctctttgagcctttctgtctcatttggaaccagggggaaccaggaaggggctcctggcctctctgtgtcctctgcagtgggggttgtggggggcgcagcatccacgccttgctgcccttctttcatgaagtctgttttttaagtgctggttcccccgaatattttatgcagaggagggaaaatttatagtggcaattattttctcacagtctggtgagcaggcaattaattaggagtaagggggcctagtagagcgtggcgtgtggcagaatcgcaccgccccggctccccagcccaccgccatgcagggctcgcgtgcgggaaaactaatatgccggcgtttaagcctgtgcccctctgctgggtgtaactgcgctgaaataaatgatctgacaatgtgaaaaaaaaaaaaaaaaaaaaaaaaaaaaaaaaaaaaaa

SEQ ID NO: 24257 - DNA, 2106 bp, Homo Sapiens
gctaatggttaggctaaagtagtggtcctggagaaaagtgaagagatgaggctggagatggcaggaacaggcatgcagagccatataagccagtccgataaatctggattgtgtcatcctaggtcaaacaagacccagtgacatgatgacatttatgttttagagagaacactggatgctttgtggagaagtccatcctccacaaaggttggggtggggagtgagactacaggtgttcttaggaggctgctggagaaagaaattaggcaagagatgatgatggcccgaagtggggtagtagatggtaacagagatgtagagaaatgggaaagatttgctaggtaacatgtatagcccttagcacataatgaccattacatgttagcttcctcctattggtacagtagaaagtggaggcctgaagtcctgggttccagtcctgtttgccattactagccagctgtgggctcttcagcaaaccacttttcacccttttagccacatctgcaaagcagggatggtccagataatttctcaggtctcctctggcttctaagtcctttgaattagatgtcccctggcccccccaaaatttggcagctcctgacttaagagactgtaccctacctcccacgccctattgctgctcccttaacagatggcaggatccacggaacctgaagatctcaattcctgctgagggtctgggcagtctaagtaagcaacagcaaggctggtcacaggatcccactatgttaggaaagttctgaaaattgataaggcatacaaggcaactgttcaggccccagggaaaccagggaaaagaaaaaggatggactctgttacccacagcctctaataccttcacaaacttctgatacagcaagttgggcttgggatgattataacgggtggtctccttagaaaggctccttatctgtactccatcctgtagagaattatcagtaccagtgaatgggtgacatatcatgactgcctacgccacaggtcccaggccctctgtttcatgtgcccatctatcaagagctcatacctgcccagtttccactaccaagttggccgcagtcttgttgaagagctcattccaccagtggtttgtgaactccttggcagggtcatgtcctacctgccaggggaataaatatgagctctgagtgcctgcctcacctgccctcaagggtcccctctcccacacatgctaaccttcctcacaaggcaccccccacacaggcctcttgccattccacacacctgacattggggtatactctgtacctctcagaagacctcctagcgcacttctttctagtaccactccatatagtcccctgcttttgtgtgagcctgaactatctcttccttcaaattcttttggtagagagcccatatctctttttccctcccctagtcctcccaaccaccacttcttcattatccactgtcaaatttcttcctttcttcccttttctgggaaagttagaaattttcttctgcaaatttccctttaaactagcttttcctcctttaattaaatggactacatgggggggtaatccaggatgatggctttcccctgggcagatggtaggcagggagctgggggatgtggaagaggccccatggggatcaccttgagtccatccatgctttagcagctgctcctcagcaaacttcatcccacgactcttgacctctggggtgacattcatggtgagaaaaaagtctctatcctcagactctcaccagagaagaagaggtgatatcatccttttaagaagaaagtagaaagtgcccaaacagccatcagttccatcctgactgcttgttaagaattctctgctagttgggtgcagtggcacacacctgtagtcccagctacatgggaggctgaggcgggattgcttgagtccagcctgggcagtatagcaagaccctctctcataaaaagaataaagcggccaggcacagtggttcacatttgtaatcccagcactttggaaggccaaggtagaagaatcacttgagcccaggagttccagaccagtgtgggcaacgtagtgaaaccctgcctctagaaaaaaaaaa

SEQ ID NO: 24258 - DNA, 4313 bp, Homo Sapiens
cagataacacagggacttaaaggctgtgggaagcgtttggatcttactgttttattccaagtgctaaaaggaagccactcatctggctgccaagcggagaaggggctggagtgaccagtggaagctggaaaggtacatttttaaggtacaactttaagttctaatttccaccacaatgccaccagagttctggcagtgacctgccttacacctcaccttgccttttcacgcaaaggctgctaagaatggggaagaatagcaacttaatttcttaaggtctgcagagtggacagattcaatcctagacaaacttacaacatagtacttatttcaggtcctctcctagcactttttttctggtaattcttctgctatattctcctctcacattcactggtgttctcttcccacctctggctatctagaaatcttccatcccaaatagatgggttcatgcttcccatgataggcagaataattattccatcagtgctttttgaatgtcagtaaaacaaattaagccagtcataggaacagattaaaggtagctgcattttaagagggatttatttatttttagctcaaacaaatctcaaaatagattgggacggtatagcccattatttatgggaatatacatttggggaaggaaatatgcttgccagcctgatacactgacaatgttagaccatccttggaagtaagaggaggaggggttcgcataagaagtagtagttgtgagttagtgtcattctcagagcctccacccgtgatgatgggagatgtgtaaaacctaagttttacaaactagtggatgtggtgcccaggctctggtaatgagctgccctgtttctccgtatgagacaagtgataggggctcacaagacattgttccattcattgactactgaaaatataatcaggggattataaattgcctccaagtctccatcactatcctgtttggaagagtgaggttgagagcctggtttgggaattgttaacaaaagtaatgacactgatttgggtgaattatgcctaatattcatgaataaaatcgttatgcatgtaaatgtcagactaactttgtatattaaagtttaaatacaaactttattttgcacagctatttagagggaacatttattgaatagcttttggtattatgaaacttttgaattaactcagtatcttaaatttaagagcagcttggtttctgatgtaattaaaatacttcatttggctgttttcttctgaatctttctacatttttcaaatgtattttattttagagaagaaatgggtctaaagatagcctgatggaagaaaaacctcagacatctacaaacaacctggctggaaaacacacagcaaaaacaataaaaactatacaagcttcccgcctcaagacagagacttgatcctgatgaagggtcaagggtaggggtgggaaggttgtgtgcgccactggtacttttgaaactgtgaaataggtatcttaattcaaatctcagacctgcaagtatttcttcagcatgagaaaatacattatcttttgcttcttttttttttttttttgagatgttatcactctgtcgcccaggctggagtgcagcggcaccgtgtcagctcaccgcagcctccacttactgggttaagcgattctcctgtctcaggctaccgagcagctgggattacaggcgtgcaccacaacacccggctaattctttttgtatttttagtagagacagggctttgccatgttggaggctggtctcgaactcctgacctcaagtgatccgcctgcctcagcctcccaaagtgctgggattataggccatggtttaactacagcacagttgtgctgaaggacctttttgttttaactggaagaataagtattttgtaaaaattcacttgataccacattttcatttctggaacaggatagcaatcattcatttctatcttgtgtctgtgtccaccacaaccaagaccagatgcatctgatgaacattctggaattctgaactgcagctagcctgctgtgcaatagtacaagtgggaggacgtcttcccagggctgggctggttctcaactagtgcccagatgcaaaaggactgaggcatcactttcagactgcatatatttttattcatataaagttctttataatactttattttgtggtgttaagttccaccagttatttacaaatgatgtaaaaagctttaagtgttgttaatttctaaagtgttcttgcgttttcagaagtgtaagtggatctcagttgatctgtcaccccaaacctcaaatgatccatccaccctgcttggccatctaattcacctgctctccccagtgactattttggacctttcctctccatagatgactttgcaatctacagggaaaatacttatgcaggacatcttatatctcccccttaccacgtacagttctctccacagctgccagcagccctaacctttttgtctctccacctgtgctttggatgctcttctcccagccttttcaggatctttgtctgtcctcctatattaatgtattcaattattctctcagctagatccttgctacttggttttaaatttaagactaagattaaacaaaactatctttcacaaccacaaaccccctcccgccaagcaactaagattttcctctcattctcagccagttttcttgcaagcagtatctttagtcattgccctcaattcatctaatccctatcttaagctatctctaacatggatctttccctctactccactaatatcaatcactgtgttacttaatcccagggagaatttttaggacattcttttgcttctttaatataatcctattttgctcctaccactgaccatcctttctggcttatcatgctttaccttgccattaattagtggagtttctcaaacttcagaccctaggccctcttcctctaccaccagcagatctcatttatacccatggccttaaggtttatttctgtagtctagactactgagtaatgtgctactgcaaaaagaccatttgggtttctcaaaggtaatttaaaaattcagctgtttaaatgctgctccccagctgaatctagggtcattatgctcatcagtgtgcaagctggacacctagcagttatggacacctccactattaccacgtctagttggctctgtcatccaactataaacgatcttatttcactaattttactagtccaagctggtctcttgtctagacaacaataagcaacctagttcaactaccttttcttgcaaatctgattttccaccatggatttatcttgctttaataaagccagagggagcctgaagtggtctggcttctttacctacctcttcagcctcattttgtaacactctcacctcccataatagccatcttacaagcctcagtaaggactcagttctaaaacagggcactgaagagggaaagcagccaaaactgtctcaaaagtaagtggactaacggtatcttttttctagcccaagcctctgtatatgtcattcccccagttttgccttgtgaaaaatatgacacatacctttagtctcaactctttctcaggtttccctaagaaaatcctatcacggaactcatctcatagtgaagttttacatttgtgatgacattccctccacttatctatgtttccaaagggaagaactgtgttgtgctcatcatcgtgttctcagctcctagtacagtgctttcaataaattttttgaatacctctatacattatttgtcgcttcctgcaaagcaaaggcagaagatatggcaacattaaatgtacaatttagttggaggaaaaatacgcattgagtgcagtaaagcacacctgtcactagaaatcagtctagttctagccacgatttttgagtcactggaagaaagtacatttctctttgggccaaacacaagctattttaaggctattaattatggtgacagcagtgaatactgatcaaaaaagaacccctcctcccttataactttttagaaatagctgtttctggcagttaatcacttaaaatacaaatgccaaagtgcattaatatatttattcacatcctcactgtcctaaatgtgtatttacagactccagcaggtaattatgtcagtactcctcagactcccagaaatttcaaatgatccaggcaactcttgtgaagatcaaattttcaaaatcctcaccaaggacatcctaagagaaaaaataaagtactcaattcgacagcaaaaaaaaaaaaaaaaaaaa

SEQ ID NO: 24259 - DNA, 3597 bp, Homo Sapiens
catgccagttacttcctcaggaaaatattttcttgccttcttctttcagtatggttttaaatttgggaacagtggataacccaagtgtcccacaggccaaggtatattccaatggcagcatgatccctgcacccaaagccagcccctaaagcctaccccttgtgcacccgcagcctggtaagtgagcttggctgcttgtgaggagctacaagtgaaagagaagttattttaaataaatcccaaagtttgaggcagactgtccaggactgttcccaggaagaagcaggagttacccacaggaaaagtctctgacctggtcccctcaggcccagctacctgcgcccaccagcagtgaaggttgatgtactggcccagcatctccacctcccccatgcaaccaggtccctggtaccgtgtctcccgttgcatgtctggcttctgcctgtgctcctcctgccacgagcatcctccctgtccctcctcattccaccgtgtctctcctgcacacatagcctctgtcccagggcgatttatccacttgagtacaggagctgctcagacctctcagcccagccctctgtgactgccccagccccatcctaccccacccaaagctgccttcctggctgtaggagctccctcgtctagccaaggccctatgggtccccatccgaggatccacaagcaatgacttcccaaatgacctccactgcaagaagaatccttaccactgtttccagagccgtgaacgatgctgtgatggcccaggtctcagcaccaccctctgtgacctaaaaagaaaagctcaatttccatctgtcttctttcccaggaccaaggggacacagtaatgtgaagtcaaatacttaaccgagcaaagggccagtgttgttatcagtcaaggacaaacctcccacctcacagacagccaagcagtgagggaaagacagacagacataggtaggaaggtgctctgcaggcacaaggcccagagaagcccctctccgggaacttcccctgctccttccaggaacagtgagcccagtgagcagtcccagccagctcttcaaggccttcaaggggtctttccatgactgagtcacctccaggagctcacctgacccccagagaagacctaccccaggcagctccgtgccctggcttctccccatgccccaaatcccccccagccatccctcctggtcctcgtctacatcaagggcctcttcccctcttcctcccagctctcaggacaggtgactgggagaccttgaaccctcagcctcttcctttaaaaaaaacaaaacaaaacaaaactgtgggccatttatttgggattttggagttgtttggtttttgtttttatatcttaatagttcgaaagtaagaagggagccctgctatggatgttaagtccaaattactcggttagtgggagcaaaacctatgacttccaaggggatgaggagaggttcagaggacaggaggagcctcccccattgaaaaaaaaaaaatgggtcaggacattccctggatgaggacaatgctaggggtggcatctcacatggctgctgctattcctggtgcttccccacacttttgacagatggagtccttctcctaccgcctcctgccacctcaccctacaggcattctctatgtaggaaacaagagccttatcttatagagtggggagctgagacacagcctcaggtaacactgacacagctcccgaatgaggctgggacactctgcaaacctctcctcatggtgctaagggtggcatgctcttgacaggaaacctaaatgaccactcctctcatttggaaagtaatccactgcagtaaaagtttcagacatgcaagagagagtttttttttttttttactacaaatttttgctcccccataaaattatttttttattagagggagtatccaagttttaaaagtatatagaattttttggttgtaagagaaatacatactcattaggatcccgattaaattccttgagtagactggtgcctaccagaaagcaaagcaaagttaaacaaaacgaaacaaaatccttcatatacaaaaagaactttctgtttgtattggcagaggtagtgaggtgattcaggtaggctgaaaatcctgggttgcgggagcctcactttattccattcccacccgctttgatgtctatgcttggctctctgggctgcccctggtactgccgaatcctacacatctcttatcagctttcctcaaactttaaggaggctctgtgagggatgggtcatgggaagacccaagctttccctccgccaggattgcaaaagcaagtagacttggtctatgcagctcttcttccaacaatttctttatttggaattagaacttcctttgttagtatctttgatcttttgactcaagcacattttggaagggctcccttacaaaagtagaatttaaaacagaggatacagttaaagagcaacccaaaggacgcttaagaaaccgagaccacttcaccgaacaggactaaggaacactttcgtgcacagaagtcagccgcaatccaggcacaggacgaagatgggatacacgtgctcatctgtctgtcctcctttcctctccctccccgacgttctagttagcttgttgacttgttaaaccttctgttcttaaaatgaaaagctagcttacctcaaagaatcttgtttccattcggaaaccaacgattttgtgttttagaatggacagccctcccctcaccactccctaccttggcctggtgtccttgagacatacggtctttgcttagtcgtgtgttggctgctttgagcaggaacgaggcctccaggccctgaggtgggaaggaaggattggatgccactgccctcctccccactttagcatgtaggggccagcccatctcttccagcagggtcctgctgagttaccatagcaaccagcaactccagggtaccacaacagacaatggctcagcgagccgacgtgtggggatgatgcaggggttttggcccagccagaggacccagagttgagcttcaaatgctagagaaggggagaaacaggatggaagggtggtttaaggaactggcaggggtctttgagtcacatagagaagccgttgaaggaggtagggcaggttatctctgttccagtcacccccttccagccccatcccacttctgtttcaaactaaagctcccacctcgaacattgaccctttgttagaacaaagcaaagcatatctttaaacaacagtgttaaaatgagcctcaaatgtatgtggatgagatctctaagaagagggtcttctggttttgatttttaaagaagagtatcctagtaaaatattaaaaaaaaattaaaaagtttttaaaaaggaaacctatgctatttaaattggagcccagttgtaacttggtaaaggcaagcttctgtacctttgttataattaattgtatacctgtgtatgtaaatataaggcattcctattttgcagttcagaacaaaaaaaacttatttgtaatatagaataaagtttattaaaaaataagaaaaaaaaaaaaaaaaaaaa

SEQ ID NO: 24260 - DNA, 1636 bp, Homo Sapiens
gggcgggttaccgggaaggggcgcgagtgcgtgctgtttagccctgtagggagacatgatttccagaagtctttaggaacccagaggccgccgcaagagtcacggaatccgatttcaacctgataatttctaagggactggccacgttcttttattatatggctattgcctcgtaccatatatggcttgaaatcggtagatcattagctagaatttgagaatcctacgacatacggaggttctacagaactaagaatgtaactgtccttaacagggactctccttcagtaaggcgttccactttgtccaaggaaaaggactggcgttacagtagacacctcatagcgcaggagtagaggggagggtgcttcagcattaatattctgcgattttaaaggacttccggaaatgaggggggcgtctcaataatggatttgggcaagtcgtttctttgtgtgtttttctattcctcaagcttaagcaaaaccttaggctcaccgtaaaatcatcctttccacctcttttcagtagcagtgccttcaggtttcatttcctccttcctctgcatatcgatccacaatgcaaattgcaggccctcatcctcacaccaagattcctacacccagctaaagctgtcccagacttcatatccttaactcgagttcacctttttaatcctagaattcaaaggacttatgaactgtgaccatatcttacctagtcagtctcttacacatttttttcaaactgtgcctctgctttttcccccagacccaccgctctgtgcccttatcatgtttttcccttctatttgctaatcccaaaagagtaatttcaagtctcttatccattagctgactaacctgcccataaaaaacgctgttctacttaaattccccggccattcaatgttgtataaccttatgtacaggatgagataatgtttgcaaaagtccattttaaagaaccctcaaagacaggcgccatagatggccacttgcagtgatgttttgttcttccctagctcctgcagatacctaaagatagtccataatctttttgggtctcacttctgcaaattggagttcatacttgcgctatcttttgttgaagaaccctcaagatagttgcaaaaagtattttgaaaagtataaagtgatgggtttaatgtaaatgttttattcaatactactatcctctagactaatttggttgtagttcacattacagtagctgcttcgtaagtgatttttgggctgggcggggtggcttatgcctgtaatcccagcacttcgggaggccatggtgggtggatcaagagaccgagaccatcctggccagcatggtgaaaaccctgtttctactaaaaatagccgggcgaggttgcattgagccaagatcgcgccactgcactccagcctggcgacagagcgagactccatcttaaaaaaaaaaaaagttatttttgttttgggggcagtggtggcatgcacttgtaatcccagctactagggaagctgaggcaggagaatcgtttgaagccgggaggcagaggttgcagtgagcggagatcacgccattgcgctccagcctgggccacaggagcgaaactccatctcaaaaaaaaaaaaaaaaa

SEQ ID NO: 24261 - DNA, 3164 bp, Homo Sapiens
gcagccccggcggccgaacgcccgcggcgcgggactccatcgtcagagaagtcattcagaattcaaaagaagttctaagtttattgcaagaaaaaaaccctgccttcaagccggttcttgcaattatccaggcaggtgacgacaacttgatgcaggaaatcaaccagaatttggctgaggaggctggtctgaacatcactcacatttgcctccctccagatagcagtgaagccgagattatagatgaaatcttaaagatcaatgaagataccagagtacatggccttgcccttcagatctctgagaacttgtttagcaacaaagtcctcaatgccttgaaaccagaaaaagatgtggatggagtaacagacataaacctggggaagctggtgcgaggggatgcccatgaatgttttgtttcacctgttgccaaagctgtaattgaacttcttgaaaaatcaggtgtcaacctagatggaaagaagattttggtagtgggggcccatgggtctttggaagctgctctacaatgcctgttccagagaaaagggtccatgacaatgagcatccagtggaaaacacgccagcttcaaagcaagcttcacgaggctgacattgtggtcctaggctcacctaagccagaagagattccccttacttggatacaaccaggaactactgttctcaactgctcccatgacttcctgtcagggaaggttgggtgtggctctccaagaatacattttggtggactcattgaggaagatgatgtgattctccttgctgcagctctgcgaattcagaacatggtcagtagtggaaggagatggcttcgtgaacagcagcacaggcggtggagacttcactgcttgaaacttcagcctctctcccctgtgccaagtgacattgagatttcaagaggacaaactccaaaagctgtggatgtccttgccaaggagattggattgcttgcagatgaaattgaaatctatggcaaaagcaaagccaaagtacgtttgtccgtgctagaaaggttaaaggatcaagcagatggaaaatacgtcttagttgctgggatcacacccacccctcttggagaagggaagagcacagtcaccatcgggcttgtgcaggctctgaccgcacacctgaatgtcaactcctttgcctgcttgaggcagccttcccaaggaccgacgtttggagtgaaaggaggagccgcgggtggtggatatgcccaggtcatccccatggaggagttcaaccttcacttgactggagacatccacgccatcaccgctgccaataacttgctggctgccgccatcgacacgaggattcttcatgaaaacacgcaaacagataaggctctgtataatcggctggttcctttagtgaatggtgtcagagaattttcagaaattcagcttgctcggctaaaaaaactgggaataaataagactgatccgagcacactgacagaagaggaagtgagtaaatttgcccgtctcgacatcgacccatctaccatcacgtggcagagagtattggatacaaatgaccgatttctacgaaaaataaccatcgggcagggaaacacagagaagggccattaccggcaggcgcagtttgacatcgcagtggccagcgagatcatggcggtgctggccctgacggacagcctcgcagacatgaaggcacggctgggaaggatggtggtggccagtgacaaaagcgggcagcctgtgacagcagatgatttgggggtgacaggtgctttgacagttttgatgaaagatgcaataaaaccaaacctgatgcagaccctggaagggacacctgtgttcgtgcatgcgggcccttttgctaacattgctcacggcaactcttcagtgttggctgataaaattgccctgaaactggttggtgaagaaggatttgtagtgaccgaagctggctttggtgctgacatcggaatggagaaattcttcaacatcaagtgccgagcttccggcttggtgcccaacgtggttgtgttagtggcaacggtgcgagctctgaagatgcatggaggcgggccaagtgtaacggctggtgttcctcttaagaaagaatatacagaggagaacatccagctggtggcagacggctgctgtaacctccagaagcaaattcagatcactcagctctttggggttcccgttgtggtggctctgaatgtcttcaagaccgacacccgcgctgagattgacttggtgtgtgagcttgcaaagcgggctggtgcctttgatgcagtcccctgctatcactggtccgttggtggaaaaggatcggtggacttggctcgggctgtgagagaggctgcgagtaaaagaagccgattccagttcctgtatgatgttcaggttccaattgtggacaagataaggaccattgctcaggctgtctatggagccaaagatattgaactctctcctgaggcacaagccaaaatagatcgttacactcaacagggttttggaaatttgcccatctgcatggcaaagacccacctttctctatctcaccaacctgacaaaaaaggtgtgccaagggacttcatcttacctatcagtgacgtccgggccagcataggcgctgggttcatttaccctttggtcggaacgatgagcaccatgccaggactgcccacccggccctgcttttatgacatagatcttgataccgaaacagaacaagttaaaggcttgttctaagtggacaaggctctcacaggacccgatgcagactcctgaaacagactactctttgcctttttgctgcagttggagaagaaactgaatttgaaaaatgtctgttatgcaatgctggagacgtggtgaaataggccaaagatttcttcttcgttcaagatgaattctgttcacagtggagtatggtgttcggcaaaaggacctccaccaagactgaaagaaactaatttatttctgtttctgtggagtttccattatttctactgcttacactttagaatgtttattttatggggactaagggattaggagtgtgaactaaaaggtaacattttccactctcaagttttctactttgtctttgaactgaaaataaacatggatctagaaaaccaaaaaaaaaaaaaaaaa

SEQ ID NO: 24262 - DNA, 3943 bp, Homo Sapiens
gctaaacagggctcctttaaggcaatatgaactgttgccttctataaattgcacattgaggaactctaatagacaaagattaggtgtcaggcagaaaacactcattgtaaatatactattagttgataaacataggactttcttattccccagtttttctttatcatataatttaaatatttattcattttgtatttaaagactacctacacatagatatatgattccaaagtcatactttctccatccccacattagccaagtgaatacagggccaaatgggttcttggaatgataataacaaagcattacaaagtgggtccccttggttccagccttgtccagagtttttggttatatatttctatttattacaatttaccttttaaattgtaaaataaacctttgtgtggacagagccaatgtttcaatcttgaatgagtaaagaaaatactttggaactgatcctcattttgaaattggttctaaattattatccatttccaatgtctgaaattctcttacttcctgctaaaactctctttctgccaaagttgtttcgtaatctgtctcaatgactataatgtaaaattaaagaagtaaccatgcttctcaagggggaattaaaagtgtttattgaattttactcaggctaattgtttggtcagaaattcctaaggccacagctttggggggttcgtgtagatgtacatggtgggtgggttataaatattgggacttaaggcagcttgttctatgtatttatctttgctcttgggtgacttagggaatgattttatttgatttaaccttctttctgtttgccccgagaatactcgccagtggcgcttgcagttgtagcatttaccccaagataactttgcctacgaaatatttcgcttttattattttcacatcattctagtatatggactttggaaacaaaagacattgttctatttatagcattcttttttttttttagtagcggtatttccatttacaaaatatagtaactcttgattactgaaaatgtcaaatcctagaaaacgtagcatgcctatacatgatgttaacatcattctcgaacagttgttggccgaagattcatttgatgaatccaatttttttgaaatagacaattctgatgttctctttagaaataactcagtttttatcttttttcacattgaaaatcagttagatttgcttaagcctcaaagagaatgtttatgtaaattagcgctggcaatttttttttttctaaacaggaaaagggttaaatgaaggttgataaaatggatgttcaattgtctttctgaaagtgagtggcttgaagggatgaataaatattttcttaatatattcaaaaaagtgcattgctttctgtgatggaagttaagacctaaatgtctggaagttgtaaccctcaacacagcttttcctgatttgctgcaaaggcacatagctgattatagaagtgaagacggcaaggacggggactccagcaaaggaaaccctgttgcaggatttgggaactttcatgcttcagatgaaattcaggcatgtgagcatcactgcagaatgtggtgcatcattgccatcatgagtaatcacttgctgctcctacttctgagaccaagactcttttgtcatattctttagcaataggacgggtaaagactggatttaattgctgttcagagtataaaaactcaattgattccaacatatctgaatgtgcagtaaagtcttaaaagtcaaccgttaatcattaagtcttttgcctctaaagtcttttgcctctgaagaggtttattacatgagttgattttcatattttcattttggtggggttttcctgttgttgggcaaggtggggtcacaggacatgggactagtaagcattttactgtttactatatttgtctttttataaacagtatctcccaaaatgtgattagaaggctaccaagcctgtatttggacatttaattgtgtgctttatataatgtaactactaacagtatttggactgcctgttcattcctggagacaaaaatgaaaatctgtcagttcaagttcttgggtaacatcaagtcattagaatttatctaaagcttatcatgatttgataagacatccattgcatgcagctgttttagctcagtgcaaaacactgaaattgtgattcttagactgtttctgagacatttggatggaaataaatgtataaatgttaattcatgtatataaattagaaacacttttctagattctgtaggcttttgttaaaaatagagaatttcttggggtttacttaggccacagaatggccaaataataataatgacaatgatattactaataataatagctaacctttatttggcacttactgtgtgccaggcactattctatttttttaagaatttttaaaataacagctttattgaaatacactttaccataaacttcacctttttattttttatttttatgagacagggactcacccaggctggagtgcagtggagcagtcatggcacactgtagcctcgacctccctgggctcaagcaatcctcccacttcagtgtcccgagtagttgggactacaggcatgcgtcactacacctaattggctaatttttgtagtttttgtagagatagggtttcgccatgttgcctaggctggtcttgaattcctgggctcaagcgatccacctgctttggcctcccaaaacagtgggattgcaggcgtgagccaccatgcctggctgaaattcaccttttaagatgtacaattcagtggtttttagtatattcacacacaaaattgcacaactatcactaacatctaattttagatcattttgtaacttcaccaagaaaccccaggtctgtcagcagtcagttccattcccccttcatcccagcctctggcaaccactaatctgctttctgtcactattgatttggccagacactattcttctgtgcttctcatgcatctcctgtaataccagtgctacaattctcattttatgtggaaaattgaggcactgagaggttaagtaaattgcccacggtcacacagtaatttgatttacaacagtaataacacattagatgagaacacagtaggacacaattttgaattccatttttatgtacctgaaatgaatacacccctcccccaaggtattttccctattgttagcctttgtaccctaggtacaaatataggtattttccctattgtgttatgtacctgaaatgaatacacccttcccccaaggtattttccctattgttagcctttgtaccctagaactgactggatgtagataacatttgttttcagagtaatggaacactgtatcagcagcatctgagaacataagaacagttggacattggaaagaggtttgttgccctcatccctccttgaacctcttttctctcccgcttccaccaccaccacacatatatacccctttttctcagtcttaagcatcaaacaatttctgcctctttctttttaattctcccagagggatggttaatgcatcacaatttaacttgtctattcaggtattaatagtcaagggatgcatctgtttgcttatagtaccagttatattcctaggaccttagagagcagtagtgtgagaatagaatgcctttctatttgggttaaactatgtgggaggaaaaagtaacagagtaaaggctttgccttaatgaagtcaagtgttctgcctggtgggaagtggccacacgctgcactgcgctgctcttgtttactctgttctttcagagcctttgtactttgccatcactgctagtaatttcttggtccttttcaatactccattttaatcttgatttttttctataaataataaatctgtgaaaaatctgtaaaaaaaaaaaaaaaaa

SEQ ID NO: 24263 - DNA, 3477 bp, Homo Sapiens
ctcaagaatgccagtgtgtgtgtagcctccacagagaggtcgttttctcggagtccagaggggccgcctgagcttctgagaactagggaggagccatcccagccatgagcccctgtgggaatctgctgggggccaagtggcctggagtcctcaggctcccgcagctgctccggagggagaggtgagctcagggcagcctgcctgcagccagaggtgccgggagccccgggcctgtcatggtggccatctacagccggcctgaggcagtcacagacggatttgcagctgagcctgtctatctggtgtgggaagaagatggggagttacttgtcagtcccggcttacttcacctccagagacctgtttcggtgttcagaatgccaggattccctcaccaactggtactatgagaaggatgggaagctctactgccccaaggactactgggggaagtttggggagttctgtcatgggtgctccctgctgatgacagggccttttatggtggctggggagttcaagtaccacccagagtgctttgcctgtatgagctgcaaggtgatcattgaggatggggatgcatatgcactggtgcagcatgccaccctctactgtgggaagtgccacaatgaggtggtgctggcacccatgtttgagagactctccacagagtctgttcaggagcagctgccctactctgtcacgctcatctccatgccggccaccactgaaggcaggcggggcttctccgtgtccgtggagagtgcctgctccaactacgccaccactgtgcaagtgaaagaggtcaaccggatgcacatcagtcccaacaatcgaaacgccatccaccctggggaccgcatcctggagatcaatgggacccccgtccgcacacttcgagtggaggaggtggaggatgcaattagccagacgagccagacacttcagctgttgattgaacatgaccccgtctcccaacgcctggaccagctgcggctggaggcccggctcgctcctcacatgcagaatgccggacacccccacgccctcagcaccctggacaccaaggagaatctggaggggacactgaggagacgttccctaaggcgcagtaacagtatctccaagtcccctggccccagctccccaaaggagcccctgctgttcagccgtgacatcagccgctcagaatcccttcgttgttccagcagctattcacagcagatcttccggccctgtgacctaatccatggggaggtcctggggaagggcttctttgggcaggctatcaaggtgacacacaaagccacgggcaaagtgatggtcatgaaagagttaattcgatgtgatgaggagacccagaaaacttttctgactgaggtgaaagtgatgcgcagcctggaccaccccaatgtgctcaagttcattggtgtgctgtacaaggataagaagctgaacctgctgacagagtacattgaggggggcacactgaaggactttctgcgcagtatggatccgttcccctggcagcagaaggtcaggtttgccaaaggaatcgcctccggaatggcctatttgcactctatgtgcatcatccaccgggatctgaactcgcacaactgcctcatcaagttggacaagactgtggtggtggcagactttgggctgtcacggctcatagtggaagagaggaaaagggcccccatggagaaggccaccaccaagaaacgcaccttgcgcaagaacgaccgcaagaagcgctacacggtggtgggaaacccctactggatggcccctgagatgctgaacggaaagagctatgatgagacggtggatatcttctcctttgggatcgttctctgtgagatcattgggcaggtgtatgcagatcctgactgccttccccgaacactggactttggcctcaacgtgaagcttttctgggagaagtttgttcccacagattgtcccccggccttcttcccgctggccgccatctgctgcagactggagcctgagagcagaccagcattctcgaaattggaggactcctttgaggccctctccctgtacctgggggagctgggcatcccgctgcctgcagagctggaggagttggaccacactgtgagcatgcagtacggcctgacccgggactcacctccctagccctggcccagccccctgcaggggggtgttctacagccagcattgcccctctgtgccccattcctgctgtgagcagggccgtccgggcttcctgtggattggcggaatgtttagaagcagaacaagccattcctattacctccccaggaggcaagtgggcgcagcaccagggaaatgtatctccacaggttctggggcctagttactgtctgtaaatccaatacttgcctgaaagctgtgaagaagaaaaaaacccctggcctttgggccaggaggaatctgttactcgaatccacccaggaactccctggcagtggattgtgggaggctcttgcttacactaatcagcgtgacctggacctgctgggcaggatcccagggtgaacctgcctgtgaactctgaagtcactagtccagctgggtgcaggaggacttcaagtgtgtggacgaaagaaagactgatggctcaaagggtgtgaaaaagtcagtgatgctccccctttctactccagatcctgtccttcctggagcaaggttgagggagtaggttttgaagagtcccttaatatgtggtggaacaggccaggagttagagaaagggctggcttctgtttacctgctcactggctctagccagcccagggaccacatcaatgtgagaggaagcctccacctcatgttttcaaacttaatactggagactggctgagaacttacggacaacatcctttctgtctgaaacaaacagtcacaagcacaggaagaggctgggggactagaaagaggccctgccctctagaaagctcagatcttggcttctgttactcatactcgggtgggctccttagtcagatgcctaaaacattttgcctaaagctcgatgggttctggaggacagtgtggcttgtcacaggcctagagtctgagggaggggagtgggagtctcagcaatctcttggtcttggcttcatggcaaccactgctcacccttcaacatgcctggtttaggcagcagcttgggctgggaagaggtggtggcagagtctcaaagctgagatgctgagagagatagctccctgagctgggccatctgacttctacctcccatgtttgctctcccaactcattagctcctgggcagcatcctcctgagccacatgtgcaggtactggaaaacctccatcttggctcccagagctctaggaactcttcatcacaactagatttgcctcttctaagtgtctatgagcttgcaccatatttaataaattgggaatgggtttggggtattaaaaaaaaaaaaaaaaa

SEQ ID NO: 24264 - DNA, 5943 bp, Homo Sapiens
gcagcgtgtagtgcgagtggggcggacgcgcgcagcccgcccgcccggcgaccagcaaggagttggcatcctttggaagagttcgtgaaagctttctgcccagagctcctggaccaatgcatcttcccaccaccttaaaccactgagcagttcagagccccagttgcagacgacttgtcctgccaccaccatgagttctgaatgtgatggtggttccaaagctgtgatgaatggcttggcacctggcagcaatgggcaagacaaagacatggatcctacaaaaatctgcactgggaagggagcggtgactctccgggcctcgtcttcctacagggaaaccccaagcagtagccctgcgagccctcaggaaacccggcaacacgaaagcaaaccaggtctggagccagagccttcttcagcagatgagtggaggctttcttccagtgctgatgccaatggaaatgcccagccctcttcactcgctgccaagggctacagaagtgtgcatcccaaccttccttctgacaagtcccaggatgccacttcctccagtgcagcccagccggaggtaatagttgtccctctctacctggttaatactgacagagggcaagaaggcactgccagacctccaacacctctggggcctcttggctgcgtccccacaatcccagcgactgcctctgccgcctcacctctgaccttcccgactctagatgatttcattccccctcatctgcagaggtggccccaccacagccagccagcccgcgcctctggctcctttgcccccattagccagacgccaccatccttctcaccaccacctccgctggtccctcctgccccggaggacctccgcagagtctcggagcctgacctcacgggagctgtttcgagtaccgattccagtcctctactaaatgaagtttcttcttcccttattggaactgattcccaagcctttccatcagttagcaagccttcatccgcctatccctccacaacgattgtcaatcctactattgtgctcttgcaacacaatcgagaacagcaaaaacgactcagtagcctttcagatcctgtctcagaaagaagagtgggagagcaggactcagcaccaacccaggaaaaacccacctcacctggcaaggctattgaaaaaagagcaaaggatgacagtaggcgggtggtgaagagcactcaggacttaagcgatgtttccatggatgaagtgggcatcccactccggaacactgagagatcaaaagactggtacaagactatgtttaaacagatccacaaactgaacagagatgatgattcagatctgtactctcccagatactcattttctgaagacacaaaatctcccctttctgtgcctcgctcaaaaagtgagatgagctacattgatggtgagaaggtagtcaagaggtcggccacactacccctcccagcccgctcttcctcactgaagtcaagctcagaaagaaatgactgggaacccccagataagaaagtagatacaagaaaatatcgtgcagagcccaagagcatttacgaatatcagcctggcaagtcttccgttctgaccaacgaaaagatgagctcagccatcagccctactccggaaatttcttcagagactcctggatatatatattcttccaacttccatgcagtgaagagggaatcagacggggctcctggggatctcactagcttggagaatgagagacaaatttataaaagtgtcttggaaggtggtgacatccctcttcagggcctgagtgggctcaagcgaccatccagctctgcttccactaaagattcagaatcgccaagacattttataccagctgattacttggaatccacggaagaatttattcgaagacgtcatgatgataaagagatgagacctgccagagccaaatttgactttaaagctcagacactaaaggagcttcctctgcagaagggagatattgtttacatttataagcaaattgatcagaactggtatgaaggagaacaccacggccgggtgggaatcttcccacgcacctacatcgagcttcttcctcctgctgagaaggcacagcccaaaaagttgacaccagtgcaggttttggaatatggagaagctattgctaagtttaactttaatggtgatacacaagtagaaatgtccttcagaaagggtgagaggatcacactgctccggcaggtagatgagaactggtacgaagggaggatcccggggacatcccgacaaggcatcttccccatcacctacgtggatgtgatcaagcgaccactggtgaaaaaccctgtggattacatggacctgcctttctcctcctccccaagtcgcagtgccactgcaagcccacagcaacctcaagcccagcagcgaagagtcacccccgacaggagtcaaacctcacaagatttatttagctatcaagcattatatagctatataccacagaatgatgatgagttggaactccgcgatggagatatcgttgatgtcatggaaaaatgtgacgatggatggtttgttggtacttcaagaaggacaaagcagtttggtacttttccaggcaactatgtaaaacctttgtatctataagaagactgaaaaccatggagattatttttattggaggaggaagcatcattcatgaaccgatctttttagttgagtcagtaggaaaattaatacagtggataaagtaagaagcaaaagacagggacagagaagtgttgtgtttaaaacccaagcctgtctaaggttactgtgtattagacagggccgaactagtgtgctgagcaaaaagaattgaagcaaattgtatttacttagccgcttctgggagccacttcagcctttcccctcccctccacttcttgggtaatctgacctgaagcatagtccaggagcagagttagccagaaatgcctcctgctgccccagccttagagagctcccatctcaatcattgagcctgaaggcttcaagcccaagaatgcaacaagacccccagcctacatttctcagctcccctggagccagctgatcctgtaacgctgctggaggtcagtctgagctaccaagactgtccctagacaaaggtggagtcccccacactgcccaagaccaaatccctcactcaacctgctgaggtgtggatggggaaacagaggcaaaactgaggcacctgatgcattcagcctgctgtgcagcagtgccattgactgccctgatgttcagagagaaacgcacacaaggtttgcccatgagaattggggagcagatggccaagcagataggttatgtctgttttctgagtgatgaagtcaggaagccctgtggctctggaggccacttgtggttcattcttttcccatatccttggcttttagaaatggttaccttcaggacagtgcagctgcatttatcagagcactattgctaagttttcttttctggcttgtgtttttctgggacagtttagaattgggaggcctattctcatagaacaccaaaaatgatgttcagtgattcatttaacatacaccaatgtactctggctgctggggggacaaccataagcaagacatgcccagggtttgccgtggctccagatctactccctgtaggagttcaaggatcacacaaacggtagtaaccagggttgtgaatctgagtacaccctggcaaggcttctcttcagactgaagcagcaattctgccactaccagcagcaaccaggacgtctgttctttgtgggggccagatcagaagagagaggcccctgtgacgcccgggctgcttggtcacaactctgtccaattcaaggatgtttatcggcctctcttagatcctgagtgagacaaatacagaaatgacccattccctgcccaccagaaactcagaggtgattggggagactgacacaggaaaatgaacttaatcaagagagactgtgatatgtgctaagaagggtgtgagggagggagagatgaattttccctggagggatcctagaaagcattgtcatattgccatctccattagctcacttttaaacaactagggtgctggaagaacctttgtctgagggtagttcatagctggaaatacttggaatattttccagagtctctaaactctcatcttcccccacagatacacatccaagctcacaaataggagtagcaattctaggtggtagggttgtgtacggaacccctggctgtctgcatatatctcagaattaccccaggaccattgtcccaaagtctagagtctttacaggtaggcaaaatttgttttcaatgcctgtgcctcagctgctgtcacaaatacccatcttaggatcccatcagcttcccatcccccaccagacagccacagtaccctcactttctccctattgttctttcaaatcctgttctcaggaaagaaactgccactaattcattcacactaaggtgtaaatgattgataataggaatgagttacctcttcccacagacatttgtttttaagtatgacagagcagggccttaatcccaagggaaaaggttatggaactggagggggtgagctttctgggtagaaggagacttcctgaatttccttaaaacccagtaagagtaagacctgttgttttggaaggtctgctccaccatctaagagcactgtttttttttttttgttgttgttgttgttttacggtctctgagggaatatagtaaaaatgcatatgcacgtgcaatttgcacggcagcatttcaccgattgtggactgtattggctaatgtgtttcctggtctttagatgcaaaccattaataacactatcttatctcatagttttttcaggggtgcttcttgattagtagggaattttgaacacctctttaaatacagctagaaaataaaaccaatttgtaaagccacatttgcatatgatgccagcctcacgcatttgtatatctccagaaattcaggtatgcctcaccaatttgcccgtctttaataaaatcttgtgttaaaatttgcatcacgtcgccttcctatgtatgacgaaacaagaaacagagatttccaattgctcttttgtcttcagacatttagtaatataaagtacctatttttatgctgaaatgtttatacaggtttattaatagcaagtgcaactaactggcggcatgccttgcaacacattttgatatattagccatgcttccgggtaaaggcaagccccaaactccttatcttttgcagtctctctgggatcagtaaaagaaaaaaaaaataatgtgcttaagaagtgggactgtaaatatgtatatttaactttgtatagcccatgtacctaccttgtatagaaaaataattttaaaaatttgaatggaagggggtaaaggaagtcatgaagtttttttgcatttttatttaaatgaaggaattccaaataactcacctacagatttttagcacaaaaatagccattgtaaagtgttaaaatttacgataagtattctattggggaggaaaggtaactctgatctcagttacagtttttttttcctttttaatttcattattttgggtttttggtttttgcagtcctatttatctgcagtcgtattaagtcctattgctagaataggttactacaaaaaaggttatattctgaaagaaaaataactgacattatatataaccaattaatttaaagtattgccatttaaattacacactgagagcatgtcctatgcagacatagatttttctgttcatttatttttcttcattgcagtggattgatttgataaatagatgtgttgaattactacatttgctgtacatattatttaataaactttattcagaattgcgtggcaaaaaaaaaaaaaaaaa

SEQ ID NO: 24265 - DNA, 2275 bp, Homo Sapiens
tggacacaggtgtctgggctccagcctcttgttgagccgtgtctaaggcagaccttgaagttgctgtccagacctgagatgtggagagccgtgggcccagtgcccgttgcctgcctgttgttcctgggagcctactaccaggcctggagccagcaaccaagctcatgcccggaggattggctccaggacatggagcgcctgtcagaggagctgctgctgccactgctgagtcagcccacactgggcagcctgtgggattcccttaggcactgctcccttctctgcaacccgctgtcctgtgtgccagcccttgaagctccccccagcctcgtgtcactgggctgctcgggaggctgcccccgtctcagtctggctggctcagcctcacccttcccattcctcactgccctcctctctcttcttaataccctggcccagatccacaaggggctgtgtggccagctggctgccatattggctgccccgggactccagaattacttcctccagtgtgtggctcctggggctgccccacacctcacacctttctctgcatgggccctgcgccatgagtaccacctgcagtacctggcactcgctctggcccagaaagcggcagcgctgcagccactgccagccacccatgctgccctctatcatggtatggccttggccctgctgagccggctgctgcccggaagtgagtacctcacccatgagctgctgctgagctgtgtattccggctggagttcctcccggaaagaacatcagggggtccagaggcagccgacttctctgaccagctgtcgttaggaagcagcagggtccctcggtgtgggcaagggactctgctggctcaggcctgccaggacctccccagcatccgcaactgctacctgactcattgctcgccagcccgagccagtctgctggcctcccaggctctgcaccgaggggagctacagcgagtcccaaccctgctactgcccatgcctacggagccgctgctgcccaccgactggcccttcctgccactgattcgcctctaccaccgggcttcagacaccccctcgggactctctcccacagacaccatgggcacagccatgcgggtcctgcagtgggtgctagttttggagagctggcgcccccaggctctctgggctgtgccccctgctgcccgcctggcacggctcatgtgtgtgttcctggtggacagtgagctgttccgggagtccccagtacagcatctggtggcagccctcctcgcccagctctgtcagcctcaagtcttgccaaacctcaacctggactgccgactccctggcctgacgtctttccctgacctctatgccaacttcctggatcattttgaggctgtctcttttggggaccacctctttggggccctggtcctcctgcccctgcagcgtcggttcagtgtcaccttgcgccttgccctctttggggaacacgtgggagccttgcgagctctgagcctgcctctgacccagttgcctgtgtccctggagtgttacacagtgcctcctgaagacaacctggccctccttcagctctacttccggaccctggttactggtgcgctccgcccacgttggtgccccgtgctctatgctgtggctgtggctcatgtcaatagcttcatcttctctcaggacccacagagctcagatgaggtcaaagctgcccgcaggagtatgctgcagaaaacatggctgctggcagatgagggtctccggcagcacctcctgcactataagcttcccaattccacgctcccagagggctttgagctctattctcagttgccccctctgcgtcagcactacctccagagactgacttcaacagtgctccaaaatggggtatcagagacctaggatagttgatatagatggaaagatgggtacgttgtcctgtatccagcctttcaacagatgtctggccagacgaagaacattgtgtcctaatggtaggcaggagaccaaggagcagaaggcttgccttcctgggagcaggttgtttgagctgttttagagcagtgagccctaccattacatcctgatatctggggcttctgaaggtctgtgctgggagtgaagagtggcttagctatttacccgctctttggggacagggcaaactaaatgcatcccttcttacctaactcccaacccctgccctgggctgaggcatatgaatgctatagttgtgcattaaaataaatgttttttatctcctggaaaaaaaaaa

SEQ ID NO: 24266 - DNA, 2340 bp, Homo Sapiens
gggaatcgctgttgggaaggcagagcagttgcaaccctctctgcccttgcttcatgtggctggagcccaggcaaggagagcaggagccagcgtgagactgaggccccctggtgcctatcaaggaccagagtgaaggggactacatctcccagcccttcaccttttaaatatgagtggttttaaaaggaaaaaaatgaaaccaggcaacagcaacaatattctgtttttaaaatagggacaagactgttgtcactttttagacatgtatcccattccttttggctctgcaatatttggggctgtagctccttccaagcccatggtagtccctccccgagtctctcccagtagaatgcagcctcccttccctggccccttccctctcagtgacggtgactccctggggccttctcgtggaacccagaggggctgaggactgtggcctggctggcgggccagcgtggtgctcctcaggactgcagcactgagatggaacctggcctcagtttaggaacaggggccacaacagggcaggaacccaccaccctccacataggaatacaaccagtggggccacatcatgtgaggcatcagacccacactgtcagcccagcaggccgggctgtgtccttcagacccagtgctgccctagactctgactcgggactccagcttgccacgtgccctctcccctcttgaatgtactctggtcttgcagtgtgctgctgggactttcttgctcagccatcactctggtcaccttgtttgctctgggtctggctgaattttctgccctgagatctgggcataaagtggatgaaacttgaaagaccttcagtgtagatccagatggccaacctgtccttgttaagttacttgcttcttgggaatcagtgtcccctgctgagctgaaaaggaaatggattccaatctcttccaacctttaaggtgatagatagtttgagcaagactggagaatggacaacactatgaagctgtggctagaaagggactgtcatgtcccatcctttggccagattgactggggatgtccggacagatgcctgcatgggtggtgagggccacatctgcacacgagccagtggctgcttgcagttcactgctgtgatgccagagtgtgttcaaaggtgactctcctgctcttctggactcttctctcaggcaagaaaggctgcaggctgcctactatgtgatgcctgagcacaaagccaaggaactgaactaagtctttctgttaagtcctgagtttgtcattggcaggtttacttgtggccagctctctctgcccttgggtgtctgagcaggcagaccagaagaccaggcactggacctgcatgccaaagggactggtcatctcctgaggacctgtacatgaccctgtggactgttccgcacgatccggaacccactttttattcactccccatgtctttggccttcctcttctttctctttccctctgccatcctgacactgatagtttgtcatataaattccccgggttgtgtttttttttctagaaaaaaattaaaagggaaaacaaaaccaaaaaaaccagaaaccacgaataagaatggaaatgacaatggctgcctgtcatttttctgtcacgattttcctgatttggtttgttccctttgtctcagagaagcaggagatgttgatgaggctgtattttttttttctttttcttgtttttgagacaagagtctcgctctgtcacccgggctggagtgtaacgtggcatgatctcagctcactgcaacctctgcctcctgggttcaagcgattatcctgcctcagcctcctgagtagctgggattacaggcatgcgccactatgcccagataatttttttgtatttttagtagagacagggtttcaccatgttggccaggctggtctggaactcctaacctcaggttatccacccaccttggcctcccaaagtgctgggattataggcatgaaccaccgtgcctggccaaagatgtaatttaaaatagttagaagggacttggcatgggccagctccgtgcatggcattttcacccccagagcttcctaatcctgttttcacacaggaagtttctaggtctttctagaacagctagaaatagtagctgactcccgcccaaggcccaaccttcaaaccctgagctcttcaggctgcatcctctggtgagctatagaggagaacgtggctcctaaactctagccatcctgtgggaggaaatagacttctttgggctgtggcttgcagaacaaactacactttttttccctctattgtttaaattttatttaataaaaaaaaaa

SEQ ID NO: 24267 - DNA, 4055 bp, Homo Sapiens
gcagcccgtccagcagcagcagcggctctctggccctgggcagcgctgctattcgtggccaggccgaggtcacccaggaccctgccccgctcctgagaggcttccggaagccagccacaggtcaaatgaagcgcaacagaggggaagaaatagattttgagacacctgggtccattcttgtcaacaccaacctccgtgccctgatcaactctcggaccttccatgccttaccatcacacttccagcagcagctcctcttcctcctgcctgaagtagacagacaggtggggacggatggcctgttgcgtctcagcagcagtgcactaaataacgagttttttacccatgcggctcagagctggcgggagcgcctggctgatggtgaatttactcatgagatgcaagtcaggatacgacaggaaatggagaaggaaaagaaggtggaacaatggaaagaaaagttctttgaagactactatggacagaagctgggtttgaccaaagaagagtcattgcagcagaacgtgggccaggaggaggctgaaatcaaaagtggcttgtgtgtcccaggagaatcagtgcgtatacagcgtggtccagccacccgacagcgagatgggcattttaagaaacgctctcggccagatctccgaaccagagccagaaggaatctgtacaaaaaacaggagtcagaacaagcaggggttgctaaggatgcaaaatctgtggcctcagatgttcccctctacaaggatggggaggctaagactgacccagcagggctgagcagtccccatctgccaggcacatcctctgcagcacccgacctggagggtcccgaattcccagttgagtctgtggcttctcggatccaggctgagccagacaacttggcacgtgcctctgcatctccagacagaattcctagcctgcctcaggaaactgtggatcaggaacccaaggatcagaagaggaaatcctttgagcaggcggcctctgcatcctttcccgaaaagaagccccggcttgaagatcgtcagtcctttcgtaacacaattgaaagtgttcacaccgaaaagccacagcccactaaagaggagcccaaagtcccgcccatccggattcaactttcacgtatcaaaccaccctgggtggttaaaggtcagcccacttaccagatatgcccccggatcatccccaccacggagtcctcctgccggggttggactggcgccaggaccctcgcagacattaaagcccgtgctctgcaggtccgaggggcgagaggtcaccactgccatagagaggcggccaccactgccatcggaggggggggtggcccgggtggaggtggcggcggggccaccgatgagggaggtggcagaggcagcagcagtggtgatggtggtgaggcctgtggccaccctgagcccaggggaggcccgagcacccctggaaagtgtacgtcagatctacagcgaacacaactactgccgccttatcctctaaatggggagcatacccaggccggaactgccatgtccagagctaggagagaggacctgccttctctgagaaaggaggaaagctgcctactacagagggctacagttggactcacagatgggctaggagatgcctcccaactccccgttgctcccactggggaccagccatgccaggccttgcccctactgtcctcccaaacctcagtagctgagagattagtggagcagcctcagttgcatccggatgttagaactgaatgtgagtctggcaccacttcctgggaaagtgatgatgaggagcaaggacccaccgttcctgcagacaatggtcccattccgtctctagtgggagatgatacattagagaaaggaactggccaagctcttgacagtcatcccactatgaaggatcctgtaaatgtgacccccagttccacacctgaatcctcaccgactgattgcctgcagaacagagcatttgatgacgaattagggcttggtggctcatgccctcctatgagggaaagtgatactagacaagaaaacttgaaaaccaaggctctcgtttctaacagttctttgcattggatacccatcccatcgaatgatgaggtagtgaaacagcccaaaccagaatccagagaacacataccatctgttgagccccaggttggagaggagtgggagaaagctgctcccacccctcctgcattgcctggggatttgacagctgaggagggtctagatcctcttgacagccttacttcactctggactgtgccatctcgaggaggcagtgacagcaatggcagttactgtcaacaggtggacattgaaaagctgaaaatcaacggagactctgaagcactgagtcctcacggtgagtccacggatacagcctctgactttgaaggtcacctcacggaggacagcagtgaggctgacactagagaagctgcagtgacaaagggatcttcggtggacaaggatgagaaacccaattggaaccaatctgccccactgtccaaggtgaatggtgacatgcgtctggttacaaggacagatgggatggttgctcctcagagctgggtgtctcgagtatgtgcggtccgccaaaagatcccagattccctactgctggccagtactgagtaccagccaagagccgtgtgcctgtccatgcctgggtcctcagtggatgccactaacccacttgtgatgcagttgctgcagggtagcttgcccctagagaaggttcttccaccagcccacgatgacagcatgtcagaatccccacaagtaccacttacaaaagaccagagccatggctcgctacgcatgggatctttacatggtcttggaaaaaacagtggcatggttgatggaagcagccccagttctttaagggctttgaaggagcctcttctgccagatagctgtgaaacaggcactggtcttgccaggattgaggccacccaggctcctggagcaccccaaaagaattgcaaggcagtcccaagttttgactccctccatccagtgacaaatcccattacatcctctaggaaactggaagaaatggattccaaagagcagttctcttcctttagttgtgaagatcagaaggaagtccgtgctatgtcacaggacagtaattcaaatgctgctccaggaaagagcccaggagatcttactacctcgagaacacctcgtttctcatctccaaatgtgatctcctttggtccagagcagacaggtcgggccctgggtgatcagagcaatgttacaggccaagggaagaagctttttggctctgggaatgtggctgcaacccttcagcgccccaggcctgcggacccgatgcctcttcctgctgagatccctccagtttttcccagtgggaagttgggaccaagcacaaactccatgtctggtggggtacagactccaagggaagactgggctccaaagccacatgcctttgttggcagcgtcaagaatgagaagacttttgtggggggtcctcttaaggcaaatgccgagaacaggaaagctactgggcatagtcccctggaactggtgggtcacttggaagggatgccctttgtcatggacttgcccttctggaaattaccccgagagccagggaaggggctcagtgagcctctggagccttcttctctcccctcccaactcagcatcaagcaggcattttatgggaagctttctaaactccaactgagttccaccagctttaattattcctctagctctcccacctttcccaaaggccttgctggaagtgtggtgcagctgagccacaaagcaaactttggtgcgagccacagtgcatcactttccttgcaaatgttcactgacagcagcacggtggaaagcatctcgctccagtgtgcgtgcagcctgaaagccatgatcatgtgccaaggctgcggtgcgttctgtcacgatgactgtattggaccctcaaagctctgtgtattgtgccttgtggtgagataataaattatggccatgggaaaaaaaaaa

SEQ ID NO: 24268 - DNA, 1753 bp, Homo Sapiens
cagcaggactgtgattttctttggagactcctagattttctgtggttttgaactgaatttgttggatgttggcaagtgcctcttatgagctgtttctttatcctgcatttgccccacaaagacttatctggaggtgagcaaagtatgtttggtagtgaggtcacaaaggcaatcagccccttcctccccactcccattgccatcttctcagtccttctccctttctttccaagtagtttacccacccctcctctttcctcccctgtccctaaaataatccacgtgtcttcctaaaatctctctttgatcctgtcctttgataacaccgtcagtgcctactactgggtctagacagacctctgttgagcagtcagagtcttccctgactccacaatgcccctttccttggctgaccagtatgactactggtccccacctttcccttgcctatccctacctccctcctactaggttgtcccatccctctcttcacccattcattcatgaccatttttcactaccaagctccccccctcccgaaggaggctgaggtttttgtgactctctagactctattgtgggatggaatgaacattgctaaagaatcttgtgttcgctttactttaaaaaggtatttttttcctaattataaaactgatgtgtcagttacggaaaaattagaaatgcagcacaaatacatgaatattttaccacaaaattgccatataatatcttgtcttttttgggggtgtgaattttttgcattgttctgatcatattctttatcatgtaatttatgttcttttttactaagtattatgtgtggttattatagattttcacaaagatatattgctggtaatatattttattgtgtagtcttataatttacttaaccttctttcaattgttagaaatttaggctatttccagattttcagtattgtaaataatgctgtgatgaccaattttgtgaataaaatgtttttatgtatttcagattattcccttaggatagtctctcagtgccaagttgtcaaaaacatctctattttgcttatcttcctgctctcttgctgccttagggggtagtaaactgaaacataaagtaaacatgcatacaaataaaaaacataaaacaaaaataagcaacctgatggtaataggtgaaagtggtaacctgttttaactttgaattcttgccgggcgcggtggctcacgcctgtaatcccagcactttgggaggctgaggcgggtggatcacgaggtcaggagttcaaaaccagcctggccaagatggtgaaatcccgtctctactaaaaatacaaaaattagccgggcgtggtggcgggcgcctgtaatcccagctacttgggaggctgaggcagagaattgcttgaacccaggaggcggaggttgcagtgagccaagatcgcgccactgcactccagcctgggtgacagagtgagactccgtctcaaataaaaaacaacaaaaaacaaaaaaaacttaaaattctttgcttgttagtgaccttgatcatggttctctttgtacgatagttgggcatctgtatttccacttgtgtgaatttgcctttaaattttggttatgggtttcaccttttaaaataatcaaacatatttatcttttcctgtgtgataggtttttttctgtatcttttcctgttaaacacacagacccctccccaatctggacattgaataaatattcattttcctttgcaaaaaaa

SEQ ID NO: 24269 - DNA, 2135 bp, Homo Sapiens
gtggacagaaaattcaatcctttatttttttctctgtaaatatgtacagtgcacgggctatgagatagcaacaaaaaatgcatagttaatggtcatagactttattccaaaacataattggaaaatagaaactgagccattgccaaatggtaaagaaatgaaaagttttcacagtgactactgaatataccaagagcttttggcagtactgctggctttctgggtgattaattaggtaaacttgaatattcccagtaaatgtttgagaatgcataaaattataccaatttaaaaatataaatttttgccactgttttgtgaacggaggatttgtacgctaaatttcatccttatttggcgtcaaagttgatgcaaagtttatgtaccatgagacttctagtgattgcctactttcacatttatttaaatttttgtgaaagaaaatacagttttaaaggctataggaatgtgttatatgtaccttaaacagataatttaattttagcaatttatcataactgatacttagctaacaattgtccataacttgtttaagtgtaagaaataccatttcaggaatgaaaaagaaggaatactactttctaagaaagaagatcttataatagacatatttagtaggttaaactactcctttgaaagaataagttttggttcaaagtcaataatgaagacgagatttgtttttctcttctctggctgatttttaaggatattatgtagttcatttagttaacagaattgaaatgtttgatatggcaagataggtatggtaatttcaaagtgaattgggaattcctctggctcatagaacccttttttttttcctttaagtattcttgagatacaaaaaaaaaaagtaaataaaatttcaaaaaaaaagttccggatctgtttttaagctccatctggtcctcataacctgcaagatttttcttaaaacctttcagctgaaagtgggggtaaaggtggagtaatctgtggatttgtttctgttgtcttttaaaatgtcaaatatataatatgtaatttttttaaaaaccaccagatacagaaatgtgctttaacatcagttgaaacctaaattttcttatgttgtggtgattgtattaaaaagggataaaagaagagtgtcaaacatggttaaatatattgtactcatttatgttgaatacgtattaaaattaagacaaatggaaaattatactttgagtatataatttgttaaatattactttatatggtaattttatgtataatttcatatattggtaaaattcaaaactacacttgagaatttttttatcttaagtttggggtgaatggggtggatgagactgattgaatagaaaagggctaatggcccaaacattatatagatttctttttttcagtcagaggccttatttgatattttataaataaatgacagtttttatttttaaactttttattgtttttgggaaagtattccttaatttaatgacacattcattcagatacttcttatccctgctaataaaggaaatctatttcaagctacaccattgagattaagtctgaggcagttcattgaggcagctctactataaaagcttacttgataaactgcctcagacttaatctcaatggcccaaacattatatagatttctttttttcagtcagaggccttatttgatattttataaataaatgacagtttttatttttaaactttttattgtttttgggaaagtattccttaatttaatgacacattcattcagatacttcttatccctgctaataaaggaaatctatttcaagctacaccattgagattaagtctgaggcagttcattgaggcagctctactataaaagcttacttgataaataattatttttgtaaacaagttgggttaacttattcttcgtctttttgcttggatatgaatttaaggtcttcatgtttaaagacatttactttgttatttagtgacacatttccatcctattttttttttttttttggttgttgttaaacagaaccttaagtttatgtttgaggtatgtactgcataggaacctattttattattaaagatgaatgattaaaaaaaaaaaaaaaaaaaaa

SEQ ID NO: 24270 - DNA, 2256 bp, Homo Sapiens
gtcgtggaaatgagtcggttgatcactgtgactgacgtacacacgagtggaatccacggcctgatgtttttgttctgtggggtttcgcgttacaggcttatatttaccgtcctgtgctaggctggaagctccctgacggcactatttcctctccgcagggcccagaatgcaacaggtctttgaggattattgaggaagttgctcaacacagaagcttcctaagtcagtctaaattgtgttttaagttattacgtagtagccaatgggcagaaatttttgaatttaaaatgctcagcttcatctacgtggaagccattgcctgctctagtttggtcatttgatcgccgaaacagccccagactttcagcctgtttaggcagctggaacttgttctggaaaaggaaagatgaagatagttctgatgtgctaagaatcttagtgcctagaacttgttctggaaaaggaaagatgaagatagttctgatgcaccaagaatcttggtgcctagcatttatatttttggaattgaattttgaaattattttggccagtgaactcagcttttttttaaaaaaaattaattgtggtaaaatacagcctttctgagaaaagtctacagcattctttctctgcaggttctcttaactacagtgacttcaacagtttttttatactttgagtctgtacggacatttgtacatgagagtcctgccttaattttgctgtttgccctcggatctctgggtttgatttttgcgttgattttaaacagacataagtatccccttaacctgtacctactttttggatttacgctgttggaagctctgactgtggcagttgttgttactttctatgatgtatatattattctgcaagctttcatactgactactacagtattttttggtttgactgtgtatactctacaatctaagaaggatttcagcaaatttggagcagggctgtttgctcttttgtggatattgtgcctgtcaggattcttgaagttttttttttatagtgagataatggagttggtcttagccgctgcaggagcccttcttttctgtggattcatcatctatgacacacactcactgatgcataaactgtcacctgaagagtacgtattagctgccatcagcctctacttggatatcatcaatctattcctgcacctgttacggtttctggaagcagttaataaaaagtaattaaaagtatctcagctcaactgaagaacaacaaaaaaaatttaacgagaaaaaaggattaaagtaattggaagcagtatatagaaactgtttcattaagtaataaagtttgaaacaatgattaaatactgttacaatctttatttgtatcatatgtaattttgagagctttaaaatcttactattctttatgatacctcatttctaaatccttgatttaggatctcagttaagagctatcaaaattctattaaaaatgcttttctggctgggcacagtggctcacgcctgtaatcccaccactttgggagaccgaggcaggtggatcacgaggtcaagaggttgagaccatcctggccaacatggtgaaaccccgtctctactaaaaatacaaaaattagctggatgtggtggcacacacctgtagtcccagctagtcaagaggctgaggccagagaatcgcttgaacctgggaggtggaggttgcattgagccaagatcacgccactgcattccagcctggtgacagagcgagactcagtctcaaaaaaaaaaaaaaaaatttttcttcctaaattagccacgcatagcggttcgtttgcaattcaaaaataattttatgagtagataagaatatcagtttaccgttgtctagtgattttatctaaattttccctgaattattaagtaatattgatttggctttgattctgaagtagtagagtctttaccattataaactgtaaatctctttttgcttaaaaggaaaaaaatgtaaaagataaattccacagagaattattcagtattacattaaaatgttaatgactttttattttaaattgtactaacattaaaagttggcctgaaagtcagatattatgacaaaatttgacattaattgtttttaaagtatagatttcatttgaaattatagaatggtaatgtggttagaggacaccaaagatactgggtcatcagccattaagtatatctatttcaaaattaaaatatttgggaagtaaaaaaaaaaaaaaaa

SEQ ID NO: 24271 - DNA, 1809 bp, Homo Sapiens
ggggttacaaattatctgaagctggtagttcactcagtgtcaaacacacattgagcctcactgtgtttccctcaaatagaaaaccctggcacccctgggttttgctgggatgccccaagacacaatttggaaatagtgggcttgttagatttaattcatagatttagggatttagttacacaactcaactgactttctctaggtcataaagttgagtcagcatagctttcaacctttcatttactttggccacatttgcataaatgattgctattttataccctgaaagttccagcttttttcactgtcccagatggcaagtattttcattttctttattcactctgtatctgcttctagaactacctcaggctgtaccatcttttactcttactgtaggccttctgctaacctgatgggacctggccttcatttgcttctcagtgacatgtgtttgcacactaagctgcccagagaatagtctttgggaaagttttaacttttaagtgatgatgtaattactgttttctagaagctacagttgatccatatgccagaaatgtgagggaggtagatatagtatggttatatacatattgtttagataaggatgcaaataaggttctcacagtagcaaatcctttgaaattaacctgcttctcgcctccttggatatactccaaattgtttagttcattatctttaataattatgatgtaattatgtaaaaagttatgggaagagacattttgcctaatgtcccctccacactaacatagcagttcatttgggtctctagtccttcaccttatgcagaataaaagttaatattttaaggatgcaaggattattcagatggttgacggtcttaacaaagtttcctataaagaatttgtttccaggaaacacggtgactctgctaacgacaactgttaatacgtatcagagcagagtgcaccatttcctgtttttctttgcggaggttgcagtgagctgagattgcgccgctgtgctccagcctggcgacagggcaagactctatctaaaaaaaaaaaaagatttattagctgttgacagaactatagtgaattcttcaccaacttattgagcatcagaatactggtcagcttctaaggtagctttaaaaaacaaggagccctgatttacagaaaaaaaaaaaaaaagccacttttctattcatattatttgccttcccatctaatggtttcccacatagcactgattttttgtaatgctgcttgtatctggaatgtgttaatttgtttttgtttgttttgagacggagttttgctcttgtcgcctaggctggagtgcaatggtgcgatcttggctcactgcaacctctgcctcccgggtttaagcgattctcctgcctcagcgtcctgagtggctggaattacaggcaccctccaccatgcccagctaatttttgtagtttcagtagtgatggggtttctccatgttggccaggctggtctcgaactcctgacctcaagtgatccaccctcctcggccttccaaagtgctgggaattgcaggcatgagccaccacacctggccttggaatgtgttattttggacatgtacgcacttacagtacatttgtaacaataacactctggtatttctacaatgagccaggtagtggtgagataacagtgaatacaacagatgtcatctctaccatcatcttgtctcactttagtggaggacatatttactgtacaaataagtatgtatggtatcaggtggtgataagtgcaccgtggaaaaaaaaaaaaaaaaaac

SEQ ID NO: 24272 - DNA, 2951 bp, Homo Sapiens
ttttcctcgcttgtactactcaattataaaacaaattattaacgatagcttctgaatttggtacatggcatcataggtgaacaaaaaaagccacagttcagagctgatggtcagtccgtctctagtccagcttctataaaaggaaggcgggtttaggtttcaactctctatagttgaatctccatgagtaagaaggagatgccttccttattttcccagactgcccaagattattctctcatcaacacaaggtagaggtttgccacctctacatgaattcacaactccactctgtgactgggtggcacatcagttcgctaagaagttaaactttacaaaatgacgtcctcttcctcttgccggtatgggcctctggcagtgtcactgatcaataggacatggcaaaagtaactacctggagaactaaaactaagcataatcttggcctgaactactacggtaaagatagtatcttttatttctgtttatgtaaacttatcaacaaattattaaagcagaaactctatcacttcttggaactaaagatttacatctagctataacaatagaaacctacctatcctggagttaactttctcagattactgctcctgacttttgctgttcttttccttttgcaagggggtgccaacaatggatggaagaggcaaggagatcttactttataggaatttctccaagttacaacgagcaactgaccaaatcatattcaactacaggtgttgagagagagagtacctgacttcagaccacctgggaagcacaatgcttagttaacaagaatatctggattaagcagtgccgaagtggccgcacaccgagtcaggccaaggaagctcttctgtcattgccgcccaactctgttccactttgcatgcagacatatcaaagactgtgatgaagatcatggtggacaaggaagaatgaaaaactttgtgatgggatctgggcctctacattagagaaagaacctaacaaaccccagttctttggattcgtaaggtgaggctgaggagggcttactggagttggagacagggagagctgtgtttctgggctcaaagccaagaaacggttaagaagaggggcttgcatcagtcatatagattaaaaagagcaaggcatgataattactaaatttatagtttcatgttttaacacagaagagtcagagggaaaactgacaatttaaaacggggcatgggatgagaaaaagtctaggagttactgagatgcctggtacttatctacaaaacttccatcactagacccttttgacctacgagaatagcagtttctatggttcaacctaatacactgtatgggctcaaatatataacaattagaattgagagtaatcagaataccaataatacccccccttctgaaaaagtaacagctcttagatgaagagagcttcttaagatcagcgtttaagagtcaaagcacctgtaagggagagttaacgaccctttcaaatcaagtgagggcagaagggtgagggcatagttcaaaggaacgaggcagctccaccggaaggtggcgagtaaaagctgcacaccgtggcaaatcagtagcaatgggaaagggcaggaaggtacagccaagaatagctacaaacaactggtcaccttcaaaggaaacgctgcatatggatgtctgtgtatatgtactatacatatcaaccaagcacacacataaatatttaatatataaaaaataaagtgctttctaacaggtccctgggcagggacattataaaacatttcacagaactgcaaaacaaaattgatacaatcaaagaacactacatccaacatatgtgaaaacagccaaacacagtatgtacaatctggtgggtgtcccaggacaaacatcctgtcatatacatggtatatacatatatactcttttactcaatatattatgacaatatatattttaaaattttgttatagacaaaaaataaaaaaccaaaacaaaagacaacccctacaaaaacacgataaggatcaagcaggtgagtcctagactgacagacaaatcactgcctccacggggagtcccattgccactgctggggaaaatgtgccagcgttccttccttgggtgcagggcctccacatcctccaaggcactgtgggctgcggcagtaaagttggcatcaccagtggtgagcaggtcgaagacacaggactggaaatagatgtccttcactggcatcttctcatggcattgagtgttggcagtctccagtgtgtagccaggccaggcctgcaccaaggaggtgcgaggcaggctgtgtcccaggatggcagacacctggccctgcccgtcatcgatgcgttcactcagggggcagccgttcacgcacagctgcaggtcctggctctcctcgtaggacatggccaggtcttcaggcatacggatggcaagggtcaggtagcgacccacctgccgcacaaacactgtggtccctatatagcgggcgtgcatctccacatagtggccactctccctttccacgatacgcaggctcttggcatcgctgtccccaccactggtggtgccatccacaaaggcggccggcaggtcatctgtcacagcttggtagactttctgatctgtacactcatggtgggctttgaagataatagtgatctgtgggaaggagcatgtacaaggtttaacagaatgggaaggaagcagaacggggtaaccctctgtagcaagagctccccgccattttgaagctgaatggcttaaggcggaatctccaaaatggacccaactgcttgcacctcaaaaatggatatcactttcagaaaatattttttaaagtcctatatatttagaactaaagtttaaataaatctgtgcatcaaaaaaaaaaaaaaaaaaaaaaaaaaaaaaaaaaaaaaaaaaaaagg

SEQ ID NO: 24273 - DNA, 2970 bp, Homo Sapiens
ggaaagtctttttaatagaacaagaacgatcttaatttaagaatattatcctggtttaacaacagtgccctgtttacaacagattgtgccctatctcatctgcagccgaggaataaaggattccgattagaaagagggttgcctacggattagtaagcaattccttggatcttatgcacagaacttgtaccatttgaatctgttttatgcttaaatcaaagtgctttgatcaaatgcataacctgccatatctttacatatttgttggtagcaatttgtattaaagaaatcacaagtgcaaataaaaagtcatttatcatttgtttaactaaactgtcatggtttagtttacaatttttaaaaagttcttaaaatactgaaaatgcagttgacacttgtgtatggcttatgaagttatttttgatagtcttacattacttgaattgttcaaagtacagtatattttaaattaagaaaagtgaactatatgtatttgttttatacatttaaggcttagactcataaataatgctattgtttatgatttgaaaactttcaggcaaaatccaatttacatttttcccttccctagcaattacttttttccagcttcaactcttcttagttactaatactttgttgactttaaaaatgaaatcattcacaaacttttggtatatgatggagaatgaaaaactagagtcagacagctttaattgacattgtcaacacctccagttatcaggaatacatttttttactgccttaacctgtagtgcgtagaatatgcatcaatttcttgaaggagattcatgtttttataagaattttcatgtaattattgcaattgtggtcaaataaggaacgtttcctgcttgaaattatattgatttaaatgatgtgtgagatgtttcaccattttcaggcactgtgtaattctattgtaataaactggcaggtatctttgtaactataaatagtgcatgctcagccatgtacactgtaaatagcctttaccaaacgtgtttgacaaggaccataattaacatcacttagtgaattgtgataaagaaaaaaaagccatgatttattcgatgtgattggcttgtttttatgtggcgccaagaacgaacctgtttaacagctgtaaccaatggtactgatctatccatccaatgttgtcattatatttgactgtggttcaacagtattgcgttgtcagactaggaaagctaaacgaacaaaatggttttagttttgctgaagactggccttattaatggacagctttcctaacaagagattattaacttttatcaggtgttaacatctgtttcaggaacatggcagtatgtttacatgtcagaagtcttgtttaattctatggtatttctaaattgacttgtttaaataaattcagcaaatggatagcattgttttttatttgcttcaatatgggggtagataatagctaaagagccaaggatgaatttcttcaaatgactttattctgttagctttacataggtgttggaggattcctaaggtgtcagcattttgtaaaggtaccacaaaggagaagttgatagggaatctaattttagaatgtgccaaatggtctgtgctcaacaatataattgaactctctcaactctacctcaccatttctttatctcaaaattctgttggctttgtcaaacgttggattttatttctgcagcctagtatctccccattctaccacctatgccagatgttaaagacagcagatgttttgaggagaatggcattgtggagatgcagagatgcgttgctaagttgaggtggatccagtatagagatacctctatttcttctttatggctcaagagctaggacttggcctcccaaagtgctggtgttacaggtgtgagccaccacacctggccaacatgtggctttcagttcttacttgaagacagctgctctagctagaaacttcctatcggcatctgagccagctggtagagggcattacctcccccacccccaagaacacttcttggaagttacacacaatacataaacttcaatttcaaacagttgcttggtcccactagccatgaagctggatgggacgtaatattctatctgggttgtcatgggccaaattaacattttgagattctgttaggaagatgagaattggataatgggcacctctaacagtgtctgtcagagttgacatacattgtgtatctcctgcaccaaagcatttttgagatcaagtgttcttccagctgagcagaaatttggaaggctattcagtgctgcttagtgtagcagctaataatgttccaacttctatatgatagtttgctttttgttttttgtttttttctagagacagagtctcgttgcccaggctggtctccaattcctgggttcaagcaatcctcctgactcagcctcctaaatgctgggattacaggcatgaaccactgtgcccagtctatatataatagattttagaagaaatttctgccactcagtgactgctttaaattctagagacagaggctgagagaaacttagtagcctgcctgcgcatactgcaagtacagactatataacaagttgaaagagaatcaccctggtatataatattttaaaacatgaaaaaggcattactattgttctggtctaagtactctaacaggacgatgatttctaaccctagcatcatgacatgtatatagtgtgttgtaagacatttgccagctaatagttacagtactgaagcttgtgaatacgttaattgagaaaactttaagcaggttcaaagttatcccatgatagtggcattcttatttgtatatatgtgctttccttttttatttgtatcaaggcatttaaaatgaatatatgtaacatgtacctaagttttaaaagcataataaaatgaacacatctaaaaaaaaaaaaaaaaaa

SEQ ID NO: 24274 - DNA, 1848 bp, Homo Sapiens
gctctgcacccctgctgcttctgctttgaaggcggaggctccatgttgtcccctcagcgagtggcagcagctgcctcaagaggagcagatgatgccatggagagcagcaagcctggtccagtgcaggttgttttggttcagaaagatcaacattcctttgagctagatgagaaagccttggccagcatcctcttgcaggaccacatccgagatcttgatgtggtggtggtttcagtggctggtgccttccgaaagggcaagtccttcattctggattttatgctacgatacttatattctcagaaggaaagtggccattcaaattggttgggtgacccagaagaaccgttaacaggattttcctggagagggggatctgatccagaaaccactgggattcaaatctggagtgaagttttcactgtggagaagccaggtgggaagaaggttgcagttgttctgatggatacccagggggcatttgacagccagtcaactgtgaaagactgtgctgccatctttgctctaagcactatgactagttctgttcagatttataatttatctcagaacattcaagaagatgatcttcaacagctgcagctcttcacagaatacggtcgtctggcaatggatgaaattttccgaaagcctttccagacactgatgtttttggttagagataggagtttcccttatgaatatagctatggactccaaggaggaatggcatttttggataagcgtttacaggtgaaggaacatcaacatgaagaaattcagaatgttcgaaatcacattcactcatgtttctccgatgtcacctgctttctcttaccacatccaggactccaggtggccacaagccctgactttgatgggaaattaaaagatattgctggtgaattcaaagagcagttacaggcactgataccgtatgtattaaacccatctaagttaatggaaaaggagatcaatggctcaaaggtcacctgtcggggactactggagtattttaaggcatatattaaaatttatcaaggagaagatctgcctcaccccaagtccatgcttcaggccactgctgaagcctacaacttagcagctgcagcctctgccaaggacatttattataacaacatggaagaggtttgtgggggagagaaaccttatttgtctccagacattctagaggagaagcactgcgaattcaaacaacttgctctggaccattttaagaagaccaagaagatgggtgggaaggatttcagctttcgttaccagcaggagctggaggaggaaatcaaggaattatatgagaacttctgcaagcacaatggtagcaagaacgtcttcagcaccttccgaacccctgcagtgctgttcacgggcattgtagctttgtacatagcctcaggcctcactggcttcataggtcttgaggttgtagcccagttgttcaactgtatggttggactactgttaatagcactcctcacctggggctacatcaggtattctggtcaatatcgtgagctgggcggagctattgattttggtgccgcatatgtgttggagcaggcttcttctcatatcggtaattccactcaggccactgtgagggatgcagttgttggaagaccatccatggataaaaaagctcaatagcatcttaacgtgaagatcaaacaagaacacaacaagcccctactgatttctgggtttctgccacggccacaggttcatatccagaggaatggcagatctgagacgatccaggaagagctaaaacatggccctgtaataaatgagcagacctctataaaagaaaaaaaaaaaaaaaaaaaa

SEQ ID NO: 24275 - DNA, 3740 bp, Homo Sapiens
gcggctccggggtgcctgatcccagcctcgcggcccccgggttggtggtgacgcctggaatcaggcaggcgtagctggactgggctcttgggccagccaggcgccactgccattgtccacggccataccacctggaaaatgagagagacccaagccgcggcccgtgggcacgctcagcgccactgctcctgccacagtgaggggcgcactctacaactttcagggcccacagcaccaagaggacagggaggagccaacaaaggaatgacgctacgaaaagcacccccaaagcaaccaacaaatccaagtaaaaacacgtctcagggctccgttggttttcccgcgtgggcggccctgcccccatgttccagcccagcccaggcaccctccaccctaccctggccaaaggggcccctgtctaccagatagagcctccctctccaaggctccgttgctctccctctctagctccctcaccctttccctttctctacttccctctccaccttgctctctctctctctctctctctcaatctccccagttcctctctgtctctctctccatcgctgtttctctccttccgtttctatttctcatccctctgtcccttgctctccttcaagttgtctgtgtctttgtgtgtctgtgtgtgtgcttgtgttcccgcgcgtgcgcccgtgtgtgtctgtgtgtttgggagtgggtttgctagtgattgtggtggggtgtgtctggatgtccatcagtacctttgtcccaggatcaggctgccaactctattgccaacgcctgggtgtcacagttgccgtgatagtctcacacacgcagttgtgttcatctcgttcgttttcacgtagacaacgagagcgaaaccacagagaaaagaaacatcccgtgcatcacggcctgatgatggattcctgtttcctgcaaaatggggagtctccaatatagcctgtttgaaaactggaaaggagagcaccgacacgatgctggtcttccacgcattcctggaagtttctggggccccacagagctcgcgaaacagtcaacatggtcacgctttcggggggcagaaacttgagcaacaggcacctttacagagggcaaagaaacgtggaatccagaatcacgcttcagttggcctgagtgtgactcctgtgtggatgggactatccgcctcgagctctgttgcagggctcaacgtggggatatgtcatctgtgaaccatgtggatgaaaaacagacaactacctgggtctcggctcattgctctctggggaattcgctcattccttcggaaacggaattggtctgaattgctccgggacgaagtaacccaggctggtgatccagagggccgctgagcgccccgccggccaacggggctgtgggcccagcactcagcctgtactgggcacccaacattttcccggagttctgggtcctgttggttctggaggcataagaccgtttttgtctctgccttccgttctctgcttcttgctccttttgtcccttggtccatccttccatctgttcttccctccctcccctggctttttcctccctttctccctccctccctctttctctcccttccggggtccctccttccacccatccttgcctagctccatccttccatctcactctgtctccgttcctgtcctcatctctgcctgccttccctcttgcctggaaagggcagcaccctggtttgcgcgaggtctggggtctttatttagtcgcaaggcgctctatggtgctggcgaggaggctggcgggacacgggttggcaactgatggtgagcgaagaggcggaggagtcgagccgcagaaaggagaactggcctggcttctgccccggcccagtgtttcgcggactgaggtctccgccaacccgattgaagaacgcagggggaaaagggatgagagctccgcctgggctagttagaaaactaggctgctgcctggaaacccgcgcatgcgcagtagacagcctacctccctgtacctggaccagccctgggatccccgggatgctcaggaatgctttcttgtcattgttgacagccctcctctgtgtggagtctctcgctggacctggaactcagggatcctaggcaggtcagctggaagggaagacacgcctctccacaccaagcctgaggttcaccgcgaaagagaggccgccaccctgccccaaacccgccccaacctgctcctccagcagagccctgtgttcttcctggctgaggagtggttccagcaaagcgggctcttccacgtccttcagctcccccagtggcgccggatctaggaaaggttgtgccttttgctgaaactctggggttgacaggagctcatctaacaggctggaggtgagtgcagaggagagccccggctcctggagcggttgggaggtgcccggttggctggcatctgtgcttgacgcggaggcctccggggtcacgagctccggaggtgaaggtgccccgtcttcgggttcccatgccgccctggcgacctgcggctccaggcccaccacggactccggtgggacgtgggtggcgcaagcacacctttcccctgtgactcagcttgaggggccccaaggtgtcccactgagcacgcgcccagcaggccatcgcgctgcgggttctggtcttcctgtcatttgttggggttcggaggccaccagggagtctgaggatgggagatccccagtttcggaggggccagggcagtgaacacaaagccccgcatgcccgggcaggttgggagagtccttctgcctgcgcagcctggctgggctggagcagggggatggcccttgctgcctggctcacgaaagccccctgtgggagagccccaggagcgcagggcatgtggggtgcaggaagcgcctttccccacgccccggtgtaggtgaactcggtagaggagggaggagggtgacacccaccaggggtgctaattagtaaccacagtggcctcaaagaactcaaatgaaaggaagacttgcaagtctctcactctaagtccagagctagaaatgattaagcttagtgaagatgcagaattttcatagctagagagaagtcaacgcttggcttcaaaacttcaaaggatgggctgactctctttgaggagcactgcagctggtgactttaagttacagccagtgctcattgaccactctgaaaatctcagggcccttaagaattatgcaaaatctattctttctgtgctctagaaatggaacatcactgtctgggtgacagcacatctgttaatagcatggtttactgaatattttaatcccactattgagaactgctcagaaaaaaaaaaaccgattcttttaaaaagattgttggttggccaggcatagtggctcatacttgtaatccctgcactttgggaggccgaggatcacctgaggtcaggagttcaagaccagcctggccaaaatgatgaaaccccatctctaataaaaatacaaaaaaattagccaggcatggtggtagtacctgtaatttcagctactcgggaggctgaggcagaagaatggcttgaaccctggaggcagaggttgcagtgagccgagaccgcaccactgtactgcagcctgggcaacaagagcgaaactacgtcaaaaaaaaaaaaaaaaaaaaaaaaaaagaaaagaaagaaaaagaaaaaataaaaggaaagaaaaaaaaaaaaaaaaa

SEQ ID NO: 24276 - DNA, 1843 bp, Homo Sapiens
tcctacactaagaagaaataaaatccatgatggaagagatggtggcatctgtatatttaatgggggtcgaggtctccttgaagaaaatgatattttcaggaatgctcaagcaggtgttctcatcagcactaatagtcatccaatcttaaggaaaaacagaatatttgatggatttgccgcaggtattgaaattacaaatcacgcaactgcaacactagaaggcaatcagatttttaacaaccggtttggaggcttatttttagcatctggtgttaatgtgacaatgaaagataacaaaataatgaacaatcaagatgccatagaaaaggctgttagtagaggccaatgtttatataaaatatcaagttataccagctatcccatgcatgatttctacagatgtcatacttgtaacaccacagatcgaaatgccatatgtgtgaactgcattaagaagtgccatcagggacatgatgtagagtttattagacatgataggtttttctgtgactgtggtgctggaacactgtctaatccttgtacattagctggtgagcctacacatgatacagatacactatatgactctgctccacctatagaatctaatacattgcagcacaactgaattccttccctaaagaaaaagtcctgccattgtaacatcataacttaaaacacttttttggaagaagatttaaaatatttgcccatgctacaggaagagactgtattaaaaatggatacacaaggtcagttgacactatgaagctcaagctaccaaaaagaaagtggcaatatattgactcaggatctcaaagctgggtgttttagcattactgtgtaaagacttgaagggacagaagtgaagaaataagctgcaattttgtacagataccaacttctgaaaagctggtgtttttacaactagcattgaatgcagtccaatttgcagtagtaatcttcaatagacaagcagctttgttgctgcctttatggacatgggtaccaattgcttttgtaatatggtaaaaatgtgagctagcacttctgcgttccttttgattttttttttttaacatgtattcagattgagaaatatgattttaatgctttaatctcatgtagtttgtttttaatttcaagcaaaatcttactgtacttgaatgtgccctgttttgttagcacacctagacttgctgtaactgtactcatgtcccagtatgtacgttctttctatgaaagagaaaacactagtcttaaattatatccagcaatgtttctggtatcctttaagaaaagttaagactattatttccttcccttccctgtgcggcattcaaaatcacccctagaaaaagtgagtgttttaatgagacttcctaggaagggatgcactgtaaaacaaaagtattcttgtaactcagttttgtgaaaggtaaaaaactactacgttttaagtacactttagaaagtctcttcaaaacaaacagtcctgtatttgaactctgttcatagtttttttttgaacagtttagacaaaactgctggaaattaaaccaatttcctgcattaagctgagacaagtatatatacagccctatacagtttcatagcttttcctcccccatttatgtgtattggtgacagtgggtataaaacagcctgaaagtgtatgcatgtaccataacatctagacttaatatattgtggagtattcaataaccattatgtagaaggtagataagaattaaaagggtttaatttcctagaaagaaaatggaaaaatggtcatttttaaaaaataaagtttattagatcacaaaaaaaaaaaaaaaaaaaa

SEQ ID NO: 24277 - DNA, 2189 bp, Homo Sapiens
acgcgtccggtcgcatccagtggaagcattttaaaatttcttttactttttggttttcccttaattgctgcttttcagattttagttatggctcgtctgctcaccccttctctacattagggtgtcaaagagaatgttttgctttaaatataaatagccattcatttagtctcagattgtgaatttaaaatggtggataccgaaattgcttgtgtgtgttgctgtgggtttggtttgaaggcaaacacccctagaacatgatattcccatctagtgcatttaaatagaaatcactgagtttgctgcttttttattgtcagcagataggagaattaataatgcattttagctgtgatgtccatttttatgaaattcctactaagagctatgttaaaagtaaaggatggtggtggttgtattaactatatacctgtttaggccattctggctgtggtatttttcaataggtcagcatctgtaaatctgtcagttttatacaggagtgcagagtgaactaggcaactagattaagaggtctaaatatgaaataccagttgaggctgaggacctcttcgtcttcctttaaatgtcttttgcctagggagtgtttaccatttgtgaggcagctttgtctgctcttacactgtacatcctattactccattgggaagtaggttcactttcctctggccttttgcctaagttaggctttgctgaatcaaccctacttttccttttagaaaaggttgttacaggagatttactggcaactgttcttttcccatcaaaaatcagtgaatgtttgctgagtataaatgctgcttccttaaaccacttgtcgctttaggatcaactttacctgtaccttttctcctttcctcccttgccacctcaggtgcaaatctgaactcagtgtctgcttcttccattttctcgtctctctcccctcttcccccattatccatatgacattattttacttcaaatgacagcatcaatcttaaaaagatatacattaaaactaaggagtttttttaaagaaagcctgaataagttcctttccctggtaactttgaaaagcagtcagagttgctatatagatatatgtggctcctttaaaatgctttgtgtatgtgtggtgtttaaaaaaaaaaaatcttaccagttaactttgcagtgtctaggtttgagtgtcataaatccacgtgttcctgttgcaacaaatacccaaaaattgtgtgtgcacttcctaataccagtcttcacccatggaggaacagtgctttttagagatgctttctatttcaatgttggcatactgcctgagggtattgcagttgtgggtgcattccctaatttgtatgatcaagatgaactggcccttttctacttccaagcttttaacagataccaccatatttgacagaattcccagagtgaattgcttgtgttattagtagattcagtgcccccagctgggataggcaagccatgacagcttccctgtttcacctacagaagtcttatctgagggatctattcacagtaagcaccaaggtctccatgtcttgaggtcagtttcattgtcttttgaaaagtgcatgcttcatttgaacaattcattcagcagcagatggactttcagtgatttaaaataaaattttgatccaaagctcaggacacaaaccacagtggtaaaattgagtagcatataatatcagactaaattatctgtaattttccacaacccagattgtatgtgttttatgtgtgtttaaataaatatgttagatacacgtgtatacatacacccatatacaacagatccaagactggctgacttcatttgaaatggttgaatctgctgtgtaataaagtggttcaaccatgattaggaactgaaatttagtagaagagggaaaaggagttaatgtaacaaattattttagctacaaaccccggtaatagagcacttgggggatgggatggggtgggttggtgagacaatcagaatggtaaattgattaaatgctcctaaccctgtaattttgtgcatagagcaccctatgctgtggaaataactgttcttagatttcattgtaactggactgttcaggttgcccagagggaaagaacattcctaattctaataaaataaacttttattttgttaaaaaaaaaaaaaaaaa

SEQ ID NO: 24278 - DNA, 1792 bp, Homo Sapiens
acgcgtccggaaatgcataaaatgcctataagaagtagaaagtcattgaactgacagtgtttgatgcaactaaaagaggattgtaagacatagctttctgcaaacttgtctttaatgcacaaagctgtagtggtgaattaactatctccttattgattctctcctgtacccagatgcaaaaagtgctaagtttctcttgtcctcgtaataccatttggattttatttctgaatttaaatagtaaaatatttatgatgctgatctttaacccacctaaaattttatagtgaaacctgctttatattgttgttctgaagcttacaattgacctatacattgcattcagcaagctcctgaatttagaactgccgtcagtgtagtgtatgctgtgttccatgttgcctttttagatggctttctaccccctgaacaataaataggatgaggttttactgtaattgggtaaagtttactcttggacattatttcgatgctaaagtaaggattctgtggatgttacttaaagagaaaagcataagagcatgaagcatatctgggaatatcttttgcctttaagacgattcattcttgtctagagggaaaatctggctgatttgggaataaaatataatcgaatattcaacaccatgaagataaatcttattttggaaatctactgaccttaataccccaagcttgccctgaatactttgattggaattggaatatatcaaaaaaggttagtatttttgttgtagttaggatactaaaaggatattagttacccaagagatccaatttgtttttctgatgaatagtgttcagtaaaatgaagcagtcttaagagtgactaataatttcaaagtgatttttcgtctattcttaatattttttaattatttatttttaagagttttataccttgagcagatacaatgatctgctttagtgagaggacaatttctgattgattgttttctcttcaggccatctcacctcttcattctcttgttacatttgaagcagttgatataatgggtttatactttaaaagatagacatggtgccatgaagttggggagttgggtgaattatcccattctagttacagaggagctttccttaaatgccctttaacttctaggttttgttcaagaagttcattttctgagtaaaaggtattttcatatatgttgggggaaaattaactcatctaaaaagaatcttattaggtatttgaactctaaaactaacagataagacagatatgtaccttattagagcaccagaactaatttgctaagtcttttgtttagtcctgcaagactgatgcttaatacacagtctgttctcctgtgtctaggtcaggaactccagtttgcttttctgttttgtgtcctggtagcagctgttgagtaactttcattggaggttgggaaggaagtgaggagaaagtgttcttgtttagtgttttatttcctataataggatgctgcctaacccagttcatctctatgtcctgttcactgaatattccgggtaattgaaagaaaatataatggatgggctccattaaaaccagctcaaaaataaattcttgtcagtaaagatttcttgtcaagatgtcttggattgcacttttgttgaggaaagacagtgtaaatagttaaagaatgttgataaaattgaaacatttggttgtggaattgtgtgtggttttagagggtttctgtttgtgaaatgtatgtattaaaaataataaaattccagaaactaaaaaaaaaaaaaaaaa

SEQ ID NO: 24279 - DNA, 1351 bp, Homo Sapiens
gaattcattttcttttcgtttcatgtttaatttcataaaacgtttaacaattggcatatatacttggcattcctgtccaccaaggattgtaatccaagcctgggaaaatcttaaatttctttttacttaaatctggaaatttgtctccattctgccacctttttttttttttttttttatagtggaggggaggaaaggggggtgataccttgcagtaagtaagtcgaaatagcatgcctgaaaatttgaaacagaccattctaacacccaaggcttgtttataaaatacttgagaattacattaatgtggaatcaacagatgcagaagaatataacataacttttaaaagctttcataaataccagcagcaattgtaagcaaatctacaaaggttcttgaacctttctattatatacaaaactgaaaagtcattaaggagttcaactaatcaggaattaaatggtcatttatttcatgcagtatgatttaaggtatttcttgagattctggtcaaatgtcataatcagcaaacgggattaaaaaaaaaactccaaaatcactaaataattatctaaataatggtattggagaacttgtttcctgctatttggaagagattgttgcttcattgctagtttgtatttctaacttctacagttatagactccactgtgctttgtgtctgaatttctcagtatagacattttgtttactgtatgcttgcatatttattttcaactttgcctgtctttaaaattgcttgaggaaaaatggttgtaattaatttctgctacagaaaagccacctggtacgttttgtctcatcaggattgttttaaattctaaactataagtttgttcagaggggcttttgcaatgatagcagaaaactgtacaaatgtacagttagttatagaggttcttgttgaaatgaacttaccatctgatgatatgtatgtgcagctgtgtacttgagtcttttttagtttacttagaaagactagcagtttgacctgttaaacaggactagttcaagtcaagaaactaaggttgttgtatacacctggaggcatctgttattcagcttatcctttgagtgggtatttggcacaatgaggataaacttatgtgacccacttgaatggctgatctaataatgttgacattatgcattctgtacttagtgaaatgtcagatgaaaataactgatgaataatttttttgtattaaagggatgggaaaagaacacatgaatttgttaataaagcactatgatctgcaaacgatggaatgtttcataaagatctaaagaaataaaggaaactttaaaacagaaaaaaaaaaaaaaaaa

SEQ ID NO: 24280 - DNA, 2043 bp, Homo Sapiens
acgcgtccggtgcagctcagcgcctgccacctcctcacggacgtgctgcagcgctatctgcagcagctgggccggggctgccatcggtactctgagctctatggccgaacagacccaattttggatgatgttggtgaagctttccagctgatgggggttagtctacatgaactagaagactatattcacaacattgagcctgtcaccttcccacaccaaattccgtcatttcctgttagcaagaacaatgtacttcagtttcctcaacctggaagtaaagatgcagaggaaagaaaagaatacattcctgattacctgccacccattgtgtcttctcaagaagaagaagaagaagagcaggtgcccactgatggaggcacatcagcagaagccatgcaggttcccttggaagaagatgatgaattggaggaggaagaaattattaatgatgagaatttcctgggcaagagaccactggatagtcctgaagctgaagaactgccagccatgaagcggcctcggctattaagcactaaaggggacacgctagatgttgtgttattggaagctcgagagccactcagctcaataaatactcaaaagatcccaccaatgctttctccagtccatgtacaggacagtacagacttggcacctccctcacccgagccgccaatgttggctccagttgcaaaatcacaaatgccaactgcaaaaccattagaaacaaagtcatttacacctaaaacaaagactaaaactagctctccaggacagaagactaaatcacctaaaaccgcccagtcaccagcaatggtcggaagtcctattcgatcaccaaaaactgtatccaaagaaaagaaatcacctggacgttccaagagccccaagagtcccaagagccccaaggtcacgactcacattccccaaacacctgtgagacctgaaacgcccaacaggactccttcagctacactcagtgaaaaaatcagtaaagagactatccaggtaaaacaaatacagacaccccctgatgctgggaaactgaacagtgagaatcagccgaaaaaggctgtggtagcagataaaacgattgaggcctctatcgatgctgtgattgcacgagcctgtgctgagcgagagccagatcctttcgaattttcttctggatcggaatctgaaggagacatttttactagccctaagagaatttcaggcccggagtgtactactcccaaagcttccacttccgcgaacaatttcacaaagtcaggatccactcctctgcctctttccggtggaacctcaagttccgataactcatggacaatggatgcctccattgatgaggttgtacgtaaagcaaaactgggaacaccttcaaatatgccccccaactttccttatatctcttctccgtcagtgtctcctcccactcccgaacctctccacaaggtgtatgaggagaaaaccaagctgccttcctccgtggaggtaaagaagaagttgaaaaaggaactaaagactaaaatgaaaaagaaagaaaagcagagagatagggagagggaaaaagacaagaacaaggacaaaagtaaggagaaggataaagtgaaagagaaagagaaagacaaggaaactggcagggaaacaaagtatccctggaaggaatttcttaaagaggaagaggcagatccctacaagtttaaaatcaaagaatttgaagatgttgatcccaaagtgaaattgaaagatggacttgtgaggaaggagaaagagaagcataaagataagaagaaagatagagagaaaggcaagaaagataaagataagagagagaaagaaaaagtgaaagataaaggcagagaagataagatgaaagccccagcacccccactggtgttgcccccaaaagagttggccctgcccttgttcagccctgccacagcctccagggtcccagccatgctgccatctttgttgccagtgcttccggaaaaactgtttgaggagaaagagaaggcgaaggaaaaaaaaaaaaaaaaa

SEQ ID NO: 24281 - DNA, 1285 bp, Homo Sapiens
gttggtattaataggagttacctatttaattctcccagtcatcaatgaggtaatcatcaattcctatagttcaaattagtcataaacaagagctacagcaagactgatagagtaaaaactatataaatacagtaaaaaaaaatagaatttatggtgtgaaatatgaagtatagcaatatataacaagaacatgtaagcacttgcttccacagcataaatgtaatttacatctgcattaaaggataattttctctgtgaataagagcaaaatggtcttcagagaaacagactgttcatttgaagccatttctgtaaacatcttccaagatagaactgtaatggattgaggaaataacacagaaaagacaaaaacttttgatttcaggcatgcaaagtgcgtgggcagatggacagttcccattgtgcattgcctttgataaattgggccttaatttatataacgatgctgtgttcacatccctctcctacctaaagttgtctttattggtttatattgtgttaaaattagcttataattattacttttgtattgtgttcagttttttaagttgcatgtttatactatttgctacagtatttttaagtttggggtgaaggccatcagctgtatcaaaaagacaaaacaatcactatttattcagtattgctgctttacatctccagaataagctttcgatgccaggacagtgactgcctgaaagctgcaggagctcttttcaatgcattttatatatttttagaaaccaaataaatgcagaaaactatttagtatactaattatattaaaccagcagaaatataaaggcaataaagtatatacatatatatggggggaggggaaagattaaaaaatagatttacagccagacatggtgatagccctaaatgtatttctcaatatgtttttctttattgaccctaggaggatttgagttgctgcagctttaaacagaaaattgccatgttcactaattgtgagcacataaatatgcttttagtactgctttgcttatgtacaaataaatctgtaatatgtattatatgtaattatccttttctttgactttcattttaaatgtatattttctgatcattatgagctgtaaaacaaagaatcaatattggatattctcccaaataataaattttcaggattcattggggcaaaaaaaaaaaaaaaaaaaaaaaaaaaaaaaaaaaaaaaaaaaaaaaaaaaaaaaaaaaaaaaaaaaaaaaaaaaaaaaaaaagggggggccgttttaa

SEQ ID NO: 24282 - DNA, 1676 bp, Homo Sapiens
gctagaagctggagatacagtgatgcacaaagcaaatgtattctgtgtcttcttgattatagtctagtagggaagagaaaaaggtaaccaaaaaattacaatatgatgtaatagattctgtgataggaaggtgcagggaactgtgggaagggatacagaagtgtatgattcaggaaagactatatgaggaggacctcaagcacaagtgggaattaaatggaaggcagaggaggacgagagtgtttgagacaaaagacacaggaagagccaagaatgcaaggtgggaaccttaatagtgtgttcgagaaatcacaagtagttcagactcagcttgaggaggggaccgtgaaagctgagagtgaggcttgtgtgcccccttaaggggcttgctctcctcccaagagctatggggagtcacaggattgcaggcaggggagtgatgcagtcctgtgtgtcttagatcactcaggctgaggcaagactgagacaggaagatcaatcttttgcagtgatccagatgagaaatgatgtgagcctggaccgtgagaaagacgagacagtgtatgcatagggtatagacttgagagagggatttgagatggaatcaagagttgtgttaattcattggcctatcaaacagagaagaaattggagtcaagagtgactcatggccagctgggtggcaccagtcattgagatagagaactaagagaactgatttcccaaagaaaatgagctgttagatttgatattcccaatggacatcagcaagagatgtctactaggcagtagggcacatggatgtgaagcctatgaagcagatttgggctgtagctgtagatctgggtgggggttctcagccctggggcttcaccctatcctcctccaaagccctaccctctgcctgaggccaggtccccagtccctagccccttcccccgccaggtgtacagtgccgatggagagttcctcttcaagtttggctcccatggcgagggcaatgggcagttcaatgcccccacaggagtagctgtggactccaatggaaacatcattgtggctgactggggcaacagccgcatccaggtattcgacagctctggctccttcctgtcctatatcaacacatctgcagaaccactgtatggtccacagggcctggcactgacctcggatggccatgtggtggtggctgatgctggcaaccactgctttaaagcctatcgctacctccagtagctgtacagaggccctgcctggcttgtggagggacagacattggggtgattggacaagagggtctggctgggaggtgggccagacctggcagcactgaatgtgggctgtgggcatgggtgcacccggtgccctccctctcctacccccacccccacggttgcactttatttattcggttcttgctttggtgactgggtgagtctggactgtggtcccaaggatgtgtgcagagcttcaccctacccttcttacacacctccccacccctgtcagtctgctccccatcccccagcctggggccagaacagcctaccccaggacaggagtccctctagttgtctccctaccaccctatacacactgacagagacagcaataccccaccccccatattaaataaatgtcttcaccaagaaaaaaaaaaaaaaaaaaaaaaa

SEQ ID NO: 24283 - DNA, 2499 bp, Homo Sapiens
tgacagcagttggtaaactgcttttagggatactggctgacttcaagtggattaataccttgtatctttatgttgctaccttaatcatcatgggcctagccttgtgtgcaattccatttgccaaaagctatgtcacattggcgttgctttctgggatcctagggtttcttactggtaattggtccatctttccatatgtgaccacgaagactgtgggaattgaaaaattagcccatgcctatgggatattaatgttctttgctggacttggaaatagcctaggaccacccatcgttggttggttttatgactggacccagacctatgatattgcattttattttagtggcttctgcgtcctgctgggaggttttattctgctgctggcagccttgccctcttgggatacatgcaacaagcaactccccaagccagctccaacaactttcttgtacaaagttgcctctaatgtttagaagaatattggaagacactatttttgctattttataccatatagcaacgatattttaacagattctcaagcaaattttctagagtcaagactattttctcatagcaaaatttcacaatgactgactctgaatgaattatttttttttatatatcctattttttatgtagtgtatgcgtagcctctatctcgtatttttttctatttctcctccccacaccatcaatgggactattctgttttgctgttattcactagttcttaacattgtaaaaagtttgaccagcctcagaaggctttctctgtgtaaagaagtataatttctctgctgactccatttaatccactgcaaggcacctagagagactgctcctattttaaaagtgatgcaagcatcatgataagatatgtgtgaagcccactaggaaataaatcattctcttctctatgtttgacttgctagtaaacagaagacttcaagccagccaggaaattaaagtggcgactaaaacagccttaagaattgcagtggagcaaattggtcattttttaaaaaaatatattttaacctacagtcaccagttttcattattctatttacctcactgaagtactcgcatgttgtttggtacccactgagcaactgtttcagttcctaaggtatttgctgagatgtgggtgaactccaaatggagaagtagtcactgtagactttcttcatggttgaccactccaaccttgctcacttttgcttcttggccatccactcagctgatgtttcctggaagtgctaattttacctgtttccaaattggaaacacatttctcaatcattccgttctggcaaatgggaaacatccatttgctttgggcacagtggggatgggctgcaagttcttgcatatcctcccagtgaagcatttatttgctactatcagattttaccactatcaaatataattcaagggcagaattaaacgtgagtgtgtgtgtgtgtgtgtgtgtgtgtgctatgcatgctctaagtctgcatgggatatgggaatggaaaagggcaataagaaattaatacccttatgcagttgcatttaaccttaagaaaaatgtccttgggataaactccaatgtttaatacattgattttttttctaaagaaatgggttttaaactttggtatgcatcagaattccctatagatctttttgaaaatataggtacctgggtatcacacatagaacttttaattctgctggtgtaggctgttgcccaaacatctataattttactgagctcttcaagtgattctgataacacagcctggattgagaatttttataagattggcaatggaaaaacatttattcttttaaataataatttttttaaaacccaagaggtcaggggattttataaaccaatagccaagtgttctttaaataggaggcacccttcccattgtgccaaaatcatcttttcatttattttgaaatttgtatgattattttatacttgtatgttgcctttcttcgaaggcgcctgaagcactttataaacacaaatcctcacaatacctctgtgaggtaggtaaatagtacttttctatgtagtaaacctggaatatggagaatttcataacagttcattctacttaataatgcaataatggagctccaagttgtcttggacttctacaccacactcagacttctggaaagttttctgtacctcattctttagtccctgtcaaggttagtaaataaaataagtgacataaaaaaaaaaaaaaaactaaactacttgttgtgttgaaagttcctttttgccagttatgttcaggaaacccaataacctgaaaaagtttgactttgatgtgacatcttcatattcatcaatgctgataattgtccaaaggcatcttcactatgtctgctaaataacatccaatgtgggcgttatctgttgtctaggggatgaattttaagttacaataaaatatttttctttgttttgcatcaaaaaaaaaa

SEQ ID NO: 24284 - DNA, 2625 bp, Homo Sapiens
tgacaactggaaagctccccaccaaaccctccagccttggttacttcttaatgatgtggtttggcacaatgaaaatgtcataggctttgtggtgaaactgacttctgcctccactcctgccaacacttattattagcctcttaagtccccgagcctgtttcagaggtaatctcacacaaaggctagagaattaaaaaacatgtagagagcctggcactaatacctacctcccccaccagcagctcttaattatgagatcaaccactattattttagaccagagttttgttggggattgggtttgtttcagaaggcactattttaaataagatgtgtagcttctatttagatatttgcctttaaagtcagctgagctattttcctattgtttgcaaatttacttttatttaaaaaaataaaatttcctaaagcagtgtttccccaatatgacagtcatcagaaaaaaccacctagagttttctaaacatagattccagtgattgtaaatcagaatctgagagtgggactagaaaatacttaattctatcctgtggtacaagctggtctcacacttgcatctttgcacctaagactagatcaaactggtactaatcctctggccccagcatcccatccttggggaaatagtctagtttagaggtagtcctggactggagcgctaagtccagcattcctcacctgcataacactacccacatgatcatatgtcccctgggctctcaagctgataggaaaaagtcgtcttgctaaatgaaatcccccaacctcttggtaatgtgaagaactgtactgcaaagctttgaagcaatcctatgttaggcatgcgggtgggaacggggccagacagagggaaaaaatggaatagaatgatccgagagtaaataattcttgctttattatgaaccaagtcacattttgtctcttccaacagatgcttgagccaaaaaagcaaacataggcagaaatacaattgagaatatcttcatgtttcaacctttaatctgacttgccttttactatcctttccccatttcttctaatctcttttgccttacaatatattaccttctaggtatcacctcatcctatagaatcccttctagtttaatgtcctgccccaaacaatactaacccattgaagataactatgaaacctttaaatggacagtggttccttttaaaagcagccttactgaaaattttatatacacttaaatcaagtaacagttaccgtgagttttctaaacttttgtgttaacagaaatgccagttcagcagtgtgactgttacttttaaatgtctgtcttgccgccctagagtgacagacatcccagttaaacatattaggaataagaaatacataaatccaatgaagactgtagaaaaagaattttagcacttgaaggaacttcagtcatttaacccaacccattcatgttatagattgagaccatagaaataaaagtagcctataggatacaaaagttagcggcagatctgagataaaaatccagctctttggatccccgcgtttttcaccacacttagctgtcgttcccatgtattacgaacaaagaatcaaatataatcaagtgcagcctcacttcacaggcaagaaaacagactagagtttaatatattgcccatgtttatcttaaggtgaaacatttactcttacaaccacagttgatgttaacctagttaataaaatatgaaaggtaattactaggggaattttaaacggcactacataagcaaacatgactcaaattactttttccatttctgcttcccaaattattggagttactgaagcaagctatgctgctttcaattccaatgataggcatattcccaaataaactcatttaaagagctcataaaatgaattatcctatttccaagtcagttgattagcaaattaagatacagctccaagttaccctactgcttaagggttttccggtccaatttgtaaggttttcggatttaaagattcagactgcataccaaaggtggacaaagacaacgcaagctgatttaggttgtcacgtggcacatactctagtttaaaccctcaactacaagaaaagaaatggtgtattgtcatttttgccaaagcaccccaaaatgaaatactttcttactcaatctaggttcttttttttcattctagtcccttaagctcctaggatttttagatgttgaaaatactccctgcgcccggcattcaatattgtatggttcattaggatctgttgtggctggctttggacattttttgttcactagtagaattagaagatcatgtgatgttggagtaggagggtttatcttggtgactttgggatgctggtttcattgtaggtataattatgcaaagcaaagaatccaggaaagaattgccagagaagaaattaaaaagaagatattatatgaaggtacccacctcgatcctgaaagaaaacacaacggcagcagcagcaattgaacaatcttgagcatagaagtcaatgtaaacgaagttaagatcaaccacataaaacatttcatgtgcaataagctctcaatcaagtaaataaagtttaagttgtaaaaaaaaaa

SEQ ID NO: 24285 - DNA, 4408 bp, Homo Sapiens
gcactagagtgtgcatatgataatctttgtcaaacagaaggagtcacagctcttccttacttcttaatcaagtatgatgagaacatggtgctggtttccttgcttaaacactacagtgatttcttccaaggtcaaaggacgaagataacaattggtgtatatgatccctgtaacttagcccagtaccctggatggcctttgaggaattttttggtcctagcagcccacagatggagtagcagtttccagtctgttgaagttgtttgcttccgtgaccgtaccatgcagggggcgagagacgttgcccacagcatcatcttcgaagtgaagcttccagaaatggcatttagcccagattgtcctaaagcagttggatgggaaaagaaccagaaaggaggcatgggaccaaggatggtgaacctcagtgaatgtatggaccctaaaaggttagctgagtcatcagtggatctaaatctcaaactgatgtgttggagattggttcctactttagacttggacaaggttgtgtctgtcaaatgtctgctgcttggagccggcaccttgggttgcaatgtagctaggacgttgatgggttggggcgtgagacacatcacatttgtggacaatgccaagatctcctactccaatcctgtgaggcagcctctctatgagtttgaagattgcctagggggtggtaagcccaaggctctggcagcagcggaccggctccagaaaatattccccggtgtgaatgccagaggattcaacatgagcatacctatgcctgggcatccagtgaacttctccagtgtcactctggagcaagcccgcagagatgtggagcaactggagcagctcatcgaaagccatgatgtcgtcttcctattgatggacaccagggagagccggtggcttcctgccgtcattgctgcaagcaagagaaagctggtcatcaatgctgctttgggatttgacacatttgttgtcatgagacatggtctgaagaaaccaaagcagcaaggagctggggacttgtgtccaaaccaccctgtggcatctgctgacctcctgggctcatcgctttttgccaacatccctggttacaagcttggctgctacttctgcaatgatgtggtggccccaggagattcaaccagagaccggaccttggaccagcagtgcactgtgagtcgtccaggactggccgtgattgcaggagccctggccgtggaattgatggtatctgttttgcagcatccagaagggggctatgccattgccagcagcagtgacgatcggatgaatgagcctccaacctctcttgggcttgtgcctcaccagatccggggatttctttcacggtttgataatgtccttcccgtcagcctggcatttgacaaatgtacagcttgttcttccaaagttcttgatcaatatgaacgagaaggatttaacttcctagccaaggtgtttaattcttcacattccttcttagaagacttgactggtcttacattgctgcatcaagaaacccaagctgctgagatctgggacatgagcgacgatgagaccatctgagatggccccgctgtggggctgacttctccccggccgcctgctgaggagctctccatcgccagagcaggactgctgaccccaggcctggtgattctgggcccctcctccataccccgaggtctgggattcccccctctgctgcccaggagtggccagtgttcggcgttgctcgggattcaagataccaccagttcagagctaaataataaccttggccttggccttgctattgacctgggacttggtcctccatgcagtttttatttcttgtcacagtgactgatagccatcccccaggatcctttccccttggccctgagggggtgacccaacacagaccaaatggggaaatgagcaaccagctcctgcccagagccactgcgggaggtggcaccctcatccccggaatgtgctgcccaccgcaccgcaggctcctcctgtgggggccctgggcatgggtgagggtgggaccccgtgagcgcactgcaccctggccctggtggagcgggaggaggaggagagccgagctgggtacgagactaaagggcccacatgacccagtgacgccagatttccaccgaggactgagtgagctgctcagacatggctttctgcctcccagcctgtcctccactgtgggcatagcatctgtgcctgcctgcctgcttgagggagaggagtttctgctgctgccttgagctggggggaagagcccaggggcagatcctggcagctgcctggatggggctcctccctgcccttatgagcaggccaggcccagaaaggccgagcctgggctgccttcctgccccagccgagggaggggtcagacggctctaccatgggtaactcaggcaagagctggttttcctctttattctgggtgtgtgcagctgtgaggccccaacccaggagaggccatggcctaggtacctgtgaccaccctgcccccgtgtagagggcatcgtctttcctgctattttattctttcagcttttgtcttaggcccagaatcaaagtgaaaattgagtcgagctgacccttacaacagtaggatttagtagggtagatttcaaatgaggcttcgcttctcccaaagtagccagtccaagttccagtggctgtcgttcagctcatgggagcttcatggggacacagccggcacaggtgcagggcccgagtccgcccacccagcctggcgctgaaactgcacacgtacactatgtggtttaagagcactttattattgttcttaaggctacttttaagtacaaaaaaagatggcctgccaaacctttttttttcttcttccaggaaaaacaggccacagagaatggtatattacagatttacacacatgaagagaaggtcagagcgcactgcaggcagcgcggctctgggaagaacttcacggagccccttcttagagcagggagggggctttctcagtgaaatgtttggttttctgctgcctcctctgccccaggcccccctccagggtactgcctatcccagataggtcagtgcaccagggacccggccgccagcaccgccgacccctcccagagtgacgcccttgttcactgacaaagagacctgtcccaggagtgtcctccaccgagccggtcagctgtgggtggttttcctgttacgacgctcagtagcctgtagcaataacaaactcgtggctatgaatgcagatgcagtgttctcatagaataactgttcctgcacttttacagacaaatctacgacaaaaaaaaagatcaactttttttttccgaacaacaaaaaaaatgaatgattacaataggaaagggaaaaattaaatagctacatatcattaacaaattaatgttcttcaaaaaatacctacaaatttctctgtacattctttacgcacagcgtaacgatggtctcaaaatcacccatatagaaaagtgttctcaacgatttttcctacagaaaatataggggcctgaatgccaaagcttggaagcccagtacagtgggagtgaaatgtgtgcggggcaaggagaagggcttttctttcctccacttttcaaaggcctgcagccactctgtgactacaagagccagtcctccgaccttttcacccagtgccaatttccaaaattcaacagctaaaaactgtaaaaccgggggtcatacggtgtgcagagtccacaaagccttgcaggtgaggtgaccacgcccacgtcacctggtcaggtgccatcgtcgtgagcctctggtgggccaggtgggacacagcacaccccagggggaggggatagaaacgctcattgaccaaaaaggagcagctgtgacctccacagctgtgtctgtcatgcttgcttcatctaatttctagttagtagctattaatatagcaaataataaatgcagtaataacagtataaagtcagaggaatgtatactgccttggccccagcgtacgaggaagcgtataaaacaccatatcacagattgtctgtcagtaatctgctgttcagccaagagagttcaaagggagcagtttctgcatgtagggaagttggaagacacaaaccccacctcccctgggagcttgtaacaaagcagacagggatgcaaaaataaatgatgtcagcctgcagccaaactccagcatcccacaccgcagctgacccactgctcatcgcgagggcctgccaggagctggcctcccgcactacttgtgagtaaagtgaatatcaaataccaatcttagagtacaactgtaccagcagtaagtatatctaggactgtaactgacaaaaataaactaattctgaaaagaaaaaaaaaa

SEQ ID NO: 24286 - DNA, 5379 bp, Homo Sapiens
ggcacttggaccgataggtatttggagcatgagttaggaaggatatgtctttctccaggtgcgcagctgaaagttgctgagaaaagctgcctgtgttgctgtggtaacatgagaaggaatgaacagctctatacaaaaactggccacacattataaggcctattctatgcagttatgtttttggctatttgctcatttagtcattgtttatcaaccaaactaggtaagccaaggagttacaagacagctctagagaagctccctctgcttacaggacaataatgcattgtttgttgatacaaatgaattatttgaatccacagaagtgaaaaagggaaaaaatcctggctgacttgtgggaagagcgtactgcagagcctagggcctgagttaactcgctggcggccctgcaggcaggcttgatgggagcgcccagcacatctgcccaccctgcacagggcatgaagcaccgtgtgcagagatctgtgagcaaaagcccaggacgtgaccttaggcaagaggggtccttggagaagtggaggtgtgcatggtgtgtagccttgcgtgtctgtgagcacgccctagtggacctgcgcctggattatcgggccagtctctcggaggggtccgtgatgctgagttacgccattcacctgaactctgcagctcatcggctgtaggatttgggtgagacacttttccttgctgactcatttccccatctgcaaaatgggggtgacgatatctacctcttggggtgtgtcaagggtaaaagagcacactttaagaatcctaaagcactaagccaaggatgaaagactagaaagctgcctctatgttgctactctcaaaaatgctcagaaattttcttgtcgtactaaaaatgtgttatttttctcattttcattcttccattcaacacagaagtaatctaagtaagttctaaaaacatagatccgggggcccacagacattcaattttcttctgaattggctctggtatcacacaacacacaagcaagcaaacagcctgcctgctagggccttgggttccaggctggaggaatgcaggcagaaatctcttaggaaataactaagtgagcgccaagttttgaattgccttagagccgaaagagaatgtggcgtgctggggagagatctggacctctttctcatcagtcatttgacctgtccacgaagaacaattttgttatgcagcctgggaacctggtttccttacaccctgcgcccttaatgacacagacaaccacgggtactcctggacggaagctcatcacgcctcctcaaataccttcacccatgttcaggtcacacggaggtcaccatctcctcagcacacaacaactgctttggttcccagggttattttttctacgagttgaaaacccacggagcctaagccatctttttgtcccctaaggagagccccatagactaagagctacacttcctgtctgtctttcccacctttccatctcattctagcttaaagcttatcacgctactgagagcctgttctgtagttcaaggtggcagagaaaaatacgaaccttgagtgaaatctggagagcagtgcagggtcatccccagacgtgacgggccatatcctaggcgactcctgcagcttatagaagcagggaatttaatggacttcttccaggaaagccagcccacggggactcttaaaaagacaccaaccatttggaagatgcagcttgaggtctgggggactggactgattctgccaccatatagtgaacacgattaatcgggaggaagaagtaaggcactctgtgagttagtctaccaccctattgactttgacagagagaaaaccaacttttttcatatgatcacacagtagtactggaatatctcgactgcaatatcctctaaacaaatgcatgcaaagctttgtaaaagcagctgatgattaaaaaaattttaaaacattagggtttttctaatatatccatatgtgggacagtgatttaaatgtcattaattgtccagccacaacttgtaacagtgatgtgaaagacacaaaaaaggccccactggagtggaggagtggtctggctggtccccaagcaaaacagaatgggcttcgcataggctttagaacttattcataaatattgaccaaagtgtgaagcaaggtatccagtgaagattctctagggtctctacttctgctcaagagatttaatccagctttctctaaagcagtggtccagacttgccacatactaggttaaagataaagtgagaaaaacaaatactttggtttgcacgtctcttgaggggccctaggctgtatggaggaatatttagaggaatatttgtgagctgccatttgtgtttaaaagaacatgaaagcaagacgggccctaacccgcctgtgtctgtagctgaccaggaggccactgcttccttcccccagagcttctaggagagccccccaaaatgcaactctccaaggtcctgtggagtagtcccctcataatgcctccaccacacctgtgtctcacgatgccttaactgacgtagctcctaagtgatgttcacagagaaggaaatacttaggcaagcccatgtgtaacatgctcacagatgtgctggctttgccaatgctttcggactccaccatgctttctgattcttctggtcctagtcacgccttggcacggggcagaagcggccgagctatgctgacaggtgctgctgagagccaacagccattcagccgagaaggcgtttctaggtgagggcatgagagctggcattccaggctgctgagtgcggcatctgcaggtgcaccacattgctccacggtgtgttcagaagagaccagcatcttgaatctcaggctctgggctcattctttgcctctgccaagggaccattcaggggcttcaagccagctgctgaaaatcccccttttctggatttttccccatctatataaggatatggtggctgtgtggacaagaaattggtttcatctcagaagggtgcttccctacaaagatcttcagaaatttaattgaaaacaattttttgaactttttttgtttggccaggatgaatgaagctgaagtcacatcctgaatgtgcatgccagacaaagggtaagcaagcagtctttacaaatgccaatccctctgcactccaaaaccggagcccgtaatgaaggcccaggttccagtcatcacaggatcccccaagccagcacagtgcctgatgcctccctaggcattagcacatcccagcactctaattcacatcctcagcatccctgcctcctgcatccagggcttaggttgagtgtttccagagtgtcaagtacatttaaacacaaaccaaatactccagggttttgacctgtcacaatggcttttgaaaacaacagacgtacaatttgagagaaggactcgatggacttcttaggctgaggactaaggacatgttgctgttcctcttggtccaggacattcaataccattcacagcattcatcaccaactgacatagtatcgatcacgacattcaactgtttgaaattactgctattttggtcaaaaactaagaaatcagaaattgcacctacatagtgtgtctcctcattggagtcccatctctctgagcacagggatgggctcctgagctcacagccctgccctgcccccccagcagggcctcaccctcatggccctcagtgaatagtgactacatgaagggggcacttactagaggcctgagtaatggaatttcaattagcttctgcttcccttttctaaaaaagaaccacctttcttaagaataattaggccaaaataaacttgagtaatttgtacagtcaatattttgaagtttcggagttaccagtgaaatagcaaagctgttctccaggaaaggacatccaggttcccacccaggccttccttcctcagctcctgcagcctcatcctagtttaatatgaaggttgtgaatgggttaaaaagcagttcttaagcacctacttagatcttttcagtatctggaaatagcacccagggctgtgttagtaaagcttttcactgggtaagagtcatacaatttttacatttaatttgtttttttaaaacaaggcagtcttgttttacatattggaatgactagatattttttgacatttctggcacctctggttctgctgaattttaagggaggtgagtggtatgtacacaaagttaagattgctgcataataattcctttgcatttccaaaataaattacacaaatgtcacttttccttttctattccatagtactagttttagccagatctttgccaaacattctaggacattcagaaaagtcatccatggaattttggaatgccattctctctgtatctttgcagatcatgaggaaggaaagttgatgaactagtacgggatggctcagacttgtaaagtgtctaagtcacaacgctgcagagccagcttccgggtagcaatggcatggcctcagctgtgccaaggctacaactggagcttccttactcgcatctgaggcaaacacagcaaggctggcccaggccgcccacagtcaacagatgttcacgggagatggatcagcccctcttttgcttgttctatcaaggaaagagatctaaccatgggcaagggtggaacacacccggttcaggtcagggaatgagttgctctaagtgaacagtgaattcttacttctcagcctgtatcaattgtacccagggttcatgattactgtgacccactaagggacgatctttgaggaaacagacctggagggaggtaatttaaggagggaaagtgagtgggttttacagactgctttgtggcgacattcaggaacagaccattcaatggatgacttttcagtacataaaagcaagcagtaatggccaggagagagcaaagatgccctaagaatgacatcagactgaccaaatgtgccttttcaaataagttatgagaacgaatgaattggaattagagcaaggtattggacagaaccatgctagtctttgagagaacgtgtggattgggtggatgtttggaccgaatgaatggtaactttttaatgtgaaacagagaactgatatatgggctgtcatgtcaccctagggtactgtcgctctgtcatgtgtagcaatctttccaaatttttgttggtgggctgaacaaagataaaactaataaagtatgtgtggataccactagaaaaaaaaaaaaaaaaaaaaaaaaaaaaaaaaaaaaaaaaaaaaaaaaaaaaaaaaaaaaaaaaaaaaaaaaaaaaaaaaaaaaaaaaaaaaaaaaaaaaaaaaaagg

SEQ ID NO: 24287 - DNA, 1326 bp, Homo Sapiens
ccacaggaatggcttctgacaataatctgtcctgttgattttgttttccttgcccatgacttgaacaactgtgttttaaagtactgtagtctagtaggtaactttgtggcaaaaattttcaatataatacattctgaaacaatagttgctgccttgcaaaggtaatctctcattttaaaattggacagtattaatgaaggggaaatatacaatttatttctattgagtggtagaactatatgtctggtcccttgctgctcttgtttaggccactatcatagatatatttcaaatattgtactactcagtgttaagtattgaatgactgtttccctttccttcaaggcctagagtatattctgaaaatttaggaatgaggaagaaatcttaatacttccttccttaacatacaacatgagtcccgagaataattgatagtagcaagagaaaactatgtcagtaacatgttgccttgtataaaaatcttatttataaatgtgaagctttttgatgccatcaaaacttattaaaaaataggatttacttttttctaattctgacctaagaaaaataatgagaacaagctgttgcaagctcttttgtagtctattgaatattttatagatattcaaaatttcctacaaactataattttttccatgatttagcagtgagtgattttctagctttggctcttattaggtattgtaaatagtagggttatatcgatatcagcttttgtgatggcattgtggtcatcagcttcatgacattttacccatttgcagtgatcctgtgtaaaactgccaaggaaagtaattacctgtaggagtttgctgagcttgaagagtgaaaactgttgtgaatgagcctgatcataaaacggaccaggccattcattattcctcaagtgttaatatactgacttatgcagtattcaaaccatctagtgcaatgtttttgtttttgtttttttttttttggtaacacaggtgcagtgtattatagaaaaaataaaaactacaatcattagcagttttaatactgctgtgtcagttttgtaaaaaatgtacattatgtcttttgacatgttgaattttaaactagggaaatgacattgtaaatcatagtagcctcttttaatttaatatgaaaaatgccactatattgaaagtacttaatgtattgtatatatttctctactttggttctagctattttatatgattgacatgttatttaaaagataactgccttgaacttttggagacttgtactgtaaataaagaaatcttaacaataaactcaaaaaaaaaaaaaaaaagg

SEQ ID NO: 24288 - DNA, 5182 bp, Homo Sapiens; identical to SEQ ID NO: 22410

SEQ ID NO: 24289 - DNA, 4249 bp, Homo Sapiens
cctcaagctaatttcaggtcacaatttgaggtcaaaggcttttaaagcctttgcctacaagtcactccaagatgagcagataaagtgtgatgaacacagatagagtgagcttctgaccacaggacatttgcacagcccctgttgcaaaaagagccagtttatttactgaagggaaaaaagttgcagagcaattactttaagaaaaaatgtgaggaagaaacccctgtatagtgctgtacgtgtcagcgtcttgtgtggtagtctcatcttctctgggctggggccggttctagagtggaggatgccattgttgacctcgggactgggggcccacttgtgcagaactacatcagggggtatggtggggccttgagctctgggctccaccggtagagttttgcaggggtgttcaatgaactcagttatttacaaaccacacccaggcccatctgccccttcccaagacactagctgggtctcgagccatgtgactgagctcgactgattccctccccagcctaggagctgagcttgtcctgtgctcagtcttcccataaggacatgccaggtttgtgtgtacctggcaacatgcatgcccatagcctgcatctgtagtaggtcaagacgtgataggccggaagcaagaggagaggatttggtctttgacctgtcaggctcagaatacaagggccccccagggtgtagcaccctgatggggggagcaattttaccacccctttgactcagccagaccctcttaccagagtccactctcttcccccaacaggttgtttgactggctggtatcagtgatcaacagcagcatctgtgcagacaccgactcgtggaccactttcataggtagcaaggcctcactgtgctgggagcactccagaaaaagagcaataaagccctggatggagaggcaggagccctgggtccactgtgtgactctgggcagttcctttcccttttttgtctcctcttgcatctgcctgccagcatagagcgagatctctgcatagggtgagatctctgctctcctgcacccacatctgagcagtccataactctccagacaggctcaacagtgccttgtctgaaagagccctttacctccccagagacccagctctaattgtgggagagtagtgggggttggggaaaatagctgtattagaagggactttggaggctggcaccgtggctcacacctgtaatcccaacattttgggaggccaaagtgggaggatcactggaggccaggagttggagaccagcctgggcaatatagcaagaccccatttcaaagaaattagccaggcatggtgctacatgcctgtagtcccagctactcaggagaccgaggtgggaggatcactttagcccaagagtttgaagcttctgtgagctgtgatcacaccactgcactccagcctggtcaacagagcaagaccctatctcaggggggagaacaaaaaaagacttgggggacatgactgagggaggtcaacacggttgtaactaggtgggacagtcagttataggaggaaataaagcttaaaggtacaagtgcagtttgctcatggaatggtggaattctaggcaccaaattggctagtgagactaatgccctccgaactagatttaacacagaaaatgttccctgggacctggtttcctcataggaggtgcctatcagaaccagagaattcagactcaaaaatgggcctgatgctctgggctgtcttcacacttcatttgggtttcctgcttgctctgagctctacaggggaatggggtagagatgggagccaccttgggtggagggtggggaaggtatgttctgcccaccacaggtgtcatgctcactcagcctgatgcccaggctgccaagtataaggcattggcaggggcccagccaccctgggttccttggtcccctattccccatctgctccctgcagtggccccatgggttctctgccatcttcccaggcctgctggatgtgtatggatttgaatcatttcctgacaacagtctggaacagttgtgcatcaactacgccaatgagaagctgcagcagcattttgtggctcactacctaagggcccagcaggaggaatacgcagttgagggcctggagtggtcattcatcaactaccaggacaaccagccctgtttggatctcattgagggaagccccatcagcatctgctccctcataaatgaggaatgccgcctcaatcgacccagcagcgcagcccagctccagacacgcattgagactgccctggcaggcagcccctgcctgggccacaataagctcagccgggagcccagcttcattgtggtgcattatgcggggcctgtgcggtaccacacagcaggcctggtggagaagaacaaggaccctatcccacctgagctgaccaggctcctgcagcaatcccaggaccccctgctcatggggctgtttcctactaaccccaaagagaagacccaggaggaaccccctggccagagcagggcccctgtgttgaccgtggtgtccaagttcaaggcctcactggagcagcttctgcaggtcctacacagcaccacgccccactacattcgctgcatcaagcccaacagccagggccaggcgcagacctttctccaagaggaggtcctgagccagctggaggcctgtggcctcgtggagaccatccatatcagtgctgctggcttccccatccgggtctctcaccgaaactttgtagaacgatacaagttactaagaaggcttcatccttgcacatcctctggccccgacagcccatatcctgccaaagggctccctgcctctgtcttcagagaggcactgggcatctaaggtggtcagagccctcagaatggtgtccacacagcgaggaagccacgcttgaacctctcatccaggacattctccacactctgccggtcctaactcaggcagcagccataactggtgactcggctgaggccatgccagcccccatgcactgtggcaggaccaaggtgttcatgactgactctatgctggagcttctggaatgtgggcgtgcccgggtgctggagcagtgtgcccgctgcatccagggtggctggaggcgacaccggcaccgagagcaggagcggcagtggcgggccgtcatgctcatccaggcagccattcgttcctggttaactcggaaacacatccagaggctgcatgcagctgccacagtcatcaagcgtgcatggcagaagtggagaatcagaatggcctgccttgctgctaaagagctggatggtgtggaagaaaaacacttctctcaagctccctgttccctgagcacctcgccgctgcagaccaggctcctggaggcaataatccgcctctggcccctgggactggtcctggccaatacggctatgggtgtaggcagctttcagaggaaattagtggtctgggcttgcctccagctccccaggggcagccccagtagctacactgtccagacagcacaagaccaggctggtgtcacgtccatccgagcgctgcctcagggatcgataaagtttcactgcagaaagtctccactgcggtatgctgacatctgccctgaaccttcaccctacagcattacaggctttaatcagattctgctggaaagacacaggctgatccacgtgacctcttctgccttcactgggctggggtgatccttggtgcctttgtttccacaaggccttttcctgccccctgccttgccaaagacatttaatcagcacacagctgccagactattcccacagtgctccaaatgcacatgaacaacagtgacggctccagccttcgacccagagccccgtgcccagtgcgtcagtgggcctggggttccaggctacatcaagcactgatggtgtcagggctggtagttaccaaatcagggttaagaaacatcagggccacatttcactaccttcacagatcaaactcagcagcagtcatgactgtctgtcactacactggggatcccaattccacataagcacttttggaagaaaacagccaaagttggcctaaaattggcgctggaatttgggctgggaaaaatcttgtggttatttcctttaaaaaggaacaaaactttagtatttaattagttgatttatttaatgtaatttcaaacaattaaattatgaataatgcaatgtaaaaaaaaaaaaaaaaaaaaaaaa

SEQ ID NO: 24290 - DNA, 2160 bp, Homo Sapiens
ggggagtcattagtcttcattttaatatgtaaaaaatcttgatgctgtattgatttgtttgcatttaagatgacagtgagaaaatgataagcataaagagaagtatcaggttatttgctttttccaaacttttcagatgaactattgtttagtacagagactgagcaaatactacaaaattcaacttaaccttcatttcattggtttaaatgcgttattaaccatcttaagtgcaaactaatcattgtaaattatattttagcatggtctgcctcaaatagtaatgtatttttctgcattcacttggatatatttagaatcacttttttcctcctgtatcaaggaagaggtatgtgctgatttgtttggatatttgacaaggcactctgatgtgacttccctgactactaccttcatatttcatttcaaattcaaacttctgaggttgcagcatatatgaattgcattttcaaaagaagatttgtaagaattaaactatatttatgagtaaacttttgaggtttctgctgtattgtttcaaatgtaataaactttacttctgtaaaaattgagcagttgtatcttctgaccaccaacagattttcagcttgccatgatagtctgacctcattaattactgctactgaagttcaatttttttctaggaattttaggaaccttttgtttaaatattttaatttctattagccatttttaggaaggaaagaatcaattctcttaacaggaaacatgctttatttttcaaaacctatctctgatatttttctttaatttgctgattattcaaccacagagccttatgctataaatgtcatttgtattttaaaaaataatattccactcataaaactttaaaaccatctttcaacgaactatatatgtattatagttgctgccatagagttgatggtttttaattatctggaaccagcaatcatttaaaataaaccatattaagtttagtatgctggtattgtttattcattttatatgaatattcattgaaaatatatacacaatatatgtaatacacagcacttgattacaaaatgtaatttaattatattattgctggcagcattcagttaagagggtactttaaaaaatagaagtcagctttcacatctgatttctgtatgggctgtacttggttgacttgattttagaaaaaggactaacagaattgctaaagaaatgcatccaataaatgaaaaacagtaggaagatcaaatgtttttgtcaaatatattcacaacttgaccagattagctgtcctgtttgtaatgcaatattaatatgtcttttgggaaaaagcctacatatggaataaaataagtattgaagaatttttctttgtaacaatttagtagtcactgtttattgagaaattgttttttattttgtaaaataacatgatgttagtgttgaactcttaaacagaaagaaagcttaatataacagcttatagaacttgaactactaaacatgaaaataagtcatttgaaaaaaatacagtatgtaaaatttgttcattcgttgaggtaatggtgctatgtttttacaaaattgttcctacaccttttttctacttcaggtattttatttcaaccatttccatcaattgaactgttaccattgcctttttctgttgagaaattgcctctgaaaaatagtgctatttttcagcttaagtgttcttaagtgaatgaaattttcaaagtactagatcaccttaaaattatttcacgtactgaagacaattaagtccgttatgtttagagtagaaaatgtttaggctaaagagcatctgtcaacagaatctacaaaaaagattcccttgcatttgaattagttctctattctcctattgctaaatgtgtgatatatagagaggatgtataaaaggaaatggaaatagactatgtacttgtctggtttttgtttgtttttattttggaatgcttataagcctcctttacactgaataaggaagtagtttttgttttcttttgacctgtaaaatacctcacatggttgtttttacacatgaaagaaaaaggtatatgcgaacatacctgatatcaagaggagtatgcaccaaataaattttagctttgataaaaaaaaaaaaaaaaaaaa

SEQ ID NO: 24291 - DNA, 1522 bp, Homo Sapiens
attaaactctttgaatctccaaacaaggaagtttcagcattcccttatggatcagaggaaccttagaggcctgaaattgttgcttccagtttagctgcccctcaaattcaagtgaatattttcccttctccctttacccttctccagaaataaagcaggtgacagggttttcagaatcttaccatattgacttgtgtatcttttttaaaaaataatttgtgatatttattgcatacattttcttttggcagttttggattttaggtatttttttgcatgaggctgataatggtgatgatgactttatacccttggtactatactaggaactttacatagtatctctacttctcacagtcttgcaaagtaggtgatattattcccattttatagttgagaaaacggaattagtgactgtacctataacaccagtaaatgcagagccaagattctgacccaggtctttttgttgtaccataagtttaaaagatgagtctcatttttcttgtggtagatggtggtaaaaaggagtaggcagagtgtacatagataaaaaaaagtaaaagggtaagtaaaaaattgattgtggtatatgttattctaatcagccaaaaaagtttagaagattgatgaaatgatcttttaaatatgtatttctgaataaaatgtaaaaccaagaaagttatttcaggaaggatagtgaccctttcattgaactgttagaagggcatttattaggctaaaacgtcattaacaaaatgcattgcatgttgaaaccagcctcttgaaccataagcacttagcgactttgctctgccctgtactgtgctgcttctgctgtcatcctgtgtgcctacagaagcctggtcttccgtccatgcagaaatgcttatgtcctcctgttgtttagatgactcctattgttcaggtgtactctgagaagagaatcacgtttttctgttttgctaaggagaaaaccttgctgcttgtctctcctcccaccctccaccatccaaaattaaccagtgagctggatattacctggatattgccaggaggtgggcattaagacagtattctttaaaagtgaaaatcttgtgaggcaaactgctaaattcacattttttttttttttttttttaccatcttccctaggaatattcctagaaagcatctgcttaattttgctgctaacagctaaccttatcccacgttgagggtggtattaaaactgttcacacagagtgagcctgggtcagtcaaaaacagaatttgggcatttgagtgataacagacaacctaaggacaatgagcactttgcagatctctacaattaaaagttgcctctttgaggcaggaggagagaagcacagtccctgccaggttgcctgaactaaagatgccatggagcaggagtgtcttggtgcattgttccccgcttaggagtacctttaaaaagggggtgaaataaatttggcttaataattgtaaaaaaaaaaaaaaaaaaaaaaaaaaaaaaaag

SEQ ID NO: 24292 - DNA, 2530 bp, Homo Sapiens
gagagctctgaggaggaggagggggaggagggggaggctgggggcaagcaggggccacggggaagccgaagcagccgggcagacccccctccccacagtcacatggccacacggtcccgggagaacgcccggcgccggggtacccctgaacctgaagaagctgggcggcggggtgggaagaggccaaagccaccccctggagtggcctctgcatcggcccgagggccgccagccactgatgggctgggggccaaggtgaagctggaggagaagcagcaccatccatgccagaagtgcccacgagttttcaacaaccgctggtacctggagaaacacatgaatgtgacccacagccgcatgcagatctgcgaccagtgcggcaagcgcttcctgctggagagcgagctgctgctgcacaggcagacagactgcgagcgcaacatccagtgtgtgacatgtggcaaagctttcaagaagctttggtccctccatgagcataacaagattgtgcacggctacgcagagaagaagttctcatgcgagatctgtgagaagaagttctacaccatggcccacgtgcgtaagcacatggttgcccacaccaaggacatgcccttcacctgcgagacctgcggaaagtccttcaagcgcagcatgtccctcaaggtgcactcactgcagcactcaggggagaagccgttcagatgtgagaactgcaatgagcgcttccagtacaagtaccagctgcggtcacacatgagcatccacattggccacaagcagttcatgtgccaatggtgcggcaaggacttcaacatgaagcagtacttcgatgagcacatgaagacccacacaggagagaagccgtacatctgcgagatctgtggcaagagcttcaccagccggcccaacatgaagcggcaccggcgcacgcacacgggcgagaagccgtacccgtgcgacgtgtgtggccagcgcttccgcttctccaacatgctcaaggcccacaaggagaagtgcttccgcgtcagccacaccctggccggcgacggcgtccccgctgccccaggcctgcccccaacccagccccaggcgcacgcactgcccctgctcccggggctgccccagaccctgccgcccccgccccacctgccgcccccgcctccgctcttccccaccactgccagccccggcgggaggatgaacgccaacaactagctgccgagctgcacccgtgcacccgctggggcctggagtcagggcccactccaggagggacccactgccttcccggggagcacagtagtgcgggcctgggccctgctccacctccagaagtggctggatgtaccctgcctgaggccccgacgaggaggggtatgcaggctggcaggccccagagctggtggagggcatctcactcccaagtgccccccctttctgtgactccttgaagcctttactttttttttttttttggaagtgaaggaaaaagaaactatttacagcactcccctccaggtgaggggggtgctgggggtctgcagcagaaagaaaggggcctgggcagcaggtgtggccagtccctctgccaaggcctgtgccagaggggttggccagttggagcctgggtcagcctcagcagcctatccccatgtcctctatgcccctaatttgcttcctcatcttggagggtttggggagaagttggcgtgccacccccacaacccctgaggaggtgtagacccagtctgagagccgcaagcactgaggcagggcctgagactggacctgggtgagcgtggggggtggagggtggcgaggtgcggagactgcagaccagtgcttcactgtgtggagtggggcaggcaggggctggaccccagggacttgccttccccacccactctgctgccagcaggcccagggatccctgacctgcaccaggtggcaccaagggtcctgagtcctggagatgtccccagaagctgctgtgcctcacagcgctgtgagccagaccctccttgggcagacaggctgactggcagcaccagctttgggggcagagtcctaggatgaggcttgggcagtgctggtagggtttcaaggtgctattagtggggcaggggcagggcggctgctcacagagcaccccagttcctcaccagctactctggccatatatcccacaccagaaggaacaagtgtggctgtgtccatctctgctcccccaaaggcccgctctaggccttatcctccctctaggtcctgccacaacctgtccctggctggctccagcgtcctcgtccctcctgggcctgtgcaccggtgggtggggcgcccatagcactgccggtaaaggagcctgcatgttcaggcccctcgggggattggggggactggggaggcgcagcctagacccaattgcttgcccccatgaggctagcactaataggaaacccttttttgttgtcaaaaaaaaaaaaaaaaaaaaaaaaaaaaaaaaaaaaaaaaaaaaaaaaaaaaaaaa

SEQ ID NO: 24293 - DNA, 3546 bp, Homo Sapiens
ggggatcgaggggtgatgtgtgggttacctgaaagaaactacaccctacctccaccaccttaccctcacctggagagcagttatttcagaaccattctacctggcattttatcttatttagctgacagaccacctccacagtacatccaccctaactctataaatgttgatggtaatacagcattatctatcaccaataacccttcagcactagatccctatcagtccaatggaaatgttggattagaaccaggcattgtttcaatagactctcgctctgtgaacacacatggtgcccaaagtcttcatcccagtgatggccatgaggtggccttggacacagcaatcactatggagaacgtttctagggttaccagcccaatttcgacagatggaatggcagaggagcttacgatggacggtgttgcaggcgagcattcccaaatcccaaatggctccagaagtcatgaacctctgtctgtggattctgtgagcaacaaccttgcagcagacgctgtaggacatggtggtgtgatacccatgcatgggaatggcctggagctccctgtggtcatggagacagaccacattgcaagtcgggtcaatggcatgtctgacagtgccctcagtgactccattcacactgtggccatgagcaccaactctgtaagcgtggcactctctacctcacacaaccttgcctccctagaatctgtttccctccatgaagttggcctcagcctagaacctgtggctgtctcctccatcacccaggaggttgctatggggacaggtcatgtagatgtatcttcagacagtctttcttttgtatcaccttcactgcaaatggaagactccaattcaaacaaggagaacatggcaaccttgtttacaatttggtgtactctgtgtgaccgcgcctatccctcggactgtcccgaacatggaccagtgacttttgttcctgacactccaatagagagcagagcaaggctttctctcccaaagcagcttgttctccgtcagtcaattgtgggagcagaagttggtgtatggactggagaaaccattcctgtgcggacttgctttggacctctaattggccagcagagtcactccatggaagtagcagaatggacagacaaggcagttaaccatatctggaagatataccacaatggtgtcctagaattctgcatcattacaactgatgaaaatgaatgtaattggatgatgtttgtgcgcaaagccaggaaccgggaagagcagaatttggtggcttatcctcatgatggaaaaatctttttctgcacctcacaagatatccctcctgaaaatgaactgcttttttattatagccgagattatgctcaacagattggtgttcctgaacacccagatgtgcatctctgtaactgtggcaaggagtgcaattcttacacagagttcaaagcccatctgaccagccacatccataaccatcttcctacccagggacatagcggcagccatgggccaagtcacagcaaagaaaggaagtggaagtgctcaatgtgcccccaagcttttatctctccttccaaacttcatgtccactttatgggtcacatgggtatgaagccccacaagtgtgatttctgtagcaaggcttttagtgatcccagcaacctgcggacccacctcaagatacatacaggtcagaagaactacaggtgtaccttgtgtgacaagtctttcacccagaaggctcacctggagtcccacatggttatccacactggggagaagaatcttaagtgtgattactgtgacaagttgtttatgcggaggcaggacctcaagcagcacgtgctcatccacactcaagaacgccagatcaagtgtcccaagtgtgataagctgttcttgagaacaaatcacttaaagaagcatctcaattctcatgaaggaaaacgggattatgtctgtgaaaaatgtacaaaggcttatctaaccaaataccatctcacccgccacctgaaaacctgcaaagggcccacctccagttcgtcagcaccagaggaggaagaagaggatgactcagaagaggaagatctagcagactctgtggggacagaagactgtaggattaacagtgctgtgtattcagcggatgagtctctttctgcacataaataaaaggaaaagaaacaagcaattttggatgaaaatgcaaatggaaaaatacacataaccagttatctactataatggtttttatataaaatggttcctgatttattttcagccagtaatcaaaacagactgggaatgaataaagcacttacagaagagtatcctaatgaaaacactttaaaacagattgggaaaactgagcatgtgtcctgttttaagtggtggactgggagggaagtgtcaacttctgaggtctttatttacatgataatctgggagatgcatttatgcctgaatcaaagctgccttctgctcaaacaaatcagatttatttcacattcttccattattccattttcctgctggtcctgtgacttggtaacattctaaacggtccttgccccatagccatcctgattgctgatagtgttttatgcagactcttgtgacttatactcaccacagaatggattgggacacagcagcataagtgtgctacttggcagctagtaagtttaaagcaggacctgccttaactgctcctggccacttggaagtttagggtagatcttgttttccaaagtttcggcaggtgcctggagggcaaataaaaaagcagcagtcagtcagtagtcagtgatggagagaacaagaggagagatgcctggcctctgcccaagaaattagctttgatggaagcctgagcaagtcacctggttattgtaacgtggagatctttgtaggtttagacatggctccctgtctccagtaaacatccagccattcagacaaagggggcctggagatacagagagcccaaataatgcctgctggattgtctcctgatgagtacatgtggactcacctgaggaagggaaggaagggaataatcttttatgtttcatttaccttatgaaaagtgttaaaacattgccaactcaaaataacattatttaatgcatgtgcaaagttaggtcttcccagttgtctcagtgctgaggaacctcatcagagaagcatggaagatgccaaaggatttttggaaggtaaagaaggctgaatagtgaccacatgggcctgttttcagggtcccagcttagttaagtcacccatgcacctggtcattgtgtctcccatgcacatccagcgtttctcagaagcagacccacccttaagttgacaggattgatggaacatgctctcctgctcaaggcacaacctctgggctggagtagaggactctggtgggaaggttttgctgctaatgtatttatggaatgaatgtatttcattcaaatctgtattcctctaggaaggattaaaattaaacttttttaaaataaaaaaaaaaaaaaaaaaaaaaaaaaaaaa

SEQ ID NO: 24294 - DNA, 3085 bp, Homo Sapiens
gacaactcttacaagatcgttaagtttatttatctgttcaagtctaccatcttcactctctacgaactccagaactggatgggaaaatggaagcccagcaatcaatcatgaagctgagcacttaaaacagagatcccagcagtgtagaagaacccataaggggccgggcgcggtggctcaggcctgtaatcctagcactttaggaggccaaggcaagcggatcacctgaagtcaggagttcaggaccagcctggccaacatggtgaaaacccccgtctttgctaagatacaaaaattagctgggcgtggtggcgggtgcctgtaatcccagctactcgggaggttgagatggaagaattgcttgaacccaggagatggtggttgcagtgagcggagatggtgccactgcactccagcctgggcagctgagtgagactccgtctccaaaaaaaaaaaagaccacccacaacgagaaaagcctacttcctcctttcatggaaaattcatagagccaaggaatttgtgactaccggatagaaataaactccgttctgcaactctacccaaaactatacaaaacaccaaatataccattagcaaaagctatatagcacctcggacttggaggcaaagtatcaactacaattattatgatgagaaaagaagctggggcatggcaaacctctgaatgatttatcagaggtgctatcatgccaatcacataagatatggtaataatgcctgttaggactctttcataggatttcttttggtagttgttacataggatttttttgcagttattaaaaataaactacttacatatttgtacataatgcctctctcattatagttttcttgtaagattgtcactaaaagaatgacaagacacgtgagctgaaaatgatctcctgctgagggaaattctttttttttttgagacggagtttcgctcttgttgcccaggctggagtgcagtggcacagtctcggctcactgcaacctctgcctcccggttcaagcgattctcctgccgcagcctcccgagtagctgggattacaggcgtgcgccaccacgcccggtaattttttgtatttttagtagaaacagggtttcaccatgttagccaggctgctctcaaactcctgacctcaagtgatccgcctgcctcggcctcctaaagtgctgggattacaggcgtgagccactgcgcctggctgggaaattctttctttatattgtgctttccccagaacagagcagagtagcatcagccgtaaggatctgcgctgcatttctgagcaaagctgtgtcctcagagcaacaaagagttcggggaaacaagtaggatggtttcccctgaaaacacctgccacctactcaatcccatagaaagaaagtggacaccacaagaatgaccagaggccacttaactaagtggcttttcccctgtgcccaggcaggcattgagcttacataagggaatgaccttcatgacttattttcacccagaaaatataagttcaatttcaaaatgctcatagtgtggatggcaggaattcaactaggtaagaataagcttaattcccctcagaatacaagaaaatagttaaaaactctctagacattattgcagccaggatttcttccatttatggatgtgggtcctaaagaaaaagactttcattttctttggtgtgtgggggaaagaaaaacaggaatgtctgacaaactacgacagagcagcatgaataaaatacgtgtaactcacccctcccaaacaaaatcaaaggaccaaattagaaattttaaattgcctgctggttctcatacaaaaaacaatggcagaaaaactcttattaaagagcttttatctttcatgtcctaataatcaagaatcacctcttgtgattcaaccaacctctaaaacttaaagtgtcaggaacagtctcagcaccgcaaggaccagcacactgacccatatctgtgggcccggtggcccgggcccagagggaacccaaatcaactgcttccttggcagaactggccacacgcacaggtcctccttccaccagcactggtctgggtagaaagaccttcgacccctgttctcttaattatcataagcatgttggtcaccatcacaggccacttggcaaatagaaatgtttgtctccctgcttaaaaagacaaaacaaaacaacactttaacctctttgttccagacactatcttaacttaaacagaaaatgtttactagagtgtagtgggagaagaactttcttgatgcagatttggtatgttttggtccatgctcgttaacggtgtccagtgtaagctttaaaccaggaggtcaccgaggctgctgcagaggagatcatcccacctgcactgctgctcgcgatgggtggggacgcctgggtgctctgactctgggagacttccacagactgggaagggatatcacaaaaccggggactaggcaagttctcccagtctgtgcccaggtcggtttcttcatcgctgacgcgctcatctccgctctcatctgattctccagcaactccgggatccacaaattccatggactcctcaaggtctgctcgtacttcaaagggccctgacctgtgtgcagacaatgagggtctctttaggataacaaccattctcaacaccagaaaatatgccatcttcctgaaggccctcacctgaggggatgagggacgccgcacaccccattcattccccaagtctatgcagcactccgtgttgacatatgattgcgttttcctttacccaaataatctccacccaagttataaataaaatcatgataccacactttcccacaagtctgcctacttcattggtgatgaccgtgcataggaaaaaaacctattcactgagatggcccatgctggtcctaagtctgacttcctgttgtaaagaactgcagtgtctacgaagtaaatacacggcactccaatgagacaattctaacaaaaagccacttgatgtatactctggatattatttagtgtaataagtaataaatggtatacaaagaaaaaaaaaaaaaaaaaa

SEQ ID NO: 24295 - DNA, 1274 bp, Homo Sapiens
ctataaatacaataattaaaatctatactatattattgctaccatgaaagtcttatctttggctgtttttcaagtagaaaagtaagtgtactgtgagccttttatttgagatgctgagagctattaggatgagtatttcagttttcttgtcaatagtgatactctgatgatgttgcagttatttgaagtagaactgattgtctaaaccagacacacataggagtgtgctccattggtcttgtggagagtgctgcacattaacccctccctcaactgtgcaatccacttgagactggcttctctaagccacagttgttatctgctgtgtaaagtcctggatgccagcactgtggcttcttagagagggcagatgctttgtatatcgagctgcagcattcatcgtagaaaatgctacaaagctgtctctcttccccttctctcatgtttccctcttttcatcaagatgaaggctgttgggtaagaaaaactaagtgatttaacaaatcattatgatttaaacttagaaataaacctagaattttttggtgtcccttttatcataggtgtttaatgtatattttaatgattgtagaacttgaattgctctagaatgtgaatgactacccttgtgttttactccttttggcttttgttttgtaaagaatctcctgtgaggagttctgtttttagaatttaatattgtttggttacttccctgactttagtgaaagatattagagtatttactatgccagtatctaacttaaactattagtattaaataagtatatcttttacatttagtacaggtaccataaccaagagatttcttagttttgatggattaagagagagcattctgctgtatattatggcaggtacagatatgatcataactgaaccagaatttggattatagaagtgcacttcctagctgttttttatttaggtataggaacacacaatgagaaccttatgtttagaatgtagcagtaacaacagagggtaactacactgcaagacttaaatggtttgagcatgtgacactatccttttgttggggggagcagggtataaaaatatacatacaggagattagtttaatagtaaagttttatatgtatgtttaacttccatgatatttattattttgtagagacatttgtgattgtttagagttcttgtttttattctatttatgtataaggttgactttttttaaataaataagccaaaaattcaaaaaaaaaaaaaaaaaaaaaaaaaaaaaaaaa

SEQ ID NO: 24296 - DNA, 1442 bp, Homo Sapiens
cttgtataatttacaaagttacacaaaatataaagagcagtaaacttgtctgaaagtttttggcaaaggaaggtaacttcaatgtaatagcttcctttaagagtacaggaaaatgcattctgtaatgaagtggggcccatgtaattgtttatattttcagttttaagcaggtatagtgcaggcttgttaggaatgtgtggaagggaagattggaagtgatttttcctcttttaaaagtaaacaaaattcttcaaatatgccctagttaactatttcagcataccatttttacttggttaacagtgtacattttgataacctatcaggaatgaataaagtatttttatttaaaggtgatattgttttatgcttccatgaatattttgcttttcttagagcatattcatagatgcagtactgtgatttaccgcaagataattgggaacactttctcaaaatcgattttggttaatatcaggtaaatcattacctaggagtaagagggaaattgttgtcaattcctgactttagattgatccagcagaaagaaaaggtggaactttgtatatatccactgttgaaagttgcatgacctgacttcctgttttctaaagttgggggaatattattgaacttcaatttcagaactgcatttcaatttggggcttggaaaatgtagttaaatcaatttcgttctctaaattttctaagcaggaaagcaatgtaaaccaaaaatcaaaatgtttagaatttataaaaatggggttatatagcttttaattttagtttcctttttactgccaaaaaacttaaaaagacaacagcgtaaccacctgtttaagcaccgtgggaccatctcttattcgggtagagcctggtcctggcgacacactaacaggaaggcgtgctgtgttaccgggaaggcgcctctggctgtggggtgcgttctgaccaccccgctcagatgccagcattttccatttgcccttaaggaaacttgctatgtgtgttaacccagttatgattagtcaaactggaaaacacttgatcaaacttaaaattgtaaaatctgtctaacttttaaatatactttccacagttgtacttaagttcaattaactacagtatagagaaaaataattattctcttctttgcacccggagttgcaaacaaattaagtttacaaatctcatttaaacatatatctttgtaatgtaatctccgcggttctttctttgttctaccctcctgcacctgttgtcgatgtaatcattttgggaacagaaacgttgtgtctcaaaaagattcgttgtcagttcagccaagatgttctttacctgagattctggaaagatgtttatctatatcggaacacttctacattattaaatgtccttaagcttttccttttttaaaaaaaaaaaaaaaaaaaaaaaaaaaa

SEQ ID NO: 24297 - DNA, 2492 bp, Homo Sapiens
cagagcgcagccaacaaagcagcagatagcagtgtacagaaagcaaaaaaggaactgtatgtgaggcacttgtttctgttaatatccatattcctgttaacacacaccctttctcatgtaaaaagaaaaataaataaatggtctgaactttgaaaactttgtgctgctaaaacatagattttggagacaaataaatagatgctttgctgtttcactttcatagctaaacatcaacagaaaccatctccccttgcccccaaagtgtgaaatccttcttcccttcgttttcttcctttatgtttcaaaagggaactttgaagactgtgaatacaggttccattggtcacctttcgggcttctttccccagtgctgaagccactcatcgactttgcaaaagactggagcattccaagatctgaaaatggattttttttctttttttcttttttagccgggactattttatttttatgaatttgtttttagtttaatgaaatagtagatcctgaaatgttgtacatatttctaactaggctgatgcacagtgcaaattccttttttaattgttttttttaagtagaaatactaaagaaagaataccatctaactattcataccagtatccagttgtagcataaggtgtcaaaagcaagtacgcaaaacatttactgttttaacaagctatttccttttaacaagaaatcttgtatttcttcctgtgtttgagatgaacatttttaaattttaaagttgtacagttttttgttttccattattttatcttgtttgtaactctatgaaatatatatatatatattttttgccatttaactgttgtatgttactctgtgtctgtaccatatagaaaaaaaattgtttttgtttttggttctctatgtgatatcagttaacaatgtaacactagctttacctgtcaaattctgctaggtcttctctgaaaacgttgtttttaaaaatgatattgcttggtaatagtgcaatttctatccttttccctcccccctcaacttttaagttcttttctttataattttgctgccccctccctgatggtttgggtttttgtttttgtttttgttttttttttcatggagctactatgccatcctccctctgtgaggcagagtgactgtcagtgttttgttatgccatgccttgagctgtgggtgtttggcgacaataaggtggttgaatagattggctgagcacacttccacccacctagtgttctcagaggggttatgtgattgtttcaacctggagtgggttgcacccttaatgctttcctctgcaactaaaccgcccacatatatgttcattgaaaaaagtaagaataattctcagcactaacccagaagtagcaaagcagtcagtgatggtgaacattagaggtcaaacatgagatagatgtttgtgggctgacagccatcgtggctatgaccagtactatttacaaagcatgaattcactacaatgctcaactgtttgtttagctttatctcacttggggaatttattcctgtctgctgcattgtaggtagctgggtaggatatatttccacttgctttttaaattagttcttcacctccattgacactcgttttttggttttctccctatagtgtgggttggtgctagacaccagtctgacccacggaatgggagttatttcatccatctttcctccatccttccaaaaaccacatatctacacaaggaaaaatttaatacatctaggaattttttttttaattacaagctatttaaagagatgaatgtggccaaagttttacacaattgaaaataaagtaaaacagacggcatgtgtttaaacctgagtttatcaggcatggcaggaagttgcaggagagagaggcagtgacccaagccagtgcacttgatgttcatggacatatattttttttaaataataaattaaaacattttaaatagaagcataaattgagttgtttgttggcgctgagatactgcccactgtgaaacaaagctttgactagttttttgtttgtttactttcttcaggggggaggggggcaagtttgggtaggaaagaaagcataaatgaacgtgaccctgaggtgaagaggtatatgaacagcctttgcaatgtataaaaagaaaaaaaaacaaaaaacaacaaaaaaaatagagcaagtgaaaccaaaaatgatgttcttggtgtttttctataatgtagtcttgttagcttttttgttactgtaacaatgctgatctcgaactgttccaaaatacatggagactaacaaacagaaccacatggaactttcaaactgaaaaaaaaatttgtcacaaaaactttgttgtcatagttaagttgattgtagatggtaattgaatatactcctttgaaaatatttcatcaagtatgtttcctgctcattgtgatacattaaaaaaaaatatgagcaaaaaaaaaaaaaaaacaaa

SEQ ID NO: 24298 - DNA, 4521 bp, Homo Sapiens
tggctattgcccatcctgggcattaaactgggaatacaggaaaaagggaattatggaagaaattgttaactgtgacgcagatatcattagtcttcaggaagtggaaacagagcaatacttcactctctttctgccagcattgaaggagcgtggatatgatggatttttttctccaaagtcacgtgccaaaatcatgtctgagcaggagagaaagcatgtagatggttgtgcaatattcttcaaaacagaaaaatttacattggtgcagaagcatacagtggaatttaaccaagtggcgatggctaattcagatggatccgaagctatgctgaacagagtgatgacaaaagataacattggtgtcgctgtggtattagaggtccacaaagaactatttggagcaggtatgaagcctattcatgctgcagacaaacagctgcttatagtggcaaatgcccacatgcattgggacccagagtattctgatgtgaagctcatccagaccatgatgtttgtctcagaggttaaaaacattctggagaaagcctctagtaggcctggaagcccaactgcagatcctaattccatcccgctggtgctatgtgcagatcttaactcattgccagattcaggtgttgtggaatacttaagcaatggaggagtagctgacaaccataaagacttcaaggaactaaggtacaatgagtgtcttatgaacttcagctgcaatggaaagaatggaagctcagaagggagaatcacacatggcttccaacttaagagcgcctatgaaaataacttgatgccttacaccaattacacctttgatttcaaaggcgtgattgactacattttctattccaagactcatatgaacgtgcttggtgtcctggggcctttagatcctcaatggctggttgagaacaacatcactgggtgtccacaccctcacatcccttcagaccacttctcactgttaacacaacttgaactccaccctccactcctgcctcttgtcaatggtgttcacttgcctaatcggaggtagtggagtactgccccgccaagacggggatctgttgctatggacctgtacagttgtaaatcaaagtatgtaggagtgaagtatggccatccttaagctgcttcttcaggtttctttcattatgtgtttgctgtaagactttgtacatttttgtgcatattggtatcatttggcagtagggctggaaccaaagtattactctctttacaaaattttaatttaacatgtttttaaattggaccttctttatattgtattaacagccagcattcaaaattgataaattaccaatttgaggcccaataacagtgtatttgtttttccaaaacaaatactttcttttgaatggtttcagtgagccaaccattttataaaaggcaatttttaaaaactataaatacagtattttaaactgaatgatgatatgccttccagggaaaaccttgaatttttcctttataactgacttttggattccaaagtcatttgcacattaacagagtacttaaatttacttgttcagtccataaactatgatatagcctctatacatggtaagaaaatttgaaaaattaaagatggttgcacagtatacttttataatccagcatgtaacaccacatgacaatttgttggccaaatgctggtttggagtttttttgaggaatcactttggtttttttgtcctttatatataaccttattggaagtattaattctaagcctgtctctcaagtttatttatagagaaaaagtaagtaatctgtattgccacataccttgaaaatagaatgtggtatgtttaggatgcccacggaatgaatttttccttattccaattcaaccttctgtctggttgtgccaggaaaacagatgttatatgacctatgtcatttttgccattatagtcaaatgttaaaagaagaaaaaagtctgctgaataaaaaggccttgatcaaagtttcagatggggaaaatcatacagatattttatgtgtttccaacatagattatgtggctgttggtttcttgagatgacagtgcaaaggatttgggagagagaacaaatttggggcagtagttgaaaacgttgggtcattttcctgactctagctgccaaatggccatcatatgcttttaatctttgtttcagttgtctgtcagggttgaattaagaagctactggtttattcccaattgttgatgcctttaggtatgttggaatcttttttttgcctaggaggggccagttgaaaatctgtgactcaagaggcagtgaacagaatactgttttctggggaaaaattggttggctacttgatgttaattatggcacagtaacaggaaaaggttgtgtctgtgtttttaagtttttctttattctgcttttttgctgctataagagttttctgaaatttatattttaaacttttcatgcactttactgtttctagtctcaaaatgtgatatttttaataaacaagaaattttccattatgtgaatgaaattttaaaagacaatagcctatatttgtgtctcactaatatataaagtataggtcaaatttaaattatttaattagttttaaatatacacaatttgtctcctctttcaaacctgacatcttcggctgttttattagtcttaaatgatgcatttactttggtcattttatgctaatttcttccatagtaaattaatcaggctatataaggtaatatttccccagagggtaattttagtgggacgagggtggtgggatgatgtcatatcatacatgggattgcatcagaagggttctgtaaagcctgaactcccttttaaaagtgcctagtgatagaggcgttgtttgtcatctattataattggaatgtcattgtagttcagtgaattttgatgtaaataaaatatcttttaaaaatgttaaagtaccaggataaacaaacaaaaagaaacaacccttaagatgacagattttcctcaacatgcaggtttcccttcttatatacctcaagtatccaacatctagccatgcaaattgattacctgaagcatagtactggaaagtagaatagcatgaaaaacttaattttgtggacattacctttttttgtaatcagctactgtatgttttattttagatcttttgttttgggtgggttttctgctctggaggtatatgcactaacaaaacattttcctcctttcatatacgcatgttaattagcaatgtgagcaatatttcctaccatacttcactcccaatattttttgagatgtttgtataaaatggaatttaaagttcacttatgattgtatatgaaccacagaggagcccatttattaataaaaaacttttttaatagttaaatgtagagggaaaaaataaaaaaaaaatgggaaacattgtaaacagcttaagtttattttgtgtatgatcgaggcactctgttgcaggaaggtgtgtaattgggttctctctgcttcaaatgcgctctttcaaaccattcattatcctgtgtatttttaatgtggttttagtaaatgttggtagtagctctgttgaagtaggtaattgtgttatgttttgggtggtacacacttggggcatggtaacccaaatttcatgtgcacggtttccctttagcccactgcccaaatttcacatacccttcaccctttgttccctttgtaaaaggagtggtatctgttttgagctgccaattcagatgatcagaaatgctgctttcctcagcattgtcttgttaaaccgcatgccatttggaactttggcagtgagaagccaaaaggaagaggtgaatgacatatatatatatatattcaatgaaagtaaaatgtatatgctcatatactttctagttatcagaatgagttaagctttatgccattgggctgctgcatattttaatcagaagataaaagaaaatctgggcatttttagaatgtgatacatgtttttttaaaactgttaaatattatttcgatatttgtctaagaaccggaatgttcttaaaatttactaaaacagtattgtttgaggaagagaaaactgtactgtttgccattattacagtcgtacaagtgcatgtcaagtcacccactctctcaggcatcagtatccacctcatagctttacacattttgatggggaatattgcagcatcctcaggcctgacatctgggaaaggctcagatccacctactgctccttgctcgttgattttgttttaaaatattgtgcctggtgtcaacttttaagcaacagcactgcctaaaagcaagcagagaacagaatcccagcaccattctataggcaactttttagaattcagatatagtaaatctgttccagatttatgatgttttatgtaaaaaattttgtataataacataaaaaaaaaaaaaaaaaaaaaaaaaaaaaaaaaaaaaaaaaaaaaaaaaaaaaaaaaaaagg

SEQ ID NO: 24299 - DNA, 2398 bp, Homo Sapiens
ggctctttttaacatgaggtcactgaaaatccataattaaaacattaaaaatgggccaggcggtagctcacgcctgtaatccaagcactttgggaggctgaggtgggaggattgtgtgaagccaggagttcaaaatcagcctgggcaacatagcaagaccccatctctacaaaaaaatttgaaaaatagccaggcgtggtggcatgtgcctttagtcccagcttactctagaggctgaggcaggaagattgcgtgagctcaggagttcaaggctgcagtgagctatcatcacaccactcagagcaagactgtctccaaaacagacaagtgaacaagaaaacattagtgacggatctaaggaaacttagccaagttttgataacggaacctgggcgttgtggcatactctataaaaagccattcagcagccttcatctaccttttattctgcttcacttttatttaacttctgtagccctttaaaaaaaatcaatcttcttgtttttatttagtataacagaagagaactataatttcctgccacatagcccctccaagaaagattctgaatggaagagtggaacaaaagtcagtcgtacattcagctacatcaagaataaaatgtctagcagcaagaagagcaaagtgagtatcactgtgggcattgcttgtgatcacctcagtaggatcctgtcacagcctgcattcacaccaaaactggttaaatcatggggacataaatggaaataaattcaggattactctccgaaatcgcctaatatttaaaggaaaataataagaagaaaaatagcaagaagtggaactaccagttactgagttttcactatatgctaagtgctttccatatattatttaaccctttcaacaaccctgtcaggtaggtgttatgtctcttttctaaaagtgatgtaccttaccgaggatactcctctaatgtgaagaagtagttcaaaccagatctctttggtttcaaatcccatactcttaaaccacagtgcttaaatctgtaatatcagtttaaatgcaacagaaggattttatgcaaagatcaaaggattgaaaatatttatatttgggtttagagggaaggattatcccacagaagattacaagaacttttaagactaatatgatttcttagatctatttctaattaggagcatttggaatatattctcttagtgattaagagattaaataaatgtttaaaccgtgtgtgtgtgtgtgtgtgtgtgtgtctgtgtgtgtgtgtgtgtaaggctccactgtatcacccaggctggagcacagtggcgtgaccatagctcactgcagtcttgaactgccaggcttaagcagtttcctgcctcgcaccgtagcctcccgagtagccaggactacagtcatgttgtgccatcgtgctgagctatgtttaaatttgtttgtaaagatgaagtcttgctgttgtgtctaggccggtctaatgccttacctcaaacactcttctcgctgcaggcttccgaagccctgggtgtgatccaccgtgcccagcctaaagtaacattttttatctaattatttttcacatgctcattatggaaatcttcaaaatctaaaagtaaaagaatgaaaatctcctggaataaccccgcttagagataactacacttaatgttttggtttatatatttctaatcttttttaaaaatgtattttcaaaagaaagggagaaaagaagttcactttcttatactgattcccagtgctaaaccaaaactgattccatttcaagtccgtggggaaaaacttttcgcctctcacaccctgttcatctacccacaacaccctctaacaaaataaagacataagtaaataaaaatttgaaatcagttaaggaactcttgcaaggaatcactgtgtgtgtgtgtgtgtgtatgtgtgtgtgtgcacgtgcatgcatgtgtgtgtgtgtgtgtgtgtggtatatacatgtacatacagatatatacacacgtagatacatgcatatttagaagtaagggaataaacaaacattgaattcaagaatattgtcataaaagggcattgcctcctccctcacaaaacaaggtgcactaagcttctcaagccctcacttcagtgggctgatggaaatatagccaaagtattttaccatgttttgtaagatctcttggtttagcaaatacattcaaagaaatttttccaccaaacgtgccacaagaattgtgttttcatttctcctgtgcaagtacagaatggagagaaagtaggcaatcagggagagatgcaaagagtctagcaaattatttctagcataatcacacatttaacttcagactcagccttgttttataattccaaaaaaaaaaaaaaaaaa

SEQ ID NO: 24300 - DNA, 7028 bp, Homo Sapiens
caaactcctagtggggagccggcggcttgtggacgtgatggatgtgaacacccagaagggcacggagatgagcatgtcccagtttgtgcgttactacgagacgcccgaggcccagcgggacaagctgtacaacgtcatcagcctagagttcagccacaccaagctggagcacttggtcaagcgtccgactgtggtagacctggtggactgggtggacaacatgtggccccagcatctgaaggagaagcagacagaagccacgaacgccattgcagagatgaagtacccgaaagtgaaaaagtactgtctgatgagcgtgaaaggttgtttcaccgacttccacatcgactttggaggcacttccgtttggtaccatgttttccggggtgggaagattttttggctgattcctccaacgctgcacaatttggcgctgtacgaggagtgggtgctgtcaggcaaacagagtgacatctttctgggagaccgtgtggaacgatgccaaagaattgagctgaagcagggctacacatttttcatcccttccggttggatccatgccgtctacacccctgtagactctttggtgttcggcggaaacatcctgcacagctttaacgtgcccatgcagctgcggatctacgagatcgaggacaggacgcgggtgcagcccaaattccgttaccccttctactatgagatgtgctggtatgtcctggagagatacgtgtactgtgtgacccagcgctcccacctcactcaggaataccagagggagtcgatgcttattgatgccccgaggaagcccagcatagacggcttctcttcggattcctggctggagatggaggaggaggcctgtgatcagcagcctcaggaggaggaggagaaggacgaggagggcgagggcagggacagggcacccaaaccgcccaccgatggctccacttcacccaccagcacgccctctgaggaccaggaggccctcgggaagaagcccaaagcacctgccctgcgattcctcaaaaggactttgtctaatgagtcggaggaaagtgtgaagtccaccacattggccgtagactaccccaagacccccaccggctctcccgccacggaggtctctgccaaatggacccatctcactgagtttgaactgaagggcctgaaagctctggtggagaaactggaatccctcccggagaacaagaagtgtgtccccgagggcatcgaggacccccaggcactcctggagggtgtgaagaacgtcctgaaggagcacgcagatgatgaccctagtctggccatcactggggtccctgtggtgacttggccaaagaagactccaaagaaccgggctgtgggtcggcccaaggggaagctgggcccggcctccgcggtgaagttggccgccaaccggacaacggcaggagctcggcggcgccggacgcgatgccgcaagtgcgaggcctgcctgcggaccgagtgcggagagtgccacttctgcaaggacatgaagaagttcgggggccccgggcgcatgaagcagagctgcatcatgcggcagtgcatcgcgccagtgctgccccacaccgccgtgtgccttgtgtgtggcgaggcggggaaggaagacacggtggaagaggaggaaggcaagtttaacctcatgctcatggagtgctccatctgcaatgaaatcatccaccctggatgccttaaggtgagtggcccagtggggacaggtggtgctgacgctctggggcaggtagggttgctggagatgctggtgagatggtgggatgcaggtcgtgcagtgaattcctggaggacccctgagtctgggtgatcctgtgtgtcaagggataagcccggggcaaggagggcctggagtacctcagagacccagtgtcatcaaaggaataaacacacccccacctcccaggatgtcagaaccagagagggtttccagagcctcagcggatggcaaacacaggctgcttgtttgtagctgggccagagggagggcctccaggtggctccaggcttctgggagaacaaggccccacaccacacttcttcccccagcacccagtagagtcctctgcagagtcctttctgcatgccaggcgctgagctggtggctttacctgggtcatacccccccagtgagatgggcacactaacttttatggccgagggcaccagcccacagagacggagtgtcttgcccagggtcccagagaagcaaaggggctcagcctctgaaccctggcctggatccacagctgcccgtctctgccagcctctgcagctgtgttttcttttggctggaaacgggatagatgtgacgttggggagggggtgctgctgcttctggaagacgtggcgtcacagagccttgtgcccgtgggccatcttctccgcccgtccctcttctgagtcctggtgttccccgcagattaaggagtcagagggtgtggtcaacgacgagcttccaaactgctgggagtgtccgaagtgtaaccacgccggcaagaccgggaaacaaaagcgtggccctggctttaagtacgcctccaacctgcccggctccctgctcaaggagcagaagatgaaccgggacaacaaggaagggcaggaacctgccaagcggaggagtgagtgtgaggaggcgccccggcgcaggtcggatgagcactcgaagaaggtgccgccggacggccttctgcgcagaaagtctgacgacgtgcacctgaggaagaagcggaaatatgagaagccccaggagctgagtggacgcaagcgggcctcatcgcttcaaacgtcccccggttcctcctctcacctctcgccgaggccccctctaggcagcagcctcagcccctggtggagatccagtctcacttacttccagcagcaggtgctcccacgacgcacgccctcctgaggccccggggactggcgagtcctgggctgtcccccaccccaccccgctggtcctccaccccactgctgcctctcctgaggcttcccaggtctcggccccagatctctggctcgtggttctggcttggggcctgggaagctgtctgtgcctagagcctctgttggttgggatggaagctgtgagtccagggaacctctgaggagcctggtggccctgctccacccacgggccgtgctgtcaccagccacaaggtggcgccaggagtctctcccagctctagccattcctgctgggccggggattcccacagggctgtgctccagaactggctcccagagccgaggatgatttgaatgggcggctgcacatctccaggtctgtggggtgggaggtcagttgggtgggaacagttcaactgtactcctacttccagcttcttccttgaaagctgcaggcagggctcgcccgtctgtcggtcagacgtggagatggcatttgtggggaaggcctccctccagcccctcctctggagactgtggactcgtggtggggtggggtgtcgaggagaccaaatcccacgagcccggggagcaagctctgcgtcctttctttttcgtgacagctcaaacctggcaaagaagataagcttttcaggaaaaaggtaccatcttcccctccctcctgtgccccaggcctgagcggttagagctgcaccgcagctccctgggccacagtcccgtggcaggggggcgggaggccttgggcgggcgcagccctgagccccagaggctgacgcgtctccgctctcgccctcagcggcggtcctggaagaacgccgaggaccgcatggcgctggccaacaagcccctccggcgcttcaagcaggaacccgaggacgaactgcccgaggcgccccccaagaccagggagagcgatcactcccgctccagctcccccaccgcgggacccagcaccgaaggggccgagggcccggaggagaagaagaaggtgaagatgcgccggaagcggcggcttcccaacaaggagctgagcagggagctgagcaaggagctcaaccacgagatccagaggacggagaacagcctggccaacgagaaccagcagcccatcaagtcggagcctgagagcgagggcgaggagcccaagcggcccccgggcatctgcgagcgtccccaccgcttcagcaaggggctcaacggcaccccccgggagctgcggcaccagctggggcccagcctgcgcagcccgccccgtgtcatctcccggcccccaccctccgtgtccccgcccaagtgtatccagatggagcgccatgtgatccggccaccccccatcagccccccgcctgactcgctacccctggacgatggggcagcccacgtcatgcacagggaggtgtggatggccgtcttcagctacctcagccaccaagacctgtgtgtgtgcatgcgggtctgcaggacctggaaccgctggtgctgcgataagcggttgtggacccgcattgacctgaaccactgcaagtctatcacacccctgatgctgagtggcatcatccggcgacagcccgtctccctcgacctcagctggaccaatatctccaagaagcagctgagctggctcatcaaccggctgcctgggctccgggacttggtgctgtcaggctgctcatggatcgcggtctcggccctttgcagctccagttgtccgctgctccggaccctggatgtccagtgggtggagggactaaaggatgcccaaatgcgggatctcctgtccccgcccacagacaacaggccaggtgagttgccaggctgggggtttctgtgggggtggggtgagcgagctagactgttggatctgcttttaccctcagaccccagctgttccccaaaggacatagggatgagtctctgctgccatgttctcagtttgcttcaggcacagaggggatctgggaggaggcaggggctcctgtgcacacgtgagactcgctcctggggctccgcgtgcgtctctctgctttcctgttgactcgctcatggggctctgcgtgtgtctcactgctttcttattgactcgctcatggggctctgcgtgcatctcacttcttttctgttgacttgcccctcgttggtttcaagcctccactgccatcgggatcagtgtggttgtgcaaaggcttccaggatggcacctccccctggactgggctggactgcctaggtccgtgcttctcgccaagccatggggatcggagatgctgcgcagcctctgcactggttggctgatgactactgggtggaatgtgggcatagtgtttctaggtcttttagtttttcaagagaatctgaaaatctaagttttgatgtggagtctgatttttcactgttggaattatgattttgggaggaagcagtttataactaaatgaaatctgagtgttctgtctggctggtgggccttttagagtgtcatgtcagcatgaccaggcctcctcggtcagattgacgggttgccccctccttcctgccccaccaggtcagatggacaatcggagcaagctccggaacatcgtggagctgcgcctggcaggcctggacatcacagatgcctccctgcggctcatcatccgccacatgcccctgctctccaagctccacctcagttactgtaaccacgtcaccgaccagtctatcaacctgctcactgctgttggcaccaccacccgagactccttaaccgagatcaacctgtctgactgcaataaggtcactgatcagtgcctgtccttcttcaaacgctgtggaaacatctgtcatattgacctgaggtactgcaagcaagtcaccaaggaaggctgtgagcagttcatagccgagatgtctgtgagtgtccagtttgggcaagtagaagaaaaactcctgcaaaaactgagttagtccaaggataagtatgtaaatacggggcgggctctgggaggggagagactttacaaaaatgagggcttttattttccatttggaacgtgggacaacagaccacaacgcaattccattttgcaagtctttccaagggagaagctgttcaaccacccgtttgggggatgagtgagccgacactttcctttggtctttctgaatcgtaactgcactgctttctggaccatttctaaggcggcctttacaagaagacattcctgtcggagaggagggtggacttcggagaaattctcatactgaagcatgagcttaggagtttctgttagtggtagtggtgttttggacacttcattccttgcaacaccgaggttttgggtgttgacataaagtggaccacacaccacatctgctgccgtcttgacacttttttttgtttggttggttttgttacatcttacattatgcagaactatttttgtacaaattgtttaaaagttatttatgcaaggtttgaatgcataccagtgtttttattgttttgagattgccaattttcctgatttccttaaggtaggagagaatttaacgtgtacttcatcgacacaacccatctacaaatgtgcccagatctaacaaagtaggctaagaccttccacttaaaagcatgtttaactggaagttgagagtctgctttgtacctcaagagttacatgagcatgttgtggataaatgtaaattatagtcaaagtaagatactctgccaagtttcctctgtagagaattcacttttctcaaattttaaaatttcgacttcagcctttgcactcaggaggttctgctccagcatgagctcttgtacttacatagatctaatttatacagtgagtcaagacgtagaataaatgctcccacatagcctttcttttgcttttgcttctctcctctgaagtgtgagttgagttctcatttaggtttgtaacatggctatttcctagttgtaaagttctgcatttataagtgccattgttgtaaggtggtgtttcctagaccttccctgatgcgattttacctttgttgaatttgtataaacaattgtacaaaaaaaaccaaaaaaaaaa

SEQ ID NO: 24301 - DNA, 1073 bp, Homo Sapiens
caccgactccagtataacctcatctgtatccgcagcaaccgtttaccaataaggtcacattctgaggtactagaggttgggacttcaacatcggaatttgaaagggacagcattcagcccatgactccagataaacgtgaggtatgctatatcattcctaatttacagatgagtcaatacaaacttgagtgagcttgctcacaattccatcaaaggcagggttcagacccaagtttcagcatttagggcaggtgtcctctgcatggaagaaccatactcaatagccgtaaacgctgacaaattccccttcctccctgccttctgatgggggctgggcaggccagctggagctgtgtctcctgctgggattccggactgagagtgacagcaggtagtgaaacctcaagcaatttaaaacatggtattgttcctggaagactggttatgttggctagggtcagcaagagagggcatcaaggctgtagtctagcagtgacttaatctgcaagtcaaaccagacgggtattttgtattattcatatgtcacatcctaccaacagacagtaagtcaggcaaggctcctggtgctccttgtcactcacgtaattttcacatcaggaaaactctgggctgggtgcagtggctcacacctgtaatcctagcactttgggaaaccaaggtgggtggattgcctagctcagtgacaccagcctgggccacatggcaaaaccccgtctgtaccaaaaatgcaaaaaattagctgggtgtggtgttgacgtttgcggtcccagctactctggaggctgaggtgggaggattgcttgagtctgggaggcagaagttgcagtaagccgagatcatgccactgcacaagctaggtgacagaatgagactctgtctcaaaaataattaaaaagcctctgccccaaactcgttaaaagattttataaccacaactgctgtttctgtgtagatgcatctgcatgcccaggagcagtaaatgcaataaaatcatttggttatactttgaacacaaaataaacggttgaggcttttactttctaaaaaaaaaa

SEQ ID NO: 24302 - DNA, 3546 bp, Homo Sapiens
attttttattgttaatgtaacttaattccttaaaacctggaatattaatatatataatctattaaaagctgaagattaaatatgtaatttttgcttttagtttcttgtgttagtatgcttaaaggtatcaatacttttattctatattcattagaagaaaggtaataaatttaagtttcattgctgaaaaattttaaatgagtgccaccccatagccatagtcattttgattaagcataatttaactttcattatagcataaagagaaaataattattttagtatggaaacagtgataggcagtgctgtaaacaatattctctgaaaagttgtgggggtcacaaagaaaattttaaagaatatagaagcttttttaaaaaatctttttagtgtagtttcttagaacaaattataaacataatcattctgaataatcaatttttatttagtccttaactatgtaaaaccgtatcagtagaaaaatgtgctggtgtcgtgtctaaagatggataaatttctttggaatttatctttggagaccaactttatgaggcagactttttgtctacggctttggaaccaaaaaaacttcactctaattcagtcctaaaggctattttacattttgccggggtaaagtgacttcaagatacagcatggtgtcttgtatctagtagaatattgtgctagccatctaaaaaagtggatttgagccttaatttggccgtttctcaattgtctagttgaccttagacaattagtgtccatggctttccttttgtttttcccatactgaggaacttaaactacagctctaaaatgtcttttggttttaaaattctgaatgcttatatactactattaaaaattaaaaatccctcaaatagtagggaaatacaggtaatatgaaattaaatgtatttttatccattatttgattcccacctgttattttatttagaatacgaatacaaccaagtagggaaaaacgtatcagtaactgctattcaacttaaattcagcgaattaatagctgaatagaaatagctaatgacaatgcaaaagagaaaacaagccatattgctaagaaaaggatagtaagctgcttagaaagaaccagcctgtgttggaaataattctcttctagataatttaccttattttcttggcttgtactaattgaatggaagtggttaatttgttcagagtttattgccgtttgatgccaccccagtctatagttctgtgtgactttccatattgaaagagtagggttagtagccaggttgtcagtcttttacaaatgtctacataaatgtctacataaatctgaaagtggtttatattcaaggttagtttttcagtagcgtctcctccttattcattcacttttactgtgaagactgaaatccaaaagccaggttccccaaaaaagtatttttaaaaaattttaggggaccaaaataaatagaggaagaccaatataaaaaaatatgttcaactattccattttaaatttaaagcagaaaaaaaaattgtgcccctcagacctaaaggcagctttaaatgtatatagtttggtgaaacatttgggaaatattaatttggaggtttagaagcatacgaaaaacaaattcaaagcacttgaaagtaaagacaatatcatgaggtcgaaaaaacttcaaaaggatattaggtaagagaaaatgtgaatgaaagcagtgaatttctgcctctcctcgtatttagggtacttaaaattactaaaaaatactgtctttttaccatacagctagatggcctgtattattcttaatgtggccaaaggagtgaagactgattagggttttagaatttggaactgtagtcacataaaggcatcttttgcatttcttaaaccagtaatctacattttctcctggaaatggagaaatatgaaatgtgctgtgcatagcttttggaatagaaaacaaagttttaaaagaatggatatgttttcttgcacaacttgtaaaattttaattaaaaaattacctcatttttcaatccataaggtgctttgctcaagtttgtgggatgtttgtaccatcccataaaaacccccttcacccaaactgtatttgaaatatgcaaaattcataactaagggatagcattccttggagactttgttttgttttactcttgtttaccagctgggccaacatggtagatatatgagattcacatatggtttcattaaagcacataggaaagtgctcagtcaatatttaattagtttaattagataagggaaaggagaaatcctaaatttgatggattcttttatactgtgaatatatttccatcagtgttggtaagatatcaaatgactatcagttgatcccagtcatcagtgacttatttgcatatttaagccctattcacaagagaccataatcattttaatcttatattttccctcaggaaatttagggactctgaagcccctattttattctcttggagtaaactgttgagtgtagttacaaaaacttttatttatgacttaaaaaaagtttagctgctatttcagtgaaagtgtaaaataaaacggtcatgatttttttcaattacagaatagttacaaattttaccatgttcatctattccacagagcatgttaaaaacaacaacaacaaaaacctaacagcaattacaaccttggtgttgcgtttattctaatcagagtgaatgattataatcacactttgctattttaacataaattggtgctttagagcattaaagaggaagcagcaggccctgtactcagtatttattatttcttgcctcagaatgcaaaacaactttaaagtgtctatattcatatatatgtgcatttcttaagatttaaatacaaactgttgttactccttaagcttcaggctttctgcgaaagctctaagaatatcttcattactatgcttggtcaactggaagatggtattaataaggtcagaattaggaattggattgctctgtgggtcctccggtattgtgcagaggaaagaaaaatgtctttcacaccacaaactgtgtgtctgaaccccagccaaacaaatgtgttccattggtccaatatataagcattaacaacaacaacaaaaaatttaaaacaagtaaattaatgcattcacatgatcacttcttgaaaatggttcaaagcatgttttcctgatggtgggattgtttaaatgacatgttttaaagtttttaatactttattagttatgaagtgcttcttttatatgttaagtttaggttgccagtactcataatttttatttctgcaattatgttataatgagttgtttgcatgcctacttaacccaagtaaaacgatgctgtttgctctggaatgttcatcttttagacaggttttggctcatttccaatcatggtgcaatatagtgtaacattcatttgttttcattcaacagttttatttttgtcataataaataattacttttccaataaaaaaaaaaaaaaaaaaaaaaaaaag

SEQ ID NO: 24303 - DNA, 3443 bp, Homo Sapiens
gaggatttgaaaaataattcaaaatatttgaaagcagccaaaaaagggaaagaaaaacatgagcctgatgtctcctcaaagtcgtcttcagtgttagactccagtttagaccacagacataaacagaaagtcttacatgacacaatggatctgaatcatctcttgaaagcttttctgcaattagataaaaaaggaccacaaaaacatcactttgatcagccttcagtagcacccgggaaaaactactctttcacaagagaagaggtgagacagatcgatcgggaaaatcagaggcttttgaaagaactgtcaagacaggcggaaaagccaggaagcaaaagtacaattcctagatcggctgatcatcccccaaagttatatcacagtgctctcaacagacagaaggaacaacaaaggattgagagagaaaacttggctttattgaaaaggcttgaggccgtgaaaccaacagttggtatgaaacgttcagaacaactgatggactatcatcgcaatatgggctatctcaactcatcaccattgtcaagacgggccagatccactcttggccaatatagcccattaagagcttccaggacatccagtgctacgagtggtctcagttgtaggagtgagcgatcagcggttgacccctccagtggccaccctcgaagaagacctaaaccccctaatgtccgtacagcttggttataaaacacttttttactttaaacattgttcacacaacttttcttgaagtgctcgtgcatattcctataattctctgtgtaaacatctagaataccgttttagcaattgaaggtgtacaacagtgagttgtaatgtattgttattcagtgcaaaattattgtcaaaaaacgatttaatgtaaaaagtgtttcctgaggatgtatttatatgagatgtatgtgttcttaatagagaaatagtggtatgcatgtgtatcttctaattattcagttgtcatgctgtcaaaatagtagtgatagtatcattgcatgtcgtacccaagatggtcactatatagttttcaatttgtgttattttcatttctttataagtgttataccatgagctcagctcctaaatttggctggctttgtttttcatttgctttagaacttatgtggcatgacatagctcgattgtatgagatttaacacttattatgaaacaaatcttgaaatttgttttcactggtagagctgatctagatttgatgagcagattgagagacgcttctattggagcaattcttgtaattcaccagaggtatctagttgttgtataagtgcactgagttagatcttaaaagtttgatcaatcattccaaaccatttcaaatatgaatattagaaagttcaacttagaagcttcccttttgtgttttcatgcattcaggtaaagtcctatttatgactcttagaaatgaggtaggttttagagctagtcttctaactcgtgaatagtttaaggaccacatcagttgcaaaccaagtatttgttgaatcagtaaaatggcactatcagcatgaagagccgagaagcagatcctgaggtgtgtcggacagtgttttaggtaattcagtatttattatgttattagagaagacttagcgtaagaaagaaatgctttagaaattccagcaagtatttataaggcctgaaaaaactaaaatttgaacaaaaagggaaataaatcacacatttgttgaggctgctgctttaagtattagctaattttcttgttttggtttactttgatttatttgattgaaccctggaagtattatttttaccagtcccacatttaaagacctagtaatcttgatggaattggtaatggcagatagggtttaatgttgttgacttttcaaattagaattttttttctatgaaacttaggcttttatataacaaagtatgttatctcattgttaccgccgtttttcactactagccttttcagtatgcccttaaaatgtattggaaaggttccatgttaaatgacaaatatctttttcagtatgaatttttgatctgtagccacaataagattttcatttttcagtgctcaggctctgtagcatgtatgctgaatgcttttttccttagcacctttaacagtaaggtgttactgcattttacaaaacatcaattcaacatgtcttggatttagtttgtattcatagattttgttaaggatcaggcctgtgaacatgggcacagtgaggttaaataattcacctggccacaacctggctttgaggttctgcttttgggggccataattttcattcaatgttattcgatgctctgttctggtgaacaagttactatacctgctgtgtatataagcttgagctatactaaaccaaggctttattttcttttgttttttaacttactgtacttttactgtttatataacctatatttcaagagagagaagataatgctgaattttaaatttagcatttgaacatctgtccaatagtgaattaatcagtttttttaaaattgatttttaagttgttccagaaaaaaatatatatatatgttttatatatataatctttttatatatataaaaaatcttttttataaattttattttaaaaatcttttaaaaaagatttttatatatatataaagactatatatttatatatagtcttttctgttcataatggcattagtctctgagtacattttatattatctttgttgctacatgtcaggatacaacacaatagttttataaataacaactgtactttgattttaggtactaatttaatgctttagtttttactactttgaagggaggttcatctaagtattactgataacagggatccaacttaaagtaaaagttggaaagggcaagagtcttttaagcggaacttcaattctgttgtcatggttacttatatataatgaatataaatagacaaataggacttggaaaatgtggtatattctaagtcaagatgctatgaagttgttatagtttaagggacattcttaagaaggaattacttaagtacattactcttctcattttcaaggacatgaaaaagtaaaggatggtctggcactattttattttatttttttttgacttgtactgaatatatgtactttgaagatttacatctataactagaaagtatgctaatccgaggtctggttattaggccagattcttgttcagttattttttaaactaatgttgcctcctttttagtaagattctacgaaagttttttaactattaaagttatttcttaaggggtagctcttatacttcctctgctctctttttcagtttccataaaaagctgttttcttagctattactccaaataaagttctttggtttgcttaaaaaaaaaaaaaaaaaaaaaaaaaaaaaaaaa

SEQ ID NO: 24304 - DNA, 8281 bp, Homo Sapiens
gaccaatgaagactcaccaattatagaatattacccacctgattttaaaactgacctaaatgggaaacaacaggaatgggaagctgtggtgttaatcccttttattgatgagcgattattggaagccatggagacatgtaaccactccctcaaaaaggaagagaggaaaagaaaccaacatagtgagtgcctaatgtgctggtatgatagagacacagagtttatctatccttctccatggccagaaaagttccctgccatagaacgatgttgtacaaggtataaaataatatccttagatgcttggcgtgtagacataaacaaaaacaaaataaccagaattgaccagaaagcattatatttctgtggatttcctactctgaaacacatcagacacaaattttttttgaagaaaagtggtgttcaagtattccagcaaagcagtcgtggagaaaacatgatgttggaaatcttagtggatgcagaatcagatgaacttaccgtagaaaatgtagcttcatcagtgcttggaaaatctgtctttgttaattggcctcaccttgaggaagctagagtcgtggctgtatcagatggagaaactaagttttacttggaagaacctccaggaacacagaagctttattcaggaagaactgccccaccatctaaagtggttcatcttggagataaagaacaatctaactgggcaaaagaagtacaaggaatttcagaacactacctgagaagaaaaggaataataataaatgaaacatctgcagttgtgtatgctcagttactcacaggtcgtaaatatcaaataaatcaaaatggtgaagttcgtctagagaaacagtggtcaaaacaagttgttccttttgtttatcaaactattgtcaaggacatccgagctttcgactcccgtttctccaatatcaaaacattggatgatttgtttcctctgagaagtatggtctttatgctgggaactccctattatggctgcactggagaagttcaggattcaggtgatgtgattacagaaggtaggattcgtgtgattttcagcattccatgtgaacccaatcttgatgctttaatacagaaccagcataaatattctataaagtacaacccaggatatgtgttggccagtcgccttggagtgagtggataccttgtttcaaggtttacaggaagtatttttattggaagaggatctaggagaaaccctcatggagaccataaagcaaatgtgggtttaaatctcaaattcaacaagaaaaatgaggaggtacctggatatactaagaaagttggaagtgaatggatgtattcatctgcagcagaacaacttctggcagagtacttagagagagctccagaactatttagttatatagccaaaaatagccaagaggatgtgttctatgaagatgacatttggcctggagaaaatgagaatggtgctgaaaaagttcaagaaattattacttggctaaaaggacatcctgtcagtactttatctcgttcttcttgtgatttacaaattctggatgcagctattgttgagaaaattgaggaagaagtcgaaaagtgcaagcaaagaaagaataataagaaggtgcgagtaacagtgaaaccccatttgctatacagacctttagaacagcaacatggagtcattcctgatcgggatgcagaattttgtctttttgaccgtgttgtaaatgtgagagaaaacttctcagttccagttggccttcgaggcaccatcataggaataaaaggagctaatagagaagccgatgtactatttgaagtattatttgatgaagaatttcctggagggttaacaataagatgctcacctggtagaggttatcgactgccaacaagtgccttggtgaacctttctcatgggagtcgctctgaaactggaaatcagaagttgacagccatcgtaaaaccacaaccagctgtacatcaacatagctcaagttcatcagtttcctctgggcatttgggagccctcaaccattcccctcaatcactttttgttcctactcaagtacctactaaagatgatgatgaattctgcaacatttggcagtccttacagggatctggaaagatgcaatactttcagccaactatacaagagaagggtgcagttctacctcaagaaataagccaagtaaatcaacatcataaatctggctttaatgacaacagtgttaaatatcagcaaagaaaacatgaccctcacagaaaatttaaagaagagtgtaagagtcctaaagctgagtgttggtcccaaaaaatgtccaataagcagcctaactctggaattgagaactttttagcatctttgaatatctccaaagaaaatgaagtacagtcatctcatcatggggagcctccaagtgaagagcatttgtcaccacagtcatttgccatgaagggaacacggatgcttaaagaaattctaaaaattgatggctctaacactgtggaccataagaatgaaatcaaacagattgctaatgaaatccctgtttcctctaacagaagagatgaatatggattaccctctcagcctaaacaaaataagaaattagcatcttatatgaacaagcctcacagtgctaatgagtaccataatgttcagtctatggacaatatgtgttggcctgcccccagccagatccctcctgtatccacaccagtaactgaactttctcgaatttgttcccttgttggaatgccacaacctgatttctcctttcttaggatgccacagacaatgaccgtttgccaagtaaaattatctaatggcttactggtacatgggccacagtgccactctgaaaatgaagccaaagagaaagctgcactttttgctttacaacagttgggctccttaggcatgaatttccctttgccttcacaagtatttgcaaattatccttcagctgtaccacctggaaccattcctccagcctttcccccacctactgctaatataatgccttcgtcgtctcatctctttggctcaatgccatggggaccatcggtgccagttcctgggaagcccttccatcatactttatattctgggaccatgcccatggctgggggaataccagggggtgtgcacaatcagtttatacctctgcaggttactaaaaaaagggttgcaaacaaaaagaactttgagaataaggaagcccagagttctcaagccactccagttcagactagccagccagattcttccaacattgtcaaagtaagtccacgggagagctcatcagcttctttgaagtcctctccgattgctcaacctgcatcttcttttcaagttgaaactgcctctcaaggccatagtatatctcaccataagtcaacaccaatctcttcttcaagaagaaaatcaagaaaactggctgttaattttggtgtttctaaaccttctgagtaaatttggctcttagaattaagttaatttcttctctttccatctacctttttataaatacatatctatgtctcataaaaattagaatgtactattttaaaataatatgtgtaaattgaaatttttttcatttttaagttatcaggcacttttcatgctgtttaaaagactgtgtatcaaattgtgcactttaagtatgtgcagtttgttgtatgtcaattatacctcaataaatctgtaataaaaaactaaattaaaccttgcattaaaataatatcacagtatcagtggactaaacattaaaatgtaccactctaatcattggcctcatgattgaagcatcctgaactatgaattagacatcagttagcaataataagcattttttacactatcattgaggaataattacatggagcatgaaatttgggcctccagtataacttactgaatgtggattttatttctctttttaatgatgtaagaaaattgtcaggagaatggctcttatttatgtgtgttttaacttatgctttgttgcctctgagggtctttagacctgctgtgaaaggatcacatttgttgtggtgctgccagttttgctttattctaaattttgtaccaaagcaactttagaataatcagaatatttcatctaactgcttagaactataaatagcattctaaatttgagtaaatacaattttttaggttactcaagaaccagcattagtaatttctagtaaaattgtttcaaaatctacagggtacaatgattacaaattaatcttctaacaaaataaaatatgaaatattagtcatgttaattaataaactgtattattttgtatagctttttatttgcttacctgacattttatgagagcttcatagttggtcggtatgtagtgcttcttgggactgaagaaattctaattgttgtttaagttccaaggtgtgctacaatataggaggcacagtcatcagtttgtgacatacattatttactgcctatttcattctgattctatatttttagctttatgctgaactgttcaatgatgctgggattctctctttgcatgtcatatgtgaatgtgtggttcaagctgtaactgttgaaattattttagaatttatgacgatttctcagcagggcctatgtttatatatatatatatatttattctttagtttttgtgatatgcttatatttttaaggaagtaagttatagcatacttttttaaaagtaggaaccacaatctttatatggagcagcttgttatatctgattttcatgtaactcattggaaactctgccatgactcttaaagtagtcttacttgttttttaaaatgctggtattaaactaaatggactcctttcactaactgctgatttcagagtttaaatgttagcaggatatttgtgtattagcagtgccttcagtataagagagaaatattcattatctgtcatttatcatagtcgtataagtttccatgattttattttctgttattttcataagttcagatgtttatcagttcccaacattgtttctttatctgtagtgggatcttgagtaatgaggctcaagtaaatcctcaatgtgtataattattgcctcataaactctctctttgtttttaaaggaaacatctattatggtaatacaaagaaaagttaaattgtgacagtaatgttatattaacctcttcctactttaaagtgtgaaatgtttcacctcagctgtacaaactccagcattgagaatttgcctcactcattactcctgtgtgacagttatataaatagcatgcagctcacatctgttttagagcatagaagaagcggcacctgccatcttctgaaaactccaaagggaaatttcagtagacatagtgcactaaacccataaggatacttgaccaatatttgagcacagcaagctgacagttctatacagataggcagtgaaagagttttattttccagccaggcgcagtggctcaaatcccagcacttcgggaggctaaggcaggcggatcacttgaggtccggagttccagacaagcctggccaacatgatgaagccctgtctctactaaaaatacaaaaaaaaaaaagaaaaaagttttattatccttactttttttttaacattattattctaaaggtcaaaactgagaagagattaagataggagagagctccataatggctggatagtggtcaggcattctctattcttttccccctgtagacccattctaaatgtgggcctgaggtcaatgggagatgtgccctccctatggaggatgtaagaagcagaggccatttctgccccatgttgaggaaacaatctgttgatagacctggaatttagagtacatctgaaaagcagttggacttcaagaaatttaaaattctctctttgagatggggtggactaagaccacccccaaagtttaaaaatatgctcattcaacttgaatcttctgaggactttttgtgaaaatggtggactgtttagggcataggacagattccccaaattgctttatgcttccacataactagagcacttcaatctatttaagcctttgtctcctaactgaaacattatttctaaatatttctattcaataagttttttcttttttgagcaacttaagtgaattttgaagattgctccttccagtctcgttccttttcacattttcctgcattacctaataattacctcagcgttagaatttgaatgtattaattgatttaaacatcatgtagactaaagtcttaaacatctaagactcagttgtagttgcagaaaaaaattaaagtcacctctactgaaccttggtttcaatttaagatttttcttgcttttcaaaggggtaactaataaagattgaagggtttttttcccgattggtggaggaatgaagaactattgatgcaagtttttttattgtttctttctatgatcaggtacctgctttcattttagactgctacttccaaactaagctagattcttggttttaatgagaggaggcagagagagggaggcagatggaagaagaaaaacagttaaataagacatacccagtcactgcatttttggactataccgtatctttctagcacaaggaaatagataaactgtaaggtcttttttactcactttttatttatgtgttctatttgtgttagtcataactgtttatagtggttgtctaatttttacttttattatatgagatagagctgtgcagatcttcactcaagttctgtcacgcttcttcccattatttagagcacagttttttaaagcaactgtacaatttctcagccttatgagcttgctgtatttcttggtatcatgttgcttccaaattttgtttttactgtagaagacaattaatttattgtagagaagtggctgtgaaagtcgttctctgtctttaaaaatcaattgcagaagttcatttgtcatttttctagagataaattatagtactcaaactggcagtgctcagtatatacattttgtaagctttgtcagtgaaaccatcagttttgcaggagcttcctttcctagtcaagataaagcttaaaattccagaaattaatgtcgttcggactgactttattcatatttccatcaaacttctccaatacagtaagagatagtgttgaaccagcatcaagtctccagaaacatggcagagcagacaggccgttaagtttcacagacatcatagatccttttcttaaagaagaaaaacatgtataaaatagttttagtagtccaaaatgtcaactatctgtagctgcttttgtgtgtgtgtcagtgaacaaataataatgccttgctcaatcaatgcattcagccatctcaagtgcaatttgtgaaggagactatggtttccaaaagatacatttttttacaaagttaaacctgtaaaaagtctttttttttttccctccagccgtacaccaactgcacttggttgtttcagcagttggtatactattaaattgtccaggccaaataggtttctgtagctgttttagtaatttgaagccaaattctcatgctgtttctcattaaaaagaatgagaatttggtccatagttagctttaagttctctcttcctttctttcccttacagttaagggtttggtgggggatggggaggttgttttcgttttttggatttttttgtcttttggctttaagtatcatattttcttttgcctgtatccaactgcttctttgagtattttcatctagtttaatgtgagtaatagatgctgtgctgtcattgaagtgttcaacattttgttcatttaaacaaaagtgtaattcatacatatatagatacatatcttaattgatttctcaactattttataagtaactggaatttttcattagatcttatacagagaagtattttattaaaaattcaaaagggaagacttttatgtgctcattttgtaatttttgattttaaatatctttacattgtctgccaattaaagtgttttaaacttgcattggaatggactccgaatgtatttttgtggtgttacgttatccgtagatttctagcatgaagttagcctcacgatgctgtgcaaaggattttaaaatatgagagtcactgaaagagtttaaacatctgttcatgttaaatgctctatggattttaattaaagacttgagaatgattttaaaaaaaaaaaaaaaaaaaaaaaaaaaaaaaaaaaaaaaaaaaaaaaaaaaaag

SEQ ID NO: 24305 - DNA, 1664 bp, Homo Sapiens
ggaggcggtacacaaaactgccaccgtcccattacccaacagcctgcctctgttgaggggctttcctgggacttcagactggcaccctcattgtgcttgcagctgtcatgtttccttgcccagattgcccatagctgcttccctggcctcggccttgaacccctctagccagcaactgcccaggtaacactttataaaactgagccgctgtccctgcttggagccttcagagtagacttcagacctaggcagagtatccactcagctctgccgtttctcctgctccccacttcgggcctgcacgcttcccgccgctcggcatgctccttccccttctccgagaatgacgtgctccccgcactccccacactgccgccttgggaccaagaaggtgcctctcacaccttactgctctcctccaggcttcgtggttgcttttcagcctttttccctggatttgaactttaacaaaggtaagatggaggtttatttttcaccacttggctgtgagttccttgaggataggaacttgtgttttactcagatctgaatctccattgctttagtggtgtgctcaatacatggtaggggtgaatatttaatgaatgaatgagtgaaaatatctaaattttgcacaggagagcaattagagaggcttaaacaggaaggaagtcttctaattccttaaaagcattatctcatatttgaagagttcaagtttgatgcaacataaactgataaagtttgaaataaaaagagacaggttggtaggaaagaccattcatatcctatccccaaactggcttaagtccactcccactgcccccagctaccacctttttactttattctacctgctatttctttggccaccggaataataagcctgatgtaaattctgtttcatactcccacaggtcaactttttttggagtttgacaataattattccaagtcaagtaattcattgattttagtggaagattgttttccaggtgttattcttccatgcgcctcacccccatctcataaagtagaaaagagatgatttaatttatgggtctagaaaataaaaatgtaaatacttgcttgttaaattaatttttttctaccttcatttttacctttaatatttcaagataatattggacttaattctctgagacacacaaacatcctgcataagtatattgacaacatacattttatatgtaagtgaaccatatgggtgagcctctgctttctccctgacagcgctgttctttaagaaattaaggctaaccaggtctataggttttaatgggagatgtctcctaacttttcaaagaccagatgttcttgttatactgataaaaacttattaaaaaaaaaaagaaatagggattgatgatgttcaacattattctctttgaacaaatacatcatttgttcatacttggtttctcagtatttcaacaataaagcatgttttaatgatttgtctttagaggagtgagcactcctctgggggtatattacaactgggaaaaaaaatatagtttgaaaataaaataactgtttacccttaaagaaattaactctatggtgccttaaggttacatttgcaataaacttttttacatcttaaaaaaaaaaaaaaaaaaaaaaaaaaaaaaaaaaaaaag

SEQ ID NO: 24306 - DNA, 4019 bp, Homo Sapiens
gtgccctgcaggttgtgccctccgggatcctgattctattctctcctcccttcacttcaccaggggcgacctgacggaagataacatggagacagaaaatgcagcggcggcagctgccgcggccttcacagcctcctcccagctcaaggaagccgtgttagatggctgaagagggggagaacctggaagctgagattgtgtaccccatcacctgtggagacagcagagccaacctcatctggaggaagtttgtgtgtcccggcatcaatgtgaaatgtgttcagtacgacgagcatgtaatcagcccaaaggaatttgtgcacctggccgggaagtccaccctgaaggactggaagagagccatccgcatgaacggcatcatgctcaggaagatcatggactccggggaactggacttctaccagcacgacaaggtctgctccaacacctgccgcagcacaaagattgacctctcaggagcccgtgtgtccctgagcagccccacgtcggccgagtacattcccctcacgcccgccgcagccgacgtgaatgggtctcctgcgaccatcaccatagagacctgtgaagaccctggcgactggaccgcggccattggagatgacacatttaccttctggcgggggctgaaggacgccggcctgctggacgaggtcatccaggagttccaccaggagctggtggagaccatgagaggcctgcagcagcgggtccaggaccctcccctgcagcttcgagatgctgtacttctcaacaacatcgtgcagaacttcggcatgctggacctggtgaagaaggtgctggccagccacaagtgccagatggaccgctcgcgggagcagtacgcccgggacctggcagccctggagcagcagtgtgatgagcatcgtcgccgagccaaggagctgaagcacaagtcccagcacctcagcaacgtgctcatgacgctgacgccggtctccctgccaccgcctgtgaagcggccccggcttgcacgtgccacatcaggaccggccgccatggcctcgcaggtgctcacccagtctgcccagctggcgcttggcccgggcgtgcccgtcccccagctgaccagcgtgccccttggtaaagtggtgtccaccctgccgtccaccgtcctgggcaagggttcccttcaggcgccccccgccagctccccggcctccccgctgctcgggggatacacagtcttggcctcttccggctccacctaccccagcacagtggagatccacccggacgcgtccagcctcacggtcctgagcacggccgccgtgcaggacggtagcacggtgttcaaggtggtcagcccgctgcagctgctcacgttgcctggcctgggccccaccctgcagaacgtggcccaggcctcgcctggctccagcacaattgtgacagtgcccgcaggggctgcccccgggcctgaggagcacacggccaccattgaggtggctgccatggcagaggaccacgagcggaagtagccgacaggagggcgaggcccctgggacggacagggctggctgtctctcagccgcggcagcagggagcgggcagaggccgcagggctggctcgggcaggtgggtcacgtggtctgcagaaccaaagagaggaatcgccaaaacaaatcacgagaagagagaaggggacagaacagcgagagcaacctggaaaaccggtcttcaggtcccacgtttcctcccccttttttcttgggaaatatatttttccatctgttgcttattaatactgtttacacattgggccttgatcaggagccaggtgggcgggggctagggggagcctgggtgcagcagagacagaggaagcagagccaggtgccgagcgcgaccctgcaggtgctggacgcggtgcagcaggtcacgaggcccccatgtctgcacccagccaggtccctggggacgttactaactcatgacttgggagctaagcccaagtgtgaaacctctggatcctatggatttggtttcttcccacagttttctgtaggtttagtgtggctggcgccccgttctcctccagttgggaacatgcacccggagcttggggtgcagatcctgatgggtgcctgcctcccccgcccccagccggtgctcaggtggcccaggggccgcacagacgaggcgtggtccaggcattgttgcacatgtactgagggtgtttttaagtgaattgcttagtaggcttctaggaagagtcagatttatagcattttcaaccaaaataatggtgagtgcctaggcttcccgagttagctctttgggtggcccctgagcccctgtgagtgcacttgaccgggtgcggaggtcctgggcagcctgtccctgagccggcccctcccaggggtctgagatccatgaggtgtgtccctagggcttcagtcctggggcagaggcataaacagaaccagtcactatggaggtcgaggattcccatgtgggcccttcagcttgggctgcttggccacggaacagcccttggctccctggcccccggcccccatgcagcccctgggctggcccttggtggtctctgtccaagggagagcccctgggtgttcaggaggctgccccgggtgggctgctcagggcagctgccgaaggtggagcccagagcctgtctggaagggctgtctgtggctgtcctgagacctggccttggactcacaaggaagaccaggctgaggcccctccaggccagggtcctggggcaggcatctcagggagcagccagcccaggcctcctgccgtctccaacagggcatgtcccgggaggaccctgagtgccagattcccctggacgctcctgctgattctgtcggcagttgaaggcccgtctgaggccccgcaatgcgagggtcctgtgtcccacttcactgctccgaagggaactggctggctgtccgtccagtgagcggcccagaccccacctctgcgccattgtcaccagggccctgtcctggctgccctcacccatgtcaagctactgaggctgtgtcttgtttgttttctctgttacatttttgtttgctgttgtcacagtcagctggtttcggcgtgatgttgaccttttgatgtacatactccgttttaaactcatttccactctagttgagttctgcagcatgcagcggtatgaccctacgggggtcaggagagccctgcggcccccacccaccagctcagaacctgtcactaatacagctgcctgtgaccctgggacccgcaaccttccagctgcttccctttgtcaaagtcacgagtgcgtctgccttgacagccctcgtcaacagaacttccagtgggttgtgggttcatttcctttctttttaagaacagggttgggaccttttctgcccctgccccttagctactgaggcatagggagaggaagttaatttcagagccatacaaaaataagccacaaccagcttcagaattaattcccaatcccccattccaccagggctgggagcccattcccagtgcttcccaaggccctcggggacatctaccgccaacccagctgcttctggcaggggctccaagccccagcgtggggaagggccctggagaagccctcatcctcatgggaaccacactgcagtgggtggggaaggttgttgtcagcaccgcccccggctcctccaggtcctgctggctcctcgggggcagggttccctggacctcccagttctgcgccttggggccagccagtactcagagaggaggaccttctcaaccacgtacagaacacgggttttcatggctgcctttggtttggttttctgagaagataggattggattggattttgcagagggtgagaacttctctgtgcctgctcagaggcgccctagggaagggccatgtttgagttttgctttgtatgttgttttgcaagtatctgcctggtactttgatttaaaataaaaacaattttcataaaaaaaaaaaaaaaa

SEQ ID NO: 24307 - DNA, 2787 bp, Homo Sapiens
gctcattgagacgcaaatggaacggttcaaagttgtggaacgagagaccaaaaccaaagcttacagcaaagagggcctgggcctggcccagaaggtagatcctgcccagaaggagaaggaagaggttggccagtggctcacgaataccatcgacacgctcaacatgcaggtggaccagtttgagagtgaagtggagtcactgtcagtgcagacacgcaagaagaagggcgacaaggatgaggggccaagcaggtgctctgcagcccctgagcctggccctgggctcgccagcagaagcaggaccggattgagggcttgaagcggcacatcgagaagcaccgctaccacgtgcgcatgctagagaccatcctgcgcatgctggacaatgactccatcctcgttgacgccatccgcaagatcaaggacgacgttgagtactatgttgactcatcccaggaccccgacttcgaggagaacgagtttctctacgatgacctggacctcgaggacattccacaggcgctggtcgccacctccccccccagccacagccacatggaggatgagatcttcaaccagtccagcagcacgcccacctcaaccacctccagctctcccatcccgcccagcccagccaactgtaccacggaaaactctgaagatgataagaagaggggacgttccacagacagtgaagtcagccagtctccagccaaaaacggctccaagcctgtccacagcaaccagcaccctcagtccccagctgtgccgcccacctacccctccggccccccgcctgctgcctctgccttgagcaccactcctggcaacaatggggtccccgcccccgcagcacccccaagtgccctgggccccaaggccagtccagctcccagccacaactcgggcacccctgctccctatgcccaggctgtggccccaccagctcccagtgggcccagcacgacccagccccggccccccagcgtccagcctagcggaggcggaggcggcggcagcggaggtggagggagcagcagcagtagtaacagcagtgccggtggaggggctggcaagcagaatggcgccaccagttacagctcagttgtggcagacagcccggcagaggtggctttgagcagcagtgggggcaacaatgccagcagccaggccttgggccccccttccggcccccacaacccacctcccagcacctcgaaggaacccagtgcggcagccccaacgggggctgggggcgtggccccaggctcagggaacaactcagggggacccagcctcctggtgccactgcctgtgaatcctcccagctccccaacgcccagcttcagtgatgccaaggcagccggtgccctgctcaatgggcctccacagttcagcaccgccccagaaatcaaggcccctgagcctctgagctccttgaagtccatggcggaacgggcagccatcagctctggcattgaggaccctgtgccaacgctgcacctgaccgagcgagacatcatcctgagcagtacatcagcacctccggcctcagcccagccgcccctgcagctgtcagaggtgaacataccgctgtcgctgggtgtctgtccactgggccctgtgcccctcaccaaggagcagctctatcagcaggccatggaagaggccgcctggcaccacatgcctcacccctctgactctgagcgtattcggcagtacctcccccggaacccctgtccgacgcccccctaccaccaccagatgccacccccacactcggacactgtggaattctaccagcgcctgtcgaccgagacactcttcttcatcttctactatctggagcccagagatgttagaactgcttgggttgacagcgaggctggtccactgaggcacacctcagccccgcttccagttgcccactggctcacccgcggcccctccccagccctgctccagcagccccagtctaggccgaccccactctgctcatcggcacattctcaggcctccctggagaccactggggagctgtccagccccctcccaaccccacttctctgaaagcaattttcacctcctgtctcattttccttctcctgatcagcattggtatgttctgtgcccccagccccatctccaagaggattgtccagcccaactgtggtctgtggcgggggccggggttcagccctgatgtcctgccccattcccctggctccccacccagtttgggggccccctgatccccctctccactgttcctcccccagggcactaaggcacagtatctggcagccaaggccctaaagaagcagtcatggcgattccacaccaagtacatgatgtggttccagaggcacgaggagcccaagaccatcactgacgagtttgagcagggcacctacatctactttgactacgagaagtggggccagcggaagaaggaaggcttcacctttgagtaccgctacctggaggaccgggacctccagtgacaccggcccctccctctacccacccccttcccccgcatgctgatccccctgcccaggtgagggccctgccctggaagactggagggaggccccaagccacggggcatccccctctcccaggaagcagggagggggccgggaggttttcctctcagccccaccctgggggcccgggggcgagggctgccccctcctcccctccccagtgagggacattttttggtaaacctattttcattttggaaaatatttatgaataaatagttttatatgaaaaaaaaaa

SEQ ID NO: 24308 - DNA, 156655 bp, Homo Sapiens
gtccaacccacggcccacgggctgcatacggcccaggatggctttgaatgcagcccaacacaaatttgcaaactttcttaaaacattatgagatttttatttgtgattttttttttttttagcttgtcaactatcattagtgttagcgtattttgtgtggcccaagataattcttccattgtggcccagggaagctgaaaggttggatacccttgttgtaaagtgtctggccgagttcccttttgaagtgtggcgttatgatggaaatatccactccggttgtgtgttggacctttctgtaaacatggaggtgcagtttaaatgagtacctgtcatctcttctctaaagggggagcagcctctgggagtgacagtgctgacaagaaggctcaaggtcccaaaggtggtggcaatgcagtaaaggtgagttactggttcctttttttccatgttaaatataaattctgtttatgtgttagtacacataaaagacagaatgcttaactcattctaacaggctagcctaacactggtataaaatcaaaataacacaaaattgtagctgggcgcacctgtaatcccagcactttgggaggccaaggcaggcagatcagcctggccaaaatggtgaaaccctgtctctactaaaaatacaaaaatttgcctggtgtggtggtgtacacttgtaatcctagctacttgggaggctgaggcacgagaatcaagaatcgcttgaaccaggaggctgaggttgcaatgagctgagattgcaccactgcactccagcctgggcaacagagtaagattccatctcaaaaaaataaataaataaaaataaattttaaaaaaatggaaaatatagaccagtcttgcttatgaaaagtaattccctttaaatattttgtcatgtactttctcagatacccagaatttctttatagttttttagtattgttccttaaaatgcattaagttagatcttcccagtaattgagttatttcttaggacaaaataatattttataaaaccaagagattagataagtgttaaaagtcctctgctgaataaacaggcaagggtgcaggtctctttagaaagcttccccactggtgagccacaaaccagggtcttgaccatgaaaatgggggcaggagaaaatcagcaaataattacttgaaatacttaacctagccccagaggagtatctgctgggagaaaatttaatctgcaaactagtaagtgctatgtaacaaggcaatttccatgttttagtcaggatatgggaggctgtactttgattcattcattcagtaaggacttagtgacatctgccctgtgccaagcaatgtattaggctctggggattttttatcatgtatttatttaataaaaaagtaagagatgggccaggcacaatggttcattcctgtaatcccagcactttgggaggccaaggcacgaggatcacttgagcccaggagtttgagaccagcctgggcaatatagcaagaccctgtcactaaaaaagtaaaaataaaaaatcagccagacgtggtggtgcacaactgtggccctagctactcaggaggctgaggtgggaggatcgcttgagcccgagaatttgaggctacagtgagccatgattgtgccactacactcatcctatgcaacagagcgagaccctgtctcaaaaaaataaataaaaagtaagagatggtccttgttatcacaggctacttgggagcagttaggtaaagatatgtatttcattgctgtatgataagcatagcagtggaactgcatcatataaattcagccatacatgtgtagcctaaaaaagagagatcatgtaaatggtgtggactgttctgcccactcttctattcaatgaacctatgccccacagagagagagagagatgagagacatgcacctgcttttctatagttgccctgaattcttgtgtgagcatccaatcatgtgaagtggggttctggtatccaaagataagttttcataaaacatagcccctaaatacaacccagttacttcatgttacaaacggagtacagcgttcctggctatgtctgggcttaaatgagagctgacatgctggtctcccatatgacatcttcataaagggatattctagggtaattttggctatatgcagttttcacctaatatgttttcacaagcatctaacctaagagactgttgcactgcatatggctttagctacttttttttatttttttttttgagacggagtttcactcttgttgtccaggctggagtgcaatggcacgatctcggctcactgcgacctccgcctcccaggttcaagcgattgtcctgcctcagcctcccaagtatctgggatcacaggtgcccgccaccgcgcccagctagttttttgtatttttagtagagatgaggtttcaccatgttggccaggctggtcttgaactcctgacctcaggtgatccatctgcctcggcctcccaaagtgctgggattacaggcatgagccaccgtgcctggcggctttagctaattttttaaaaactttgttttgttgtttttatctttgtagagatggagtctcgctatgttgcccaggctggtcttgaactcctggcctcaagcgatcctcccgcctcagcctccaacagtgttaagattataggggcatgagccaccacacctggtgcatgtggctttaaagaggcaccttaccctctctggaaaaaaaataagttcaatgtggccactcatgagatatatggaaaggagtggcacgttattcactaggaaagtagattagggttaaatttgtttttataaagccttttattttgagataattatagattcacatgcagttttaagaaataatacatctagctgggcatggtcgtgtgtgcctgtagtcccagctacttgggaggctgaggtaggaggattgtttgagcccaggagtttgaggcggcagtgagtcaggatcacgccactgcactccaacctgggcaacagaatgagaccttgtctctaaaaaagaaaaaaagaaaaaggaaaagaaataatacgtattcctttgtttctcccaatggtaacacctaacaaaactatagtacaatagcacaaacaggatattgacattgatgtagtcaagatacagacaatcctaccactacaaggatccctcctcttggccttttataactatacccgcttccctcctgccccacctctgccctcttaacccatggcagcaacttatctgttctccatttgtgtaactttataatgtcaagaatgttatatgaatggaataatacagtatgtaaccttttgggattggttttattcacccagtataattcgctggagatttcattcaggtggttttgtttatcaatagtttattcctctgtattgctaaatagtaccagttgagtatccctaatccaaaaatacaaaatacaaaatgctgtaagatctgaaactttttgagcgctgacatgacactcaaagtaaatgctcattatagcatttcagattttgaattttcagattagggatgctcaactggtaagtttaatgcaaatattcccaaatccgaaacactctggtcccaagcattttggataaatgatattcaacctgtatcccatgatgtggaagtgctgtagtatgtcgaaccattcacctgttgaaggacagctgggttgtttcaagtgttttttgaaggcaccagtcggtgagggaccctgggaccctctggccttttagggttcagctcctttcacattctgtcattctgcttcagaccccacccctgtgcccacaccctgcccttttgtcgctataagctctgcagattctgagacccatccactgaccacagcttccctccttccccttcccttcctgcctccgccaatcctgttcctctgttcttctcctcacagacccccaagccctcaagcccaccctaatctccccactttctcctaggcttcatgtttgttttcctatcccctgcacactcaaaattaggcctaagggcttgatcattggattgaggaggtccagtttttcttttggccacctccctgcatccacctccctgctactcaggatcaatccaatggtctactttctatgcacttaaaattagatctatagttagaagagaagaattcgagtggttctagtataaagaaaagacaaatatttaaggtgatggatattccaagtatactgatttgatctttaccaattatatgaatgtattagattattgcattaccttgaaactgtacatctactatgcatcaataaaaaagaaaggaaggaaaagaaaagaaaagaaaagatttccttgaaaacgtctagctgggggcaacttaaatattaatacttgatttttaataagtatgtaaataaagtatttactaataattccaatatgagtattatatttgcttatagatgaacttatttcagtagcttggctcaaatttgaaacagttacttaagaaagaaaaattcagccgggcgccggtggctcatgcctgtactcctggcactttgggaggccaaggcttgcggatcacctgaggtcaagagtccaagatcagcctggccaacatggtaaaaccccgtctctgctaaaaatacaaaaattagtcgggtgtggtggcgggtgcctataatcccagctactcgggaggctgaggcaggagaatcacttgaacctgggagacagaggtagcagtgagccgtgatcacaccactgcactccagcctgggcaacagagcgagactccatctcaaaaaaaaaaaaaaaagctccccagaactgctgggccctactggaaagtcacacagccttggggattgggactactaatacttggtctctgactttacctaggccctcagtgctgctcagcaatcctttaccgcccacctgtagccatccaccaccccactcccatcagtcaacagagaacttcattccatggttctcaaccctagacgtacatcagattcgcctaaaaaaatacgagtgcctagggtctcatcccagaccaactgcatcagaatctcttggaggggggcctggactttgataacttttttagaagggctgggctctgtggctcatgcttgtaatcctagcactttgggagcccgaggtgggtgtatcacttgaggtcaggaattcgagaccagcctggccaacatggtgacaccttgtctctactgaaaatacaaaaattagttgggcatggtggcatgcgcctggaatctcagctactcgggaggctgaggcaggagaatcacttggacccgagaggcggaggttgcagtgagctgagattgcgccactgcactccagcctgggcgacagagtgagactccatctcaaaaaacaaaaacgaaaaacttttctagaatttctggaggtgattctaatatgctgccagggttaagaaacactcatctagtctcacagcgttagtgtgaggatttaatgagataagtactcatcaacttttaaatgtttttattattttaacaagaaagtggaaaccagacccattgtcaggaactcattggctttcagccccctagcaacaaagttacctcctcaccttttttcctttaaggctaatttttcaaaccgtgttctgaataccaaaccttgctccttcatttatctctaccctcttttttgttctgtcttcaaccggttttttttttcctaggtctttcccttcattccgaaaatatgcccagggacctttaaaattcgtgggtttttttgtttttgtttttgtttttgagatggagtctcactcttgttgcccaggctggagtgcagtggcgcgatcttggctcactgcaacctccatctcccagtttcaagcgattctcctgcttcagcctcccgagtagctgggattacaggcatccaccaccactcccggctaattgtttgtagttttagtagagatgggatttctccatgttggccaggctggtctccaattcctcacctcaggtgatccgcccacctctgcctcccaaagtgctgggattacaggcctgagccacctcgcccagtgtaaatttcgtatttacatgtcttccactttttgcctctagccagagccctttctccttttcaaacaaagttagtttgtttgaattaccctcccacttgacattgtttcctcagtcagcctgctgtattctggcttctgcacttaaactcttctgaaactcctttttctgagatcattgttccatcattgcacaatgtattatacttcttacctgatgtctctgcaacccttaacccttgttgaccatttcctccttgaaactctctcctgccttggtttgttagcacacgcttctctcctacctatatggcctttcctttttattatgcttttttcttttttctttttaagagacaggttcttgctctgtcacacaggccggggtgcatgacatgcagtggcatgatcatagctcactgcagccttcaattcctgggctcaagtgatcctcctgcctcagcctcctgagtagctaagactacagatgtgcaccaccatgcccggctaattttttttaaagtttttgtagagatgggggtcttactatgttgcccagactggtctcaaactcccatcctcaagggatcctcccaccttggcctcccaaagtgctggggttataggtgtgagccactgcgcctcgcccctttttattacactttttgagttctttacttgttgcttgaacattgatagtctccaaggttactttagctttctttcctcctcttctcattttcatctccttcctggtaacctcatgaattccacacttcagctgccacctccatagtcatcactcccaaactctttctgtagcttggctctccaagacacagctgcactgttgccagttcgttggtcacacttgcagaccccacaggaatgaaaaactctttgtcgcactgtctaaactagaatactcgtttattcatttataaaatggtggacggtatcccctatctgtgaccacgaatgcagtgtacattttcccaggaattgtatcagacaatcactttgtgagtatggaagcagaaacaaggaggcaatctagaagctgtctcttaaaaaaaaaaaattaactgtaaaacagcctcaggcaggtccttcaggaggtattccagaagaaggcattatcataggagatgacagtcccatgcatgttattgtccctgaagacctttccatgggacaggacatggaggtagaaaacagtgatattgatgatcctgaccctgtgtgggcctaagctagtgtgtgtatttgtgtcttagtctttaataaaaaagtttaaaaattaaaaaaaaaaattttaaatagaaaaaagcttatagtggctgggcgtggtggctcacacctataatcccaacatttttgggaggttgaggtaggcagatcacttgaggtcaggagttcaagaccagcctggctaacactgtgaaaccctgtctctacaaaaaatacaaaaattagcttggcgtggtgacacgcgcctgtaatcccagctactcaggaggctgagagacacaagaatcgcttgaacctgggaggcggaggttgcagtgagctgagattgtgctactgcactccgacttggatgacagaatgagacttcatctcaaaaaaaaaaaaaagaaaaaagcttatagaataaggatatgaagaaagaaaatagttttgtacagttgcacaatgtgtttgttttttaagccaagtgttattaaatagagtccaaaagtttaaaattttttaaatgtataaagttaaaaagatataataacctaaggctaatttaatattgaataaagaaaagtgttttataaattgtagcttacatgtatagtgtgtataaagtctacagtaggggacgggtgcggtggctcatgcctgtaatgccagcactttgggaggtcaaggcgggtggatcacttgaggtcaggagttcgagaccagcctgatcaacatggtgaaaccccgtctctacaaaaaatacaaaattaggccgggtatggtggctcatgtctgtaatcccagcactttgggaggccaagacaagcggatcacctgaggtcaggagttcgagaccagcctgaccaacatggcgaaaccatctctactaaaaatacaaaacttatccaggtgtggtggcgcgtgcctgtaatcccagctattagggaggctgaggcaggagaatcacttgaacccgggagagggaggttgcagtgagctgagatcgcactgctgcactccagcctgggcgacagagcaagactccgtctcagaaaaaaaaaaattagccgctagccaggcgtggtggtgcatgcctgtaatcccagctactcaggaggctgaggcaggagactcacttgaactaaggagggggaggtttcggtgagccaagatcgcatcattgcactccagcctgggcaaaagagcgaaactccatctcaaaaaaaaaaaaaaaaaaaaaaaaagtctacagtagtgtacagtaatgtcctaggccttcatattcactcaccactcactgactcacccagagcaacttccagtcctgcaagctccattcatgtaaagtgtcctatataagtgtaccattttttatcttttatactatatttttactgtaccttttctatgtttagatacccaaatacttaaaccattgtgttacagttgcttatggtattcagtacagtcacatactgtacaggtttgtagcctaggagcaataggctatgccatatagcctagatatgtagctggccataccatctaggtttgtgtaagtacagtgttatgtttgcacaaaaacaaaattgcctaataactcatttctcatgtttccctgtagttaagtgacgcgtgactataagtgattctatttgaatgtgaaatgagaaatcctgcgaaacagctatcttgacaaaatcattttcaaggataatagtgtttttttaaatccatggctttatgtaaacataggtcaaatttgaatacttcagtagggttgggcgttcttaatattcaacctatgataccttttcaaagtgtggaattgtggggaggcttatacattgggtctcttttagtaagaaatacttcctggccaggcacggtgtgctgacacctgtaatcccagcactttgggagctgaggtgggcagatcactttaggccaggaatttgagaccagcctggccaacacagtgaaacccatctctactaaaaatacaaaaagttagctgggcgtggtggtgcgcacctatagtcccagctacttgggaggctgaggcaggagaattgcttgaacccgtgggtggaggttgcagtgagccaagatcgggccactgcactccagcctgggcaacagacggagactctgtctcaaaaaaaaagatagaaatactttctagcaggttttttcttatcctcactctgatgaaataatagctagccgttggtcaatggtagctgcattatctcaatcttcacaatcctatgagaacacataggtcccgttatcattgcatcttgatgtacaaatggagaaacacttggaggtttaaaaacatgcgtaagttcagccaggcatggtggctgacgcctgtaatcctagcactttgggaggccgaggcgggcagatcacttgaggtcaggggttcaagaccggcctggccaacgtggtgaaacaccatctctactaaaaatacaaaaattagctgggcgtggtaatgggtgcctgtaatcccagctactcgggaggctaaggcaagagaattgcttgaacccgggaggcagaggttgcagtgagctgagagcacaccactgcactccagcctgggagacagagtgagactccgtctctaaataaataaataaataaagcctaagttcatacagcagagttgggatttgattctaggaccacagctctcaacccgtatcgtgtttcctcctcctgttagcatgaaggtatatggtaaaagatgggagcttcccggccgtgagcggcggctcacgcctgtaatcccagcactttgggaggccaaggcgggtggatcacgaggtcaggagttcaagaccagcctggccaacatggagaaaccccatctctactaaaaatacaaaaattagccaggtgtgatggcacatagctgtaaacccagctattcaggaggctgagacaggagaattgcttgaacccgggaggcagaggttgcagtgagccgagatcacaccactgcacttcagcctaggtgacagagcaagactccttctcaaaaaaaaaaaaaaggcggagcttcccacagccaggtgcctattttccatctaaatcaggactctgagacattgtcttaatatggggaatgggattgtggttgttgtcctgggcaaacttccaggatttttacttgctatgaactaatgtgttttttttttaactggtgggggtaatccaaatgtaaccactgtactttaaggagtcatttgggtctccaagtattacatgaatgtactttttccttgcaggtcagacacattctatgtgaaaaacatggcaaaatcatggaagccatggaaaagttaaagtctgggatgagattcaatgaagtggccgcacagtatagtgaagataaagccaggcaaggggtatgttgctcttattatttataattttctctcaaggtaagaaagcaaagtaaaaatgacaaataataaaataagataaaaattctccatcctccacagaagaaacacagaagtagggatcattcctttgttcaaccattggttgtagcgatattttggtttaaagatctcaaaagcagaaatgtccaacttgtaaatagtagaataagggtcatctatgtcaaaacctatgcatgaccaaacttgcacggctaacttcaaagtccagcagtgttgagagtacttatgtgttcagtctagttagacttcttctacctatttgtccttattgagcctattcctgtattgctcttaggaatatacctcgtaaccttagcaaaatgttgggaaattctctcaagctacagtagaactgttccctcttctgggccacttgatatcacttatcttttgggtttttcagggtgacttgggttggatgaccagagggtccatggtgggaccatttcaagaagcagcatttgccttgcctgtaagtgggatggataagcctgtgtttacagacccaccggttaagacaaaatttggatatcatattattatggtcgaaggaagaaaataaaatcatatgaaagactgaataagttttatacattttgtttctttaaaaggtattacatattcttttgagctggagctgcaaggaaatacaaaaatttttaaaaagaaaagatattggatgctccttgtattctgtgaaagctctaagtatgggtttgtaggtgtaagagagggtggggctaagtgaatgtcaactgtagtaggtattcagtcagtctttctcaaagagaagtcaagcagactccctttaacctgtattctctttcctcccagaactatatctgactctcagtctgtcccataaattaattcagaaaccatcttcaggggaagcagatatcaactcacactattcacacaactgaaaatattgggcatcaaatagattagtgtgtgagaatcataaaataagttcctagacaacatttgttttacatgttagtcaactctgatcttccaggacaggtggtattagctccactgtcttaacatagtacgtggcacgttatgcctttcagtgttaactcctttctttttaaataaatgtttattggaggaaaaaagcactcagttgttccatgagttgttttgtactagactaaccgagtgctggttaaagggagggatgtcagcataaaaatgtcattccctcatcttcagtgtatgggttacattaagactgtcctttccagggccaatgttctgtgcatctaaatttttaaaatttaaaatgccatatttatgacatataaaaaagtataaagattactaatataaatactatactgcttcaaaaataaaactttgccaacacagctatgtgattcttaacagattattttaacacactgccttctctccctcagctgcatttgatattatacccacttatataatgggaactttacctagatacctgactttcccacttgagaagagtttctgagcacctcagtaggttatgcctccatgagattttccccacggagcagatatgccagtgtatacagagaagttcaaatagatataagatgaaactatggctgggcccagtggtgtgcgcctgtagtcttagctacttgggaggctgaggcaggaggatcacttgagcccaggagttctgggctgtagtgtcctatgccaatcgggtgtcagcactaagttcagcatcaatacagtgacctcatctgggcacagtggctcaggcctatcatcccagcattttaggaggccaaggtgggaggatcacttgagccttggagttcgaggctgcagtaagctatgaccatgccccctgcactccagacttcagcctgggcaacagaggccctgcctcttaaaaaaaaagaaagaaaaacatggtgacctcctgggagtgaaagaccagcaggttgcctaaaaaggggtgaactggcccaggttggaaactcagcaggtcaaaactccggtgctgattagtaatgggattgcacctttgaatatccactgcactgcagcctggccaacacagtgagaccccgtgtctaaaaaaaaatttaaagctgaaactacatgttattgattgatttttttttaatgatttattgacatggggtcttgttacgttgctgaggctgggctcaaatgacccttctgcctcagcctccctagtagctgggactacaggcaagtgccactgcaccctgcctacgtgtactttgaaaactacattaaaaacaatgtctctaggctgggcacggtggctcatgcctgtaatcccagcactttgggaggctgatgcaggtggatcacttgaggtcaggaatttaagaagaccagcctggccaacatggtaaaaccccgtttctactaaaaatacaaaaattagctgggtgtggtggtgcacacctgtagtctcagctacttgggaggctgagccacaagaaatgcttgaacccaggaggtggctgctgcaatgagctgagattatgctactacactccagcctgggcgacagagcgagactccatctcaataaaataaaataaataaaataaaacaatgtgtctaaataagggcagtaaattctgaagagctgtataggcatgagacactaccaagctagagtcctttgcttgggacattgacttgcccaggatactaagtgaatacctattgcacagatgtcaccacaaaggaaagaagcgagagtgctgaaaggtggactagaaaaagcaaactaaattctgtggtatggagagagagcagttatagctagcctgtgagaaagtaaggcaggaatggacctctgacaccaagcgaacctttgggaagttagcttttgattgacaactaagattctgaaagagttggtaaacgggccaggcagcgcggctgacgcctgtaatcccaacactttgggaggccgaggtgggtggatcacttgaagccaggagttcaagaccagcctggccatcgtggtagaatcctgtctctactaaaaatacaaaaattagctgagtgtggtggtgtgtgcttgtagtcccaactactcgggaggctgaggcaggagaattgcttcaacctgggaggtggaggttgcagtgagccgagattgcgccactgcactccagtctgggcaacagcaaaactgtctcaaaaaaaaaaaaaaagagttgacaaatgaaaaaaattaaggatttatacagatttatatacattatagcatatgcatttaattctgctttaagacatctctgattaagttcagtgtttacagaacaaaccttattcattgtaaaataattgcaaattaaaatcaaaataagatacaagttccctctttttatgtgtcagattggtaaagttcagaaagtttaacattgtttggtaagggtgtggggaaacagacattcatccattcattaatggtggaaatgcaattatatcctctggaaaatagtttggcaatacctgtcaaatttataaatataccctttgacccagcaactccatttctaggaaggtatactataatcatatgtataaaagatacaaggatattcattacagcattatttggaaacaaactgaacactaacaatagattatgataaattatggtatatccctcaatagaatatcatgcagttattttaaaatttaaaatgaggtacagaatagtgtacacaatacactatcacttgggtagcaacataaatatatacacatatgtacttgtgcttgtacatcatagactgtctctgggaatgggaatccagaactccaggacaggagggcaagagatttttcacctcacacccttagatcaggggtcttaacctttcatttgtgccttgcagcctttggcagtttgcccagcctatggatcccttttcaaaatgtttattttaggctggatgcggtggctcacacctgtaatcccagcactttgggaggctgagtagggcaaatcagttgaggccaggaattcaagaccagcctgggcaacatagtgagaccctgtctacaaaaaattttaaaaattagctgggcattgtggtgtgtgcctgtagtgtctgctcttcaggagggaggctgaggcaggagggttgcttgagccctagagttaaggctgcagtgagccgtgatctcaccactgcactccagcctgggtgacaagagcgagaccctgtctcaaaaaagaaaaaatgttgactttaagtgcttaaagtaaaatacataggattacaaaagacagcaactatgttgaaatacagtagtccaaagtttttaaattgtggctgggcacagtggctcacgcctgtaatccatcccagttctttggggggccgagacaggtggattgcctgagctcaggagttcgagaccagcctgaggaacatggtgaaaccctgtctctaccaaaaatacaaaaaattagccaggcgtgatggtggcgcacacctgtagtcccagctactcctggcaggggcaggtagggctgaggtgggaggattgcttgagcccaggaggcggaggttgcagtgaatcaagattgtgccactgcactcccacctgggtgacagagtaagacctcgtctcagaaaaaaaagtttgtaatatgtgtgtgtgcctctttattaaatacctggtagtaggtctaaaaagcactgtgactttgcagtaatgaatatcaatggcattttgagatatctgcaataaccccaaagtctatgtgatttctactggtgacataacatgtactgctaatatttctgcagtttatgcgtacatttgttaacagtggaggatgtccaggttcttggcatcttgaacaaagaacgaaacgcacaaacaaagcaaggaagggacaaagggatttattgaaaacgaaactacactccacagcataggagctcaaaacaccctgttagagaatttttgggagtttaaatatcccctagaggattccattggttacttggggtataccctgtgtaaatggaaaggatgacgtgaagttacaagtcatttacttggcctacgccctgtggagaggatatttcctgtcatagctttagtgtgaatcagccttatgttccctgcctccagaccctattttcctgcttcacattcatgatgaaaggaaatgctatatttcagctaccagacagagaaaagataaaactttttttcctatccaaattcagacacctgacttcttctacccatgaaccccaggttaaaaatccctgccatggatactgtttgaatatgagcatgtatttttttccccaaacaacagaatttgtcatagtacacacacacttgaacagaaagagcattgctattttcagtgagaaatattcctaggacttagacgcttcactgttcagatcaaatggatataggccgctaaagcttccttgaaggcaaatacattgtgtggattttttgttttctacatcagggaagaaagaagtttattagctgaattttcacaaacatttttgtgtgtggtagaagggacagaaaaacaaagatgtgtagggcgcagctactcccttcacatcatggtgggaagcacagggaaatggtaagctgaactcagatgcagactgtgaattgcttcacagttagttacaccagtatttcaaaaataatgatatatattcaatcgtattaccctaaaatagtaataattgcttttagtaagagcaaaattttgttccatcaataacctgaaattcagcttcttttgaacttctgtaatctcttgtaatatacatgagattattaatgtgtatatacatataatttacaagtaacttttatatgtatgggatataataaaaataaatatttggtctttgtccctggttcctggcatatagttcctgaaagccttgaaatctcaactggtgtcttttgtatgctaatgacatagcttgtggctggaggcccctagtagcttcaggatgggggctggtcaccagaaacagcaaggcatgattagagggaacgttcagccctaactgcaacctctgcagaggggagaggggctgaagatgagttaatcacccatggccaattattttatcaatcatgcctccctaaggaaacctcaaaaaccttaacaatggagtttggagagccctggattaacatcaaaatgttgggagggtggtgtgcctggagggcatggacgcttaatgcaccacccccataccttgccctacacatctcttccatttgggtgttcctgagttgtagtctttataataagctggtaatagtaagtaaacgtttcctgagttttataagctattctagcaaactattaaaccagggggtgggatgggacggtcatgggaacccctaatttgtagccaagtcagacagaagtgtggttaacatggggaccgaacacttgccactgacgtctgaagtgagggcagtctggtgggactgagcccttaaacttgtggagtctgatgctaaccctgggtagtgtcgaaacagaatcgtaggacaccagttcaattttgaattggagaactggagaactgcttgatgtggaaaacccccacatttggtgtcagaagtgttttgagtaaaaacagctcagtgtattatagtgtattcatttacacaaggttaaaaatcggtttcaccccaaccatgtcaccacagggaagtcacggcctcactgatcactgagcctgtttcctcacatgaaaaatggaaatgctattctcccttcacctcaaaagattatggtaaggctgaaatgagaaacctgtgtggagtgcccaacacatagtacgtcatcaaggatagtccacttctctggtgacagagtgcagcgtgctatactgcagtttatctttctgcaagggaaccaaactccttttcagtctacaatccaaagatagactgtgataatatgtgtcagaatagacgagatacctggtttggtgaaagggagaacacagttaatggtgcattaagaatggctaaatggtcagcagtgactccagggcaagctaccagtgataaagaatcctagcaccaggtacctagctcagctttctgctgttccagtttagtactctatccaaaatgctggggaccagaagtgttcttgattgtggagaatttccatacacataatgagatattttggagatgggatccaagtctaaacatgaaatccatttatgtttcatacacacattatatacatagtctgaaggtaattttataattacttttaacgattttgtgcatgaaacaaagtttgtgtatgttgaaccattttattaccctttgtaggcaggcttgcatgggagaatctgggcctgtgtggaaaggatatatagtagctgaaggggtctaacagaatctcttttctcttggggatgctgagtaaacagtgtgttatacaccttcattttgactgtgacatgtcacatgacatcaggtatggaactttcctcacttgtggcatcatgtcagcactcagaaattttccccattttggattggattagggatgctcaacctgtattaagctgaaagcatgaaacagcatgttcacaagcatatcttaagatctgccagtatcatctcagtgaaacaaagtggatggaaaacacttgagaaaagtaactttaattttcttatctgaactgttatatacaaagatgatcactttcagagtaaaattaagaatgaccagaataattttacaaaactttccaagaaacaacacagttaaatttatagaatatgcctaaaatataagaatattcaagtgaagaaatattaagctagtgctcagaataccagactatggagtggggggcgttgcagggcagaagttgctttttgagatctttcttgccttaagcctgaatgcttcatgttcccaaagaatccaattatgggaacaaaaattccctcatattcagtttcactttaaaatacaataaacaggttacattctcaattgttattaagttgcttatacaaacttaaagtcaagagcataacttcaggatctgcactttttatgtcaagcgctttaactaagcagtttagggcctcctggatttttccacactcttttagttcttttccacgctttacaagagtctcatagtcatttgtagcctctgccgccttatcctggggagaaccaaccaactgttcaccagacaaaggctcaggggcaccaagagaggtctcttgagctagagcactaggcttagacgtcattaaccagctggacttgttttctgaagacagtgtttctccggaaggatcctcttctgtatacttggaggcttcgccactgctttcctccaccccttcttctggataatcttcaggaccctttgcttcactgctgtcgtcaagtctttcctccatgtcctccacgtggtctaaaaccatattaataagagacctcctagaagccagagatcttctagagttcatagacttatttacactactgggtatttgagatgaaaagaaccttcctggtggactgatgtcatttttgggagttgaagcatcaaattgtttcacagatgagaattgaaagagagatgtgttgaatggatttatgcttgaggtatctttaaaagaatcatcttcatcttcgccatctgaaacaatccttctagctttacttctgatttttgctttaactactacttcttctggttcatcgtctttctcagaaaactcccaactgagacatgttttgctatgcacaaaccctgctctggaattaggtgcagagccacacaagctattttctttctcaacatgctctaaagactgactggaaaaattttgtctgttgtctgctgagtcttccaagaaaagattgaaatcacatgcatactgtggtgaagatgctgaaggttcctcttccaacttggcctcacttgcttgagcatcctgcagtgcactatgggatgctgaaaggtcatcagctatttcaataatggatacatttgattctgcattttgactttcatttgttatggaaataatgggccaaggattgcaatgacgtaaaatctcatcatcctttagttgatctaaatttggcccaatatcagctttggttgatttgctaagtacataattaaaactttccagaggatcctcttgcagtgcctcttgcttaggcccctcttgtaatgtctctttttgtacagcttcatttttagttgcaaagcttttttccattcccaatgaagagttagtacaaagttcttctacacttccaaacccctttggtaaagtagctatagagtcagcactacctgtacctttaccatcttgcaaggtggtaacattcacctttatactggagagatcttgtttctcaccctctttgggcagatcatcaatgactacacttgccattttggaactgatatcttcttcctgagtatgatgagtacttagaagaggtgaaggctgaggctgtggtttattcaatttagggcatttcttctttgttgaagaaggaaatacaggttctcttagccaggccccctcatttctagttctttgttgttccatcaggaactctttattttgagactcgaattcaacgaggaattgagctttctgaaccctttgttgaatatagtgagattcttctaccacatcaagctcttctttaacagacagatcacatgtgtacatcaaatcatggtctgagattccagctatccccaaagactgcaggtaggcaatatgttcatctagttttatatcagatttcctctgagcagcatgcaaagactgaagctgcagctgggttacagagttctgaagatcctcgattgtaaagagctctcttaattcttgtttactaaaatatcggaaagggttctttttttcaccagtagtttgtcttattaatgagtccttgaaaacctgtcttctgtatattttttcctctacagtcccacaagtgattagcctataaaccacaacattctctttttgtccaattcggtaaactctatccacagcttgagcatcagttgcaggattccagctagggtcaaaaatgaccactctagttgctgcagttaatgttaaaccgacaccacctacttgagtggtaagcagaaaaacagagtaatctttattttgctggaataagttaattcttttttctcgttccaaaagatgagtaactgtcccatcgattcgcaatgtcttaaagtgcctattctttaagaggcgttcaatgatgtttagaatttgcctcgattgagaaaacaccagagtttgatgtccctcatctcgcagcctcttaagtaggtccattaggaatatcatttttccagattcttccatcaatgtgtcatcagttacttgatcaatatggtccacatctggggaatcttccccctcatttccatcttgagcagagaatgtcccaagatttagcaaacaacaagcccgtgcagacagcagcctaggatgatcacacagcttctttaagacacctagctcagccaaaggtgagcgcgtctccattagcaactccttgatatgatctaaagacacaaatttcctgtatatttcttcttgtaaaggcacaagtcgtatccaaataattaaatcatttttcctggaaagggaaggcatttcacaaatggcatcaacatctggattcttttcattaagtctggcctctgggttgcttgactttttcttctgtacgtcttctttagtcctcctgagaaaatagggttttatgattgccattaagttttcagatattttaaatcccaaggctttttctcctggggtagcatccttctctcttgctctagtaataggattttcatactccatcttaaaagtttttaatgttcccagcagggacccttgacaagcaaaatcaaatagggaccatagttcttgtaaattattctggattggggttcctgtgaggaggaggcgattacttgcaggaatagcacgagcacatattgctgacttagtagatgaggtttttattttatgtgcttcatcgaggatgacatagtcccacacaaactcttggcccctaaagcttgaaagttgctgccagttattgattaacatttggtatgtagtgataataacaccattcctttgctgaatccgattgaggtttctggtccgttcatccttgctaggaccatgaaaggttttgactctcattcctggagtccacttgatgaattcttttacccatgtgttaataagattggttggcatgatcagcagcacatgattcacaagtgatgcatcaaacataccggaaaggaaagcaatgatttgaacagtcttccctaatcccatatcatcagccaatataccaccttttcttccatccctatacaggctatagaggaaagctatgccttccttctggtgctcaaagagttggttgtgcagttctcgataaagtagcaagccagagttgcacacatctgtaaattcatcatctccctgttctgccaactcctccaaggcttcctgtattttttggattctgctcagcactttttcattgggaaaaatgtcctttgccaaattgaaaagtttaaatgcttcttccaggtctccattcttagttgcttctttggcctctttcacatatctatagaaaaaaaaagaagaagaggagaaaggaaacattgaacattcagtctaagaatgctttagagttcattttagaatccaaactgcagctggacttttaatatcctcaattcaggatgggaaagattagcacacaagatgccaatgaaagctggcgtcacttgagacacaaacaaatatccaccagatgctgccagcaacaccttcaggcactagttgtggaaaatgaatgtgcaaaggttattggttccacagtattttttttttaattggcacccataagaagtatgaagtgatattttttgtaaaacaaacctctatgtgtaggggcatggaaacatgggaacctctctggccttattttactggacctccatttaacagtattgatcactcccctcccctcttaaaattccctcctttcacgagattcctatagattccttctggttttcctcctcttcactgaccatttcttctgtgttcttcctcccagaggactcagtcctaggacctcttctcactctttttaatctctcctcaagttttcccagagcttccgctcccacctatgtgctcatgactctcaaatcactctctccaacctagagctgtccctcaagctctactctagacccatattccagctgccttctggacatctccacttgaaatcaaattcaattcatcccaaactagactcattatttcccctctaaaaacgtgcttctccatttgtatggtactaaataacactaccatctatttagccacccaaacttcaaatctgaagagaatccttgaccccaacctaaataggagtcatccttgtcctttctttttatgccccacccccaggccaggcagtcccaagtcctactaactttatttcccaagttataaccaccttctttccatctctactaccattactgtggcccaagtcaccatcatctctggcctggataactgcagcttcctacataaactgctctccctacataaactcttgcccctccaatacacactctatatagcagccagcaatactgtcttaaagcataaaagaaatcatgtcactcctctgcttaaaattcttcagtggtttatggtcaattactttcagtaagggcgccaaaataattcactggggaagaagtcttttcaactggatatccatgtgcaaaagaatgaaattggacccctactcataccatacacaaaaattaactcaaaatggatcatagatctaaatctaagggctaaacctacaaaacttaggaaaaaatataggtgtaaaaatcttcatgacttggatttggcaatatcttaaatatgatgccgaacacacaagcaaccagagggggggaagagatatacagggccgggtgcggtggctcatgactgtgatcccagcacttttgggaggccaaggcaggaggatcgcttgaggtcaggagtttaagactagcctgaataacatagcgagactgtctcttaaaaaataaataaataaataaataaataaataaataaataaataaatggaaaaaagatatacagatgggcacatgaaaagactctcaacatcattagttgtcagggaaatgcaaaccaaaaccacaaggagataccacttcccattaggatggctataaccaacaagtgggaaaataccaagtgttggcaaggtgtgaaaaactcccactattgatgggaattattaagggttcagagctgctttggaaagcggtcttgatctatgttctagagcttgaaggaaaaaataacattcttaaattattagattatttccaagttcctgaactggtaacctacccagtatcctgaaacccctatgaaacctggggttctgtgtaactctagccaggcgtctttcccagagactaaagtgctgtccctgatccttagctctgggccagagtccccactaatcacacacgccagccttttaaatggcaactgtgtgcctagacttcttagcaccagcctaaaatacttattgctgtgctctacccaccctctggaacccccatttgtcaacctctgcctgaaccacaacgagagtttacagtattccttggatatcactgctttctggctgggttaaaccgctgctgtgagccaagctgccttccccagtccctggtccaccctagttagcaggtctgtctaacaactgcatctcagctcttcctttcccctcagtctattccaccaattaagttggacctaggatggtattctttccctacaatggaatcaggaggaaaaataaatgcttttaatagcactgccctggatatctgattatttgcaagactagaatgctttttacaatgcagtttgatttagccacttaacttctaatcacttccatttttcagggcttggagggaaaacatgtcctttttattgctaatgtaatgatttatccatctatagcacacaggatccctaatgatctggataacttagctaacacttcatgggctcaagtatttttccagaattgctcccctattttccttgaacataggcagggagaagccaggcctgcttgggagccaagaggacagggaggagtaaccagttcaggacaaagaaccataaccctcaagcaagagaacaaggagaagaatagtgctagagtatggggtgaaatgtcagtttttaattccataggaatggacaataaaaacaaaaattttatgtttaaatggttttacctgaaattatatgactagagcatgtttctctttaaggattattttaaaggacatctaatcacctcccacaaggtgtctccccaaacacgtgaggattacagtctggattacaattcaagatgagattgaggattacaatctggattacaattcaagatgagattatgggtggggtcacagccaaaccatatcagtggcacacacctgtagtcagtcccagctattcaggaggctgaggcaagaagttcgcttcagcatgggaggtctaggctgcagtgagccatgatcgcaccactgcactacagcctgggtgacagagcaagacccgtttcaaaaataaaaaaaaaaagaaatattatatacaaacaactcctggaggaaggtgatacaacaattaaacttgggctacaaagtcctgttacctggaaagctacactttcgctggcaaaactgcccagttgctaaccccctgggtcataaccccacctaaaggtctctctataagaagccctgcccaagtggccatataaaatcatctctgtggctgggcatggtggctcatgcctgtaatcccagcactttgggaggctgaggcggttgaatcacctgaagtcaggagttcaggaccagcctggccaacatggtgaaaccccgtctctactaaaaatacaaaaaaattagccgggcatggtggtgggtgcctgtaatcccagctactcgggaggctgaggcatgagaatcacgtgaaaggcgggggttgcagtgagccaagatcgcaccactacactccaaccgtgcaccacagcgagaccccatctcaaaaaaaataataataataataataaaatcatctctgccccaaagctatttcctcagatgcaaacattttccttgaccatagccaattaacctctcaacatctaatccacctccctttggaactggctgataccttgagaaacctttcttctccacagagggtctgccagttcagatgctgaaaagtttttctatctggagaaacccataagccatactattagacctatgccccaaagagctaagctaagttaaacacacagtgtttacaaatgagcagctgaaaaggcacacaagcttaagttgcagaagacacacacttgattttccttgctatggagggccctttagaacattccctacaaagttattttagaatgtgaagagacagctgggagcggtggcttgagcctctaatcccagtactttgggaggccaaggcgggcagattgcttgagcccaggagtttgagactagcctgggcaacatagtgaagccctggtctctacaaaaaatagaaaaaaaattagccgggtttggtggcatgcgcctagacccagctactgggaggctaaggtgggagggatggcttgagcctgggaggcaggggttgcattgagctatgatcgtgtcaccactgcactccagcctgggctacagagccagaccctgtctcaaaaaaaaaagaatgtgaagagacagagaactgaatgcaaagaccctaactcaataaaactttgttttcttcacatgcaaaacaatcagaaatgctctttgttttgtaatctggccaccagccactaggcccatataggggtggaggagcctagacctgctaatctcggcgcatgtgagtggggttattgctgtcctctcaacaagaacccagttttgagagacaggacttgctggatttcctaggctgactaagaattcctaagcctagctggggaaggtgactacacctacctttaaatacagggcttataactcagctcacacccaaccaatcaggtagtaaagagggctcactgaaatacaaattaggctaaaagcaggaggtaaagaaatagtcaaatcatatatcgcccgagagcacagggggagggaaaatgatcgggatataaatccaggcattcgagccgggaggggcaacctcgtctgggtccctcccattgtatgggagctctgttttcactctattaaatcttgcaactgcacactcttctggtctgtgtttgttacggctcgagctgagctttcgctcaccgtccaccactgctgtttgccaccgttgcagacccatcgctgacttccacccctccagatatggcagggtgtccgctgcgtttctgatatagcaaggcgcccattgccgctcccaatcgggctaaaggctcgccattgttcctgcatggctaagtgcccgggttcgtcctaatccagctgaacactagttgctgggttccacggttctcttccatgacccacggcttctaatagagctataacactcaccatgtggcccaaggttccattccttggaatccgtgaggccaagaaccccaggtcagagaacaaaaggcttgctgccatcttgggagcggcccaccactatcttgggagctctgagaacaaagacctgtccgttaacagtttccctatactgatccagctcctggagtatctgctccctgacatgtctctatgtccagtccccttgtcaagatgcatgtagatgcattagacacaacagatgtcttttgattctccatcaaaatcaataaaacataaaacatttggataacataaaaattgcaggtgacctgaatgccagtattgaaaacaggtccatttaaagcccaagtcatggcagagtaggctaggaggattccttccttttggcttcactttcagggatggtcattttaattaaggtggggatcattttaaaatcacatataaacacaaacaatattattaaatagtgatttctgacataaattagggaaaaatgtggttcacatttcagtcaaacaatatttaataattagcttttccctgcttagcgccatttataagacaggcatttaagagtcaaaaaaacaaacaatgttgctttactcttaatagccaaaaactggaaacaaccccagcactttgggaggccgaggcggttggatcacctgaagtcaggagtttgagaccagcctggccaacatggtgaaacccatctctactaaaaatacaaaaattagccaggcatggtggcaggcacctgtaatcccatctactctggaggcaaaggcaggagaatcatgtgaaccagggaggcggaagttgcagtgagccgagatcatgccacagcactccagcctggatgacagagtgagactccatctcaaaaaaaaaaaaaaaaacaaaacaaaagtttaggccaggcacggtggctcacacctgtaatcctagcactttgggaggccgaggtgggcagatcacttgaggtcaggagttcgagattagccctgccatcatggtggaacaccatctctactaaaaatacaaaaattagccaggtgtggtgacgggttcctgtaatcctagctacttaggaggctgaggcaggaaaatcgcttgaactcaggagatggaggttgcagtgagccaagatcaagccactgcactccagcctggatgaaaaagcaagactctgactcaaaacaaacaaacaaacaaaaaaacccaccaatctgtgatatattcatacaaaggactcaataatagaaaagaacaaactactacatgtatgaatttatacatgtatgaatctcaaaaacatgctgaggaaaagccaggcataaaagagtagcaacagtgtgatttcacttatatcaagttctaaaataggcaaaactaacatatggtggaaaacatcaagacagtggttgcctctggaggtggaaaatgcctgggaaagggcgtgagggcactttctggggtgataatagtattctatatcctgataggggtttgggttacacacgtgtatgcacttgtcaaaattcaccaaatgtacacttaagatttgtgcatttctttgtatgaaaattttactttaaaagaaaaaaactaaacaaatattgaaatccacttaatagtttatatgctgaagtgtttagggggaagtaccctgatgtctgcaatttactttgaaatgtatcctaaaaaaagaagatggattgatggaatagatgcaagaataggtatgtgataaagtgagtatagtaaaatgttaataacagaatctaggtggtaggtgaaagagactaaaaagactgctttgccaatagactgctgcctatcaatttgaaggcatacaaaaagcaagattcataacacgctgcgatttggcttcttacctagcactctaatgtaactgttctcaccaaggacaccaacctccatattgccaaactccatggacagttcttagtctttatctttctggacctttctgctgtgcttaaaaccactgataactacatccctcctgaagttttccctcccgcttgggttcagtggcatacaacccttctcctagatttcttctacctcactaaccattcaagatgctcagtctgcatcttgaattcctctccatccacatatcccctataaaatgttggcatttctggggatctttttgttgtcaatgtccttctgattctatgtacatttcccagaagattttatccacgggagtgccctgtactaggttaaatagagtcctccaaaatttcatgtcaacctggagcccgtgaatgtgaccaggacattgcagatgttattgatttaagatgagatcatactggattagggtaggccctaacctcatatgactagtttacttataagaggtaaactgagacaccgagacatagagaggagaatgccacatgaagatggaggcagagaatggagtgacgcatctacaagccaaaaagctcctaggattgccagtaccaccataaactaggagagaggcttggaacagattatttctcagtctccaaaaagaaaccaaccctgctgacaccttgatttcagacttctagtttccataactgtgacagaatgtctaggttttttaaaaaaatgtggtaaaatacatataacataaaattgccattttaaccattttaagggtacaatggcattgattacattcacaacgtgtaatcatcaccactatccttctcatgataccaaacagaaactctgtacccattaagctataactccccatttctcccacccctcagtgacatctaatctactgtttgtctctgtgtatgtgcctattctagatatttcatataggtggaatcatatagtatttgtccttttgtgtttggcaggttaaccagataaccttgggctagaagattaaggagctggaggtactaaaggtctatacccattgtaaaaaccccaaagtatttgtccttttgtgtttggcaaggttaaccagataaccttgggctagaagattaaggagctggaggtactaaaggtctatacccattgtaaaagaaattaactgtccctggagaatttttcatttttagttagactttattccaaagggtcagtcaggatgttagccaccaaatgctccccaaaaataataaaacttctttctgctgaggaacattggctggtaggataccctctagatgccaaagcacatctgctatgccagaaaaaaggataattttggttttggcataattactgttatgctgtttttttccggagtgattagccagcaggttcagctgctttctgagggcatgttgttagcatgtaggaggatgcttccttcctgtttattctggcagaagggtatttgcccagttcaaccaaaagcagcactaaaatgttcaggtctgattacaaaggaggagttcaacaaccctgcctgcttttactcactttgaaatcagctttgctcttcctgcctgcttgtattctctttatgacagggtataaaggacctaaaagagcaagaagaaccttgggtctcttttgagccatatagtttggtccaaatagttcttgtctgaggaatccaaagccaataaccagataataaatattacagaaagccttacgcttttttcagtgattgctcttgtaggtgaaatagagtacggagctgacagtgtcaagccccaaaccaaaacttgtgtaggctcctatcctaagaggcccaggccaccattaaattgaatattcatgttttatacattttatttatgcatatattgtgaaatatacatatcttatatttcacaataaaagttttaaagaatgttacttgcccaccctagtggccaggggataagaccattaccagaaggtggacatgaaagcttactgagcagaaaaaaaaataaaaaaaaacacaaaaagaacaaaatacaacagcaaccattattccctacacataagcaagtgcctgaaatatgggcactccatgctgttccaggaaagaacagtgtagaactcttgcttctattccattgatctatatctatacttatgcaagtaccacactgtcttgactactgtagctttgtcgtaagttttgaatttgggaactatgagtcctctaactttgttcctttaaaaattttctttaaataatagagatgggggccgggcgcggtggctcatgcctgtaatcccagcactttggaaggccaaggcaggcggatcaggaggtcaggagatcgagaccatcctgactaacacggtgaaaccctgtctctactaaaaatacaaaaaattagctgggcatggtggtgggcgcctgtagtcccagctactcaggaggctgaggcaggagaatggtgggaacctgggaggcggagcttgcagtgagtcaagatcgcaccactgcactccagcctgggcgacagagcgagactctgtctcaaaaaaaaaaaaaaaattaataatagagatggggtattgccatgttgcccaggctggtctcaaactggccttaagtgatcctcctgtctcagtcacctgagtagctgggattacagatgtgaggcaccacggtcggctaaactactctttttcaagattgttttggctattctgggtcccctgtatttctatatggcttttataatagtttgtcaatttctttctcttttttttttttttggaaacaagagtctcgctctgtcacccaggctggagtgcagtggcacggtcttggttcactgcaacctctgcctcccaggttcaagcgactgtcctgcctcaacctcccgagcagctgggattataggcgtgcaccaccctcacctggctaatttctgtatttttactagagacggggtttcaccatgttggccgggctggtagctcatcaatttctacaaaaaagccagctgagattttcttagatgtggcattagaatctgtagaacactttgggaagtattgccattttaaagatattacatctttcaatccataaacacaggatatctttcttttatttaggccttcttaaatttctttcaacaatgttttatagttttcagtatctaagtgttgcacctcctcgtataaatttactcctaagcatttatttttgttgctattgtaaatggaattgttttggctgggcacagtggcccacgcctgtgatcccagcactttaggaggctgaggtgggcggaccacctgaggtcaggagttcgagacctgcctggccaacgcagtgaaaccccgtccctactaaaaatacaaaaattagctgggtgtggtggtgggcacctgtaatcccagctacttgggagactgaggcaggagaatcgcttgaacccaggaggtggaggttgcagagagcagagatcgcgccattgcactccagcctgggaaacagaatgagaccctgtcccagaaataaataaataaggccaggtgcggtggctcatgcctgtaatcccagtactttgtgaggccaaggcgggaggatcacctgaggtcaggagtttgagaccagcctggccaacatggtgaaaccccatctctactaaaaatacaaaaattagccgggcgtggtggcctgcgcctgaaatcccagctactcaggaggcagaggcaggagaatcgcttgaacctgggagatggaggttgcagtaagccgagattgcgccattgcactccagcctggacaacagactctgcctcaaaaaatataaataaatagactaggcgtgatagctcatgcctgtaatcccagcactttgggaggccaaggcgggcagatcacttgaggtcaggagttcgaaaccagcctgaccaacatgaagaagccccgcctctactaaaaatacaaaaaaattagcgggcgtggtggtgcacgcctgtcatcccagctactcaggaggctgaggcaggagaatcacttgaacccgggaggcagagattgcagcgagtcaaggttgcgccactgcactccagcctggcgacacagtgagactccgtctcaaaaaaaaaaaaaaaagaacctccactataatgttgaattataatgtgaagagaagtcgcaagagcagacaaacatccttgccttgttcctgatatgagcgggaaaagcctttagtctttcaccattaagtacaatgttagctatgggatttttgtagatacccttgatcaggttaaggaagttaccttttattcctagtttgttgagtgtttttgtatcacgaaaaggtgctggattttgtcaaatgtttttttctgcacctattgaggtaagaaatgtgttttttgtcctttagtttttaggcatgttaaatctgatatgtctattatcaagcagagatgtcaaccaagcaatcacatataggagtatggagttcaagaggtcaggactaaagataaaaaatgtaataatcatcaaagaaatgcaaattaaaaccacattgaaatatcacctcattcctgttagactttctattatcaaaaagatgaaagataagtgttgacagagcaggagcatcggcatcttggacaggcccctcattcagcgggagcatcggcatcttggacaagccccacattctaaagttcaccttaataaaaaaccacctaaatctaaagggcatcagcctaatggctaaggtcagcatgaccataaaccacaattaacatctccaaccagaaacattccaaactcctccctgaccagagacatgctagccccaagataacccccctctggccaggaggatgccagccttgagataacacccctctggccagaaagatgtctgccccaagataacctcccctcctcccagagagattccaaccccgccataaaacttctccctcacacagaaacattctaagcttgtgataagccccctcaccctaaaaccaatatatactgttagtctgtaagagaaagcactcctgaccaaaattggccagaaacccctctcaggttttatctaaagtaaacctgcctctaactgtcaagcatttgtgtttcttttctctttctttaactcttatatttggtgccgaaatctggaacaggtgctgggggcagaggctctcttgcaacccaggaagcagtgggcaacggcagctcatcataagttaattcctggatcctgagggtctctggtcacctgccccgtcttttctctcacttcatttttggagcgatttgcatgaggacaactaacctgaaggggactgcaaggctctggccggggctactccccaacaagtctttaaaccttcagatcttgggaatccacctccaacttcccacaatgggtattttgccctctcccctcctcctcccttctctctttctctcttcctcatgtggctctggtttaaggggccctttgccaattccaactggaacatccaacattggacactaatccagccaactgctaagatctgccctcctctggctttctcacggtaccaggaaaagttaggtctgccatcccggtcctcagaggaccagcaggactaaaaagctagaagaaatcttggggatgcccagttttcatctcagcttgaccatcctctttagaaagaggacgccgggtctctgtctttcatctggggatgcctagaacaaaaacagacaccctcggcttcttctcaccagtccacatgggtgccaaacaatcccacattcctacatcctccccactgggctgcctccttcacaacctcaccaaacttggcttaccgggaagcataaagccaaagcatttagtcttttattgcaacatggtctggctgcaatacacattagataatgacagccgatggttggaaaatgtcaccttttacttgcaaattcttagggacctcgacaactttataaccaggaatggcaaatggcaagaggttctctacattcaggctttcttctaccttagctcccaaccctccctatgtcaagcttgcacccctcatgaagtccttcttctcaatgaaaatgctgtctgggtctctccctcctccaaaaacctttcctctgagatcccttcccgcgaaaacccttcctccaaaaccccttccctcgaaaccccttcctctgaaaccccttttgaccctgcagatgaacccccttcgtattcccatccccctggttctgctcctcatccttccaaaccctccaccccagggggccctcctgccctcaagcctccagccccaaaccccactcctcctccttctccacctgttacccgttcaaaagccaccagtcaaaccaccccagccattctccctctccgggaagtggctggggttgaaggcattgctcgtattcacatccctttctccaagtctgatttgtcacaaatcaaacggcagctaggatccttctctgacaatccctatcactatcgcagggaattcctgcacgtaacccaatcctttaatttaacttggcatgatatttatataattttaacctccaccctcactcctgatgaaaaggagagcatctggtgttcagctgaagcccatgcagatgaactccataaccaagcccctatataaaatccagtggccaatgatgcagtcccccatagagacacagactggacttaccaacagggaaacaatggcatcaggcgacagaaccacatgattacctgtctcctcacgggcatgaacaaaaatgcccataaggcagttaattatgaaaaactcagagaaattacaaaggagccccaggagaatccagcctttttttttttttttttttttagatggagtctcactctgttgcccaggttggaacgcagtagcgcgatctcagctcactgcaacctccgcctcccaggttcaagcgattctcctgcctcagcctcctgagtagctgggattacaggcgcgtgtcaccacgcccagctaatttttgtatttttagtagagacagggtttcatcatgttggtcaggctgatctcgaactcctgacctcgtgatccacccgcctcggcctcccaaagtgctgggattacaggcatgagccactgcgcccggcctgaatcctgcccttttcttatcacatctcactgaagccatgctaaaatataccaatctggatccagaatctagagaagggcaaacttttctccacttccaatttatttcccaatctgccccagatatccagaaaatattacaaaaattagaggaaggtcagccgggtgcagtggctcacgcctgtaatcccagcacttttggaggccgaggcaggcggatcacgaggtcaagagatcgagaccaccctggccaacatggtgaaaccccgtctctactaaaaatacaaaaaaaaaattagccgggcatggtggcaggcgcctgtaatcccagctacttgggaggctgaagcaggagaatcacttgaacctgggaggcggaggttgcggtgagctgagatcacgccattgcactccagcctgggcaaaaagagtgaaactctgtcttaaaaaaaaaaaaaaaattagaggaaggtccccaaacatctcagcaggacctcctaaatgcggcctttggagacagttttgctcttgttgcccaggctggagtgcaatggcgtgatcttggctcactgcaacttctgcctcccaggttcaagcgattctcctgcctcagcctcccgagtagctgggattacaggcatgcgccaccccacccagctaattttgtatttttagtagagacggggtttcgccatgttggtcaggctggtctcaaactcctgacctcaggtgatccacccgccttggcctcccaaagtgctggaaggccttccgtgtctttaacaacagagacaaggaacaaaaaattcaaaaagacaaacatgtctggttaaaataccagatgctcacctctgctgtccaaaggtcagttacacaaaagcctccagacaaccccaagggaaactccgtcacctctctggaagtgtcaccctgaagtgccacatcagggttccaatgtggcaaccctggacactgggcaaaggcttgtcctagcccctggccccctaccaaaccgtgcccaacttgtggtctttggggacactggaaaatggactgtgcccaatggatacaccctccctgttcaagtgtagccctgtgaggccccctgaccatcacaggaggaaatatcttcactgctggtactgacaacggaagactgagggtgcctggaatccttcacccccacatccagtgagtccatggaacccagggtaattgggacggtatccagtaagattatttcctttctcctggatactggggcgagcctatcagtattaactgaatatcaaggcccactagaatgttcataattttctgttgttggcatgaaggacatacaagaacttccatacaaaacactgcctctatactgctcatttcagggagtcactctcactcactctttcttggtcattcctcattgtcccactcctttactaggaagggacatcctacacaaactagggggaatcattcattcatcggccctacatcaaagccacccttacttattattatgtcaagaaaaaaacccctcctcagacactccacatcaaatagacttaaaacccaaattcctggctcacgcctgtaatcacagcactttgggaggccgaggcaggcggatcacctgagtttgggagcttgagaccagcctgaccaacatggagaaaccctgtctctactaaaaatgcaaaattaactgggcgtggtggtgcatgcctataatcccagctactcggaggctgaggcaagagaattgcttgaatccgggaggtggaggttgcagcaagccaagatcacgccattgtactccagcctgggcaacaagagcaaaactctgtctcaaaacaaacaaacaaacaaaaaacacccaaatccctcagccaggtaaatcctatagtatggaacactgactcccccataatagctacccaccattctctaattcaaatctcactaaaggatcctaagcgctacacagtggtcccacaatatcacctcaaccctaatggattacagggactcaagcccatcatctactgacttttggctgccaatattttaatccccacccattctccccataatactcctattctcccaatcaaaaaaccagatggctcctatagactggttcaggatttgtgataaatcaactccactgttgttcctgtttatcctattgttcccaaacccctacaccctcctattgcaaattcctcccaacactagccatttctcagtattggacctcaaagatgctttttttactattcctctacatccctcctctcaaaacctttttgctttcacttagaccgaccctgacataggctactcccaacaacttacctggactgtcctcccccaggggtttagggacagccctcactatttcggtcaggcacttcaattagacctctcccagctacatctacaacctagcatcttgcttcagtacatggatgatttacttctttgcagcccctctctagaacattgtattcaacacaccaccaggcttttacattttttgtctgaatgcaggtaccaggtgtccaaaaagaaggcccaattaacctctccaaaagtctcatacctaggattaatgataactccaaatacttgagaaattctgccagcatgaaagcaaagcattcaacaaatcccttttcctaaaacaaaaagggacttactttctttcctcggattagtgggatatttctgattatggatagcaaattttgccattatcactaaacccctttatgaacacacaaaaggcaatcttgaccaaccactcactcccactccagccctttatcatgctttctctcaccaaaaacgtgccttattacaggcccctgctctaggccttccaaaccccctgagatcctttcgtctatatttacacagttctcataatcaggcccttggactattagcccaacccatgggagactccctccaactggtaacatatttttcaaaacaactagaccccatttacaaaggttggcccctttgcttaaaaattttggtcacagcccctctaattatccctgaggcacaaaaactcacattctacaaaccccttcaggtattttcttttcacagtctgcaaaatatactcagccataaggcgctaagctccatctcatcctcctgcatgcaggccttacattcacctctccttcaacactctatctctcttcatagatgctccccccttaatcctgccactcttttgccttcaggaccaattttagacactgaccaacactcatgcttgaatttaattgaaagttctctcaccatgttctacccccttacttccactcacataaagcaagccccagattggtttatagatggcagtgcatcagaaaacccttccctccaagcagggtatgctatcattgagggatatcatgatgatacccacctagaagagtcgtagaggctgcccccttgcctttgggcatatcctcccaacaagcagatttatttgccctaataagagcactaaccctagcaaaaagtacacaagttaacatatacaccgattctaaatatgcctataacaccatccattccaatgcccaaatttggagcgagcggggctatgtcacggctaagggatttcctatcattaatggaaaactcatcacttactaaaggcagctttacttccagaaaaggttgcagttatccattgcaaaggacatcaatcagataaaaaccacattccaataggaaaccgtgaggctgagtattgggcaaaacaagcctcaaccaaccatccaatcccccaatacctattaagcctcatacaacatatcccctccttttatccagaacaccaaatacagcaactaatcacagcgggggcacaagtcaaacccccatactgctttgtacaaaacaaattagtcccatctgaccctgaagaaactgctcttttataggacattcacaacctcttccatactagccattccccttgacaacatttcttaagctcccatatacacataaccccagatataaaggaacagctaaaggccatttcccatcaatgttctacttgccaaaaggcttcaccctactccaacactaaatccctttctttcccaacccatcaagccaggggacaccttccaggacaggactggcaaattgattttacccatatgcccccagttaaaaaggttcggtttcttccagttctcatcaataccttttcaggatgggtcgaggcttttcccacaaccaacaaatgggcttctactgtcacctccaaattaataatggaaatcatacccaggttcagggtgcctctttcttttcaatccgacaatggtcctgaattcatctctcaaattactcaacacttgcaccagctctacatatcacctggaagctatatatcctctatcgacctcaatcttcaggaaaggttggaaaaatgaatggcattctaaaaaccaccctcaccaggtactcactccaaactcttaaagactgggttacacttttgcctttggcccttctaaaaatttgggcattcccacataaacccttaatgctcagcccctttgaactcatgtatgggaaaccactggccccttttgttccacctcagggtcaaacaccacctctaccaactccccttgtttcccctcttctgtatattatccgccatttcatttgggaatatgctgacaaatacctgccacaacccatcactgactcctctaatcccttcctatagccagaagactgggttctcataaaagatcccagtcctacccccaattcccccctcacacctaaatggaaggtgtaaaaagtaaagtagaggttcctcttcaaagactttcctccccacctaattaggaataaatagtaacttctcttagaagcaaaatttattcaaagacctgtgctaacatccttaaatatcggccagccgtaataaagaaatcaatgtactttatgttcttagctcctacaatttagcctaaatatttgccctggcatgcttatactagtccaagcaaacattaggtcatagcctgttcctcttccttatttgaaggtgtttttacctttctcagcattccacaagttacttcctccttcctttgttctcctctgtctttgcctcttttaaaaagttctaagttgctagccaatcgggacaaatacagaatgtgaggtcccgttccagccaatggaaactggacacagcagtagggtggaagcgtcagtttataaatgaccctgtctcctttgttcggtgtactctcatggcaaaactgctggcgagggtgctctttctgcagaaagtaaaaatggccttgctgaggaaattaattttatgttcaagtgctatttctttatggcaccagggaacaaacatttctaacaaagggaccttaccaaatcattcttaccatacccacagcagcaaaactccagggactccccaactggtttcattatacttctctcaagaaaacagacttccctttgccacatacccaaacaaccaaatccaaaaccccttcagccttctcttgtgtctccacaggacccacttccctttgcctcacccgaatcttggaagaaaaggaagagaaattcacctaaaccacttatgtctctttctctcccaaactttcactgcttcctaatcaaccttgttacagtccttcagcggtacccttacgaaactcccattatatatcctgatcagctctttactgttctatgggacctatggcttcaaggaactttccaggactttactcttacccaaataacctttttcgctttttgcttgtttttttttcaatacaaataccctaagtacatcaacctcaccaatacaaccacttctcactgctctcaagctcgaactataaaccttacacaatccctcttgctgcgaactaactcttcctttgctcctgaatgctggatgtgcttatcgctgtcttcctcagcctacacagcccttcctgcatcccttcatgaccttttagcagggagcataaccctaatttatacactccaaaagggagcttcctttcttgaaagagctgacaccctggtcggcaattatcctacttccagggccaatcaggctaacaaattatttcaaacctattacaactccctgcaacgcctcaagcctcaagactctcccattaaagggcctataactaaacacaccccccttttacaacaagcttcactttgcttttcagcctctgaaggaaatctccctgtaggatccttaacacctaaccaacgcaaccgtactatcattattaaacacccctctgaccatcaaactaaccgagttaactacccagtatcacctgaagcaaatggagcatttccgcaactggctcgtttgacagcctctctctcagccaatgcctatggcctaacttgtgctgtgcctggtgcccacctttttccatggctcaatatcaatggtgcaacatcctattgcattaaatgtgtaaaaagtaactcttcctatatttctactatagtaggtgtctccctggcctcctccttgtccatttggagtaatgaaccacaggaaagaaaaaacaccccatgtttagttcacctactgtctttccatatctctgcctgtatacacgacaaaggcctgttctttttgtgtggcaccaacacatacctttgtctccctaccaactggactggaacctgtaccctagtttatctatctccctccattggacttgttcctcctgatcgacctttgcccatcccacccatccaatatgttagaaaaggaagggccatccatgtcattcccttaatagccaccttgggtataacctctggacttggattgagagcaagcagattagccacttccataacatactttaaggctgtttcaacagaactacagaactcattagaagacacagccccaagccttataaaagtccaagaccttggccaggcacggtggctcacgcctgtaatcccagcactttgggaggccgaggcaggagatagagaccatcctggctaacacggtgaaatcccatctctactaaaaatacaaaaaattggctgggcgtggtggtgggcgcctgtagtcccagctacttgggaggctgaggcaggagaatggcatgaacccgggaggaggagcttgcagtgagccgagattgcgccactgcactctgctctgggagacagagcaagactccgactcaaaaaaaataaaaaaaaaaattaagaataaaggattgatcaggctatttgaagagcaacctcatcatatcccacaattccaaactcctccccaaccagagacatgctagccccaagataacccccctctggccaggaagatggcagccttgagataacccgccttggctggaaagatgtctgccccaagataacctcctctcctcccagagacattccaaccctgccataaaacctctccctcacacagaaacattccaagcttgtgataagccccctcaccctaaaaccaatatatactcttagtctgtaagagaaagcactcctgaccaaaaatcggccagaagcccctctcaggttttatctgaagtaaacctgcctttaactgttgagctgcattttgtttctttcctctttctttaactcttacaagtgttggcaaggatgtggagaaaagggaacgcttgtatactgttggtactattataaattagcatggacattctgggctgggcatggtgcttcacgcctgtaatcccagcactttgggaggcctagggtgggcagatcgcttgagctcaggagtttaaaaccagcctgggcaacatggcaaaaccccatctctaccaaaaatacaaaaaattagccaggcatggtggtgtgcacctgtgatcccagctacttggggggctgaggtgggaggactgcttgagctcaggagccccaagcttcagtgagccgagatcgtgccactgcactccagcctgggtgacagagggagaccctgtctctaaataaataaatacatacataagtatggccattctggaaaacagtgcagaggttcctcaaaaaactaaaaataaagttaccatatgatccagcaatctcacttctgggtacttccaaaggacctgaaatcagtatattgaagagatacctgcactcccgtgttcactgcagcattattcatagtagccaagaaaaggaaacaaccaaagtcaccatcaacaggatgaatggatttttaaaatgtggtatatacacacaatgaaaaattattcagccgttaaaaggcaggaaattctgatttgcaacatgaatgaacctaaaagacattttgctaggtgaaataaaccaggcacggagagacaaatactccatgatctcgcttatacatggaatctagaaaagaagtagagagtagaacagtagttaccagaggctggggggataggggtagatggggaaaggagaaatgttagtcaatggtacaaagtttcagttaaacaggaggaataggttctagtgatctactgcacatcatggtgactattattaataataatgaatcatatatttcaaaatagctaaaagaatgaacttttttttttttgagacagggtctccctctgtcacccagcctggagtgcagtgtgccatgatctcaggttactgcagcctccgcctcctgggttcataggattctcctgcctctgcctcccgagtagctgggactacagatgcgtaccaccacacacaactaatttttgtatttttagtagagacagagtttcgccatgttggtcaggctgaagaatggattttaaattttttcaccacaaagaaatgataagtatttgaggtgatggatatgttaattagcctgatttgatcatttcacaatgtatacgtgcattgaaacatcacattgtaccccacaaatatatacaattattgttggtcaaaaataaaactggtcaagtgcaatggctcatgcctgtaatcccagcacatttggaagccaaggcagaaagatcgtttgagtccaggagttcaagattacggtgaactatgatggcgccactgcactccagcctagatgacagagcgagaccctgtctctaaaaaaacagaaataaaactgtactccataaacatgtataattatgtgtcaattataaataaacccaaaaactttaaaaataaaataaaataatgccaaagtaaaaggtttactaaaaaaatgtgaaagttctcagcacagagatgagatttaaagccaagaacctggataagatcacccaaggaaggagtattaaaaaaaaaaaaaaaaaaaaaaaaagacagctgggcatggtggctcatgcctgtaatcccagcactttgggaggccaaggcaggtggatcacttgggctcaggagttcgagaccagcctgggcaacatagccagacctgcctcaaaaaaaaaaaaaaaaaaaaaagacatggcattccaacattaagatcatctatagaattccagctaatgaatacacaaagaacggtgaaactagaaaatcacgactttgcagccaggcttggtggctcacgcctgtaatcccagcacttggggaggccaaggcaggcagatcacctgaagtcaagagttggagaccagcctggctaacatgacgaaaccccgtttctactaaaaacacaaaaaattagccgggtgtggtggcacccacctgtaatcccagctactcaggaggctgaggcaggagaatcacttgaacccgggaggtggaggttgcagtgagctgagatcgcgtcattgtactccagcttgggcaacaagagcgaaactccgtctcagaaaagaaaatcaccactttgtaatctctaataactgatttgacactttgggaggctgaggcaggtggatcgcttgagactaggagttcaagaccagcctgggcaacatagggagaccccatctctttaaaaaaaaaaactgatttgagcaataattatcaatggttgaaagcctgatgggttggtggggaactggatattcacagaatactaagctatcctgaacgtattacttcctcatcataagggggaaatgcaactttgcaaaggaggaatcagattgtaatcactgaacccattgatcaacctttcaatagcattattgaaagtaggaaagtcagatgttatatacttcctgatatgacacaatatagctacacagccttccctataaagtattcatgccaaaaatattgaagcttaatcttatcaagcctttagtttaaattataggagacagaacaaactaatgacactacaaggaagacatcacactaattcaaatcattgtcatagaaataaaagtggaggggaggggagaactgttctagattagaagttcaagaaacataaaacccaaatgaagttgtagaccttctttggatcctgataaaccattcaaaaatttgaggctgggcatggtagctcacgcctgtaatcacagcactttgggaggccgaggcaggcgaatcactggtcaggagttcaggaccagcctggccaacatggtgaaaccctgtctctactaaaaatacaaaaaattagctgggcatggtggtgggtgcctgtaatcccagctactcgggaggctgaggcaggagaatcacttgaacccaggaggcgaagtttacagtgagccgagattgcgccaccacactccagcccggatgacactgcaagactccgtctcaaaaaaaaaaaatttgaatatggactatgtattagataatatcaatgaattcatttattttgttaggtgtgatatggcatggtggttttgtaagaatatggttttttttttgaccgggcaagggggctcatgcctgtaatcccagcactttgggaggctgaggcaggtgaatcacctgaggccaggagtttgaggccagcctggccaacatggtgaaaccccatactaaaaatacaataattagcctggcgtggtagcaggtgcctgtaatcccagctacttgggaggctgaggcagagaatcacttgaacctgggaggcagaggttgcagtgagctgagattgcgccactgcactccagcctgggcaacagagcaagactccgtctcaaaaaaaaaaaagaatatgttctttttaaggaatatatacttaagtatttcagcgtgaaatgtcatatctggggatttaaattatcttagaagatatgaggaggaatatcaacagaatctgaagcagcagtcagtgaagtaagaagaaaatccggagagcaagggctccttggaagactaatgaatcatgtgtttcatggagaagtgattaacttcgtcaagtactactggtcgaggtagatgaagattgagaattgactgttggatttagttatatgaatgtcattggtgactttgataaaagcagtttgtgtaaagtgatggggtgaaaacctgattgggacgagttcaacagaagttaggagaaaagaaataggaaatgacaagtgtagacaatgatatgacacctggaattttgctgtaaaggaaagagaagaaatggagcaataactggaaatgaaaataggatcaagagaggatttttttttttaacaatgaaagaattggtgggctgaagtccttataccagtgagtgacaagggatgagatcttttgcacaaatggaggggttgtgccttagctagaagcatggagagttcatccatactaacaggacagaaggcaaagaacacagagggaataatgctgggaagtaggttgatatggaagaagcttctggaaactgtcttctgattgcttctatcaacccagtgaaattggaagcaagagagatgagggtgagatgttgagggtctgaaaagcaagaaggcatgaaacaggcatctagtacaatggatgagtgaatacattagagaaatgtactatgattgccaggcagcatgaagggcctgcttgacatcgatattgatggatttcaagtaagaccagtcacatgattgtttcttcaaccatgttcatctgagagggccagagttggatttagcaaaatgtattagtttcctattgctgccgttacaaatcatcacaaatgttaaaacaacacaaagtattatcttttatcttacaggttatatcttgcaggttatataggttagaagtctgacacaggtctcactgggctaaaattaaggttgcagcaaggctgtgttcctttctggaggctctagggggagaatgtgcttcttgcttttccagcttccagaggccatacacattccttggttcatagccccttcccccatctaccgagccaggtaggataggttgaatccttctcacactgagtcactatgacctcctcttctgcctccctcttccacttttttttttttttttttttttggagatggagtttcacttttgtagcctaggctggagtgcaacggtgcgatctcagctcactgcaacctccacctcctgggttcaagcaattctcctgcctcagcctcctgggtagctgggattacaggcgtgtaccaccacgtccagcttatttttctatttttgtagaaacggtttcatcacgttggccaggctggtctcgaactcctgacctcaggtgatccacccaccttggcctccccaagtgctgggattacaggcgtgagccaccacacccagcccctcttccacttttaagcaccctgtgattacactgggctcacccagatattccaatttccctattttagggtcagctggttagtgaccttaattcctctctaccatatgagggtaacatattcacagggttcagaaattagtatgtggatatcctcgggaggccattactctgcttaccatacgaaggctatggtcttgccaagccagtataattaagtgtgaaagagaaaaaaaataagttaaagttgtatacaaggaagcctccacaattattgactctgaacttcaaactatgtaaggagagaagtgagaacctgaggggtgtgcaacagtgaaaagatggaatcaatgaactataggtcccaacaatatcaaacatttgttggaattggtattctagagggagtaaggtagaagatggagagtagaatgcttgaacggtggtgtaataatgtaagtgtaataaaaagtctgattctgctgggcatggtggctcacacctgtaatcccagtgctttggcagcctgagttgggaggatcacttgagtctaggagttcaagaccagcctgggcaacacagtgagacttcatctctacaaaaatcttttttttcttttttttctgagacggagtcttgctctgttgcccaggctggagtgcagtggcgccatctcagctcgctgcaacctccgcctcctgggttgaagcaattctgcctcagcctcccaagtagctgggattacaggtgcccgccaccatatctgactaatttttgtatttttagtagagacggggcttcaccatgttgtccagactggtcttgaactcctgacctcgtgatgcacctgcctcgccctcccaaagtgctgggattacaggcatgagccactgcacccagcctacaaaaatcttttaaaaattagccgggcttcatggcacacacctctggtatatgtttatatgtacagtaagtcctcagttaacgtggtcagtaggttcttggcaactgcaactttaagcaaaatgacacacagcaggcccttgaatgacactggttcattcaatatcattttgctgcaacactgatgagaaaaaaattggttttgctacgtcatttcacttaaagtcagtttccaagaacctatggacaatgttaagtgaggacttactgtatacacacgcacacacatctttgctcactcatgtaagtgtatctgtagaagaaaatactacaagtcttagcttcaaaagtaaaactatgtatcttaacttttgaattgactcatatagctcatcacacaccagcctgagagaatataaataaatgcttactcacactattgactttattaaaatctggcatggttttcttgaatggcaattttaaatacacattccctaagacccagcaatcggaattccaaagtgtacactcagttacgaagtgcacaaaaattcacacaaaggctgcctattacaacaaaagtataatggcaaacaattggaaaaatctaaatgaaaggcctggcatggtggcccacgtctgtaatctcaacactttgggaggccgaggcaggaggattgcttgaactcaggagtttgagaccagcctgggcaacatggcgagaccctgtctctactaaaaacacaaaaaaaatactttgggaggccgaggcgggcggatcacgaggtcaggagattgagaccatcccggctaacacggtgaaaccccgtctctaccaaaaatacaaaaaattagccgggtgtgttagcgggcgcctgtagtcccagctactcgggaggctgaggcaggagaatggcgtgaacccggaaggcggagcttgctgtgagcccagaccgcgccactgcactccagcctgggtgacagagcgagactgtatcaaaaaaagaaaaaaaaaaaatagctgggtgtggtggtgtgcgcctgtggtcccagctactccggaaacaggtgggaggatcgcatgagccccgggggatggaagttgcagtgagctgagttagagatcgcgccactgcactccagcctgggtgacagagccagaccctgtctctaaaaatatatataaaacaacaatagtaaaataataaattggctggacatggtggcacccaccttaagtcccagctactagggaggctggggcaggaggactgcttgagcccaggagttcgaggctgcagtgaactatgatcaggccactgaattccagtctgggcgacacagcaagaccctgtctcaaaaaaaattaaagcagtaaaattcacagagacagaataatggttgctaggggctgaagggagggggaaatggggagtttgtttaatgggagtagtttcagttttgccacatgagaaaagttctggagatgacggacggctgcacaacaatatgaatgtagtcaacactactgaactgtacatttaaaaatggttaggatgataaactttatttttcataaaacccagtttctgcacaaaaagataaaatttatgttatgtgtactttaccacaatttaagaaaaaatttaaattctcatcccaacattaccacgccccccacccttagccaactggtgaatgtttactcatttttcaacgcctagctcaaatgtctcctcttgccacgccatcccttagctgaccacccttgtagttggccattccctcttttatgccaacactgtgccctgcacgtacattatacctcttacagcacttatcaaacctagtaattattgctttacagatccgtttccactactagattacaaacaatttgggggcggggaccttgttttactcatctctgtatcccctagacttagggcttgataagctgaaaagaatcaagaagggcttgattaattaaggctcctctggcttttaaggagaccatactggagggtcatttgcccaaaagaagaggcatcggggtctcctcaggttttagaaatctggtcaaacatccagagctgactcccacaccctactgcgagaagagcgcgagcgcgcgtctcaaaaggctccgcctcaacagttcgggtccccaggaggatccgggggccaccccacctccaccctgggccaggtcggttagctagacccgcccagcggtccagacataccttaggtaatgagcagcctgctctgggctcaaggcctcggcttccggaaaccttcgggatgcctccatgaccctcggattgggttccagttaccccggcgggagtttggagcttggagcttggagcttggagcttggagcttagagtttggagcttgaatttcgctcactcccgccccgcgcatgctctgtgcgccgtggagagggacacagccaaccgacggcctcgcggccggccaatccgcgaccacgcgctgcgacgcctccgcctgagccccgcccatgacggtgggcgcctgcgcctacgcgcgccgggaagcagaaggtgatctctgccttcgagacacggagtgtgctgcctcagtctgtgatccctcgcgtttcaatccaattcaaaccatgctgcagccaattcgttcgcgcgtgcgtgtgccatcattgtgagtggaggagactgcccgatatgatcccagtcattgcggcgacccctggagatctccaacgcctgcgtcccccaaccataccctgccccgcatccacagatatcttcccttccttgatcgccagtacctggcactgaccgtgctttgaattcaaacaccctgggaggcatagtccctgtgatttaaactaacattgaagaagcgaccagacgcggtggttcacgcctgtaatcccagcactttgggagaccggggcgggcggatcacgtgaggtcaggagttcgagaccaacctggctaaaatggtgacaccccgtctctactaaaaatacaaaaaattagccgggcgtggtggcgggcgcccgcagtcccagctactcgggtggctgaggcacgagaatcgcttggacccaggaggtggaggttgcagtgagccgggattgcaccactgcactccagcctgggtggcaaagcgagactccatctcaaaaaaaaaaaaaaaaaaaaaaaaggctgggtgcagtgcctcacgcctgttatcctagccttttgggaggctaaggtgggaggatcacttgcacttaggagttcgagaccagcctgggcaacatggtgagactcccgtctctttaaaaaaaatttttttcttctccacagggcgttatgctgtatttattttcttaaaaagagagagagaaagagagaagggtcttcaagaatctcaaaccctggaggtggaggctgcagtgagccaagatcatgccactgcactccagcctgggtgacagagaaagactccatctcaaaaaaaaaaaaaaaattaaagttcttatttaagaaataagtaactaggttcacatacttggtataataaaaggaagacaaaaataatttaaaaaaaaagaagtagtgctgtggtcatcatttcttcagaagcaccaactaagatacagtcattttcaaatgcagagcctaaaaagaaggcagagcctagagcttaaggaaatgtgattgagtttaagtggcttgcttgggtgacactaaataggaggttgtgggccaacaaaaattgtccttgttcatatactgttaagaacacagacatgactcctcaagacactaatttagcattcagtattggaaaactcacctattggcccagtcatacatcatatgtccagagaattttaagcttttcataaaatttatagaccgttatgagttaaaaggaatgttggaggccgggttcagtggctcactgaacctgtaatcccagcactttgggaggccgaggcgggcggatcacctgaggtcaggagttcaagaccagcctggccaaatggtgaaacccccgtctctacaaaaattagctgggcatggtggcgggtgcctgtaatcccagcttctcgggaggctggggtggaagaatcgcttgaacccaggaggcagacgttgcagtgagctgagatcgtgccattgcactccagcctgggcgacagagcaagactccatctcaaaaaaaagaaaagggttggggggaggtgggggatcttggagaacatgggctattttcctggtttgtatgactttaaggcctttattaagaggccttttagtatactattatccacatttttcagatgtggaaacaggctcagagagataaattgacttcatctaagcttcctgagctaggaagcagcagagccagaattcaatactaggtccatatggacacaaatctgtgccgtttcgctgtgtcacactggaaagaagagggcagtggcgggaaatgaggttgatgaggcagttgaaggccaggttatgaaggaacttgtttactctgctaaagtgtttgaatcacatcttttcctggaggcaagcttggattgggctgtgctatggtctgaatgtccttcaaaattcttgtgttgaaacttaatccccaccatggtggcattgagaggcggggccttttagcaagtaatgtcatgagggatcctacttcatgaataaattagtgccttatgaaagggctggagggagctagtttaggccctttttgctcttctgctttcctaccatgtaaggacacactattccttcccctccagaggatgcagcaacaaggcaccatcttggaagcagagagcagccctcaccagataccaatcctgctggcaccttcatcttggactcttcagcctccagaaccataataaatacatttctattgtttataaattatgagtttgatggccaggtgaggaggctcacgcctgtaatcccgccctttgggaggctgaggcgggcagatcatctgaggtcgggagttcgagaccagcctgacggagaaaccctgtctctactaaaaatgcaaaattagccgggcatggtggcacatgcctgtaatcccagctacttgggaggctgaggcaggagaatcacttgaacctgggaggcggaggttgtggtgagccaagatcacgccattggcactccagcctgggcaacaagagcgaaactccgtctcaaaaaaaaaaaatatgagtttgagtctatggcattttattatagcagcacaaaggagctaaggatgagttgagagtccaggcgccctggatacccaaaggatgagtaggatgagaagagcagaataggggagaagatgtaggagagaattctgcagaaaggaaaagagagatgagagcacaaaaatcttcatcttgagtctggggaaggccatgtctggttgtgctttggctcagggtccaccatcatcgctcatatccggggaattgttgagaactgaagatgaagcaaagcaggcccctggtggttgttgtaggcatgccccattgtgggctgtgaagaaaagctaaagagaactccctcaggaaccccggctacctcctctctgcttcccagctggcagtgatgcctaaaggccctgatcaccgggaaggaaggaccaacactcggcttgcctgccctttggctattggattttctaagccccattttcacacagctgtagggctcctcctttaaactccccagctctggctgctcctcccctccccttcggtcctgtagtctgcttcccttgggcccttcttggtgccttctggagtcccaggtctcaacccagggctctgatgacccaggaaactccccagcccaggctcctagtcctcctttataaatggtcacccaggctcacagcctgaaaataagagagagattgggaggattttgagtgggtaaatggagagaatcaaagagagtcaaaataatagttactactatatccctcttatgtgacaggccccattcaaaacactttacatcgattaattatctgctgttcctcattatgcatctaccccaatcaagggctcccattcccccagcgtctctcaagggaatggggtttataaagctctcccagctgggctcagtggctcacgcctgtaatcccagcacttggggaggccgaggcgggcggatcacaaggtcaggagttcgagaccagcctgaccaacatggtgaaaccccgtttctactaaaaatacaaaaattagcgggtgtgatggcacgtacctgtaatcccagctacttgggaggctgaggcaggagaattgcttgaacccaggaggcggaggttgcagtgagccaagatctcactactgcactccagtctgggcgacagagggtgactccatctcaaaaagaaaagaaaagaaaaggaaaaagctcttcctaggctgggtgcggtggcttacatctgtaatgccagcactttgggaggtcgaggtgggtggagttcaagaccagcctggccaacatggtgaaaccccatctctactaaaatacaaaaattagccggccatgatggtaggtgcctgtaatctcagctactcgagaggctgaggcaggagaatggcttgaagccaggaggcggaggttgcagtgagccaagatcatgccattgcactccagcctctacaagagcaaaattctgtctcagaaaaaaataaacaaaaaaagctctccctaattattgttaattttaaaagggtgataatggtattgctgtttttttttttaaggtcctcatctgttagaaatacaagttggagtattttcagacaaaatgatatgacatctgggacttacattaaaatactccagtacagagggaaaaaaaaggagagtacagatgaacaaagattggcaaaatgttgataattgttgaagcttgttacagaggttcattatcctcttctctgcttctgtgtatgattgaacatttccataataagaattttaaaaaacaaaacttttcaacctaatcttcaaattacactgagtcatccgcactcacaggccggaaatatgataatgaggctttgtgggagggttcagaatgcataaatggagagatggatgaggccgaataagaacaatagctattacttagatagcactgaagtgccaggccttgttctaaggactttacatgcactgtcttttaatccttaacaacaaccttgttagatggtgtatactattatcatcctccttttacagatgaggaaactgaggcacagaaagattgaataacttacacaagtttacacagcttgtgaatggtgaagcagaattccaaacccaggcagtctggctttcgactttttgctctttaacatgatgctagttagatatagaaagcagctgacaggtgaagaaaaggattaattcatccatttacttattcatttatttagtaaatatgtgttgagcctttacaagatggtcacgtaaggatccaggtgctgggggtagagtggtgagaaaaacagacaagtccttgctatcaaagagcttaaagttccatggtgaagatggacttgaaacaataatcacacaaacacttggaaaattacagacatgaagaggtctcagaaggaaaactacaggcaattatgacagcataccatgaggtatctgacccaatctggagggctggaaaaggtttctctgaggaagtagcatttgatctaagagctgaagggtagggaggagttaaccaaacaaaaagggaagggaagggcatttcaggcagagggaatagcatgatcaaaggccctgaggcaggagagggcttgatgtgtatgaaaactaaacaggctaagatggttggagcaagcctagaatgctgagttgaaacggttttttggactccagtctaatgccacaggtaagggaactgccaatgggaaagaaggaagtgaccagtccaaggtcagaccctgaacctgtgacagaaacagtactcaaacctaggtaccttcaatcccaacccagcgttttttccagcacacatcatggcttccctgcatatgaggagggagtgccagcaaaatgttgctcttggggactgagaatggaagagtgtttttgataaccaaatgaagtattcatgcacaaggagatcaaaagtgggtttggggccaagtgtggtggctcacacctgtaatgccagcactttgggaggccgaggtgggaggatcacttgagcccaggagtttgagaccagcctgggcaacatgattcatcagacaaaaaacacaaaaattagctgtgtgtggtggtgtgtgctgtagtcctagctacttgggaggctgagatgggagaatcttttgagcccaggagttcgaggctgcagtaagcagagtcacaccactgtactccagcccgagtgacagagtgagatcctgtcaaaaaaaaaaaaaaaaaaaaaaaaaaaaaaaggagccgagagtgggtttggggcaggaaaaaagatgaaattgattagaaacagtaataatgtatttatgagacagggtctcactctgttgcccaggctggagtgcagtggtgtgatctcggctcactgtaacctcagactcctgagctcaagtgatcctccaggctccagcgattctccaacctcagcctctttagcagctaggactacagacatgtgccaccacatccacctaatttttttaatactttgtagagacagagtcttgctatgttgcccaggctgttctccagctcctgggctcaagcgatcctcccgcctcagcctctcaaagtgctaggattacaggtgtgagccaccaagctctgccaacagtaagaatttgtgtttcccagatacctaattaggcttctcccaccccatttctagctagggttcttataaagtaggtgggatttgggggtaggggatagaagattgagactgagggtttaatctcccaggggaagcaggaaggaggaggaaagccatgggatggaggctgccccagccaacagtcatctccagctctgccagcagagggagccagaaactgaatttcctaagaatggcagctggcctggcccctgggatggataaacccttcttggaaactaatcaagtcagcccaggatgctgtggaaatgacagggactgggaggaagggagggagccaagagttaggattacctgcagggtctttgccctaagtttcacagtctttgatgaaagccttctaaacctgcctttcggggtttgggtgaagtgggcaccaaaggatagagaaacctttgacaaggcagtcccactgcacaaaacatggcatcctccactccctttgggttacctcagtggctctcaaggcctcacaattctgtctctagcctcatcgtctctcctgagatttggacctagatggcaaaatggctataggacatgtcaccccggaagctcaaactcaacatggcaccgaactcaccctctctcccctagacctgctctctcaatatttcccatctccatgaatggcactaccaacccccaaagtggtccaagtcagaaaccgggaagtgtctttgaggcctgcctcatatttgcccctcaagttcaattcatcagtgagtcgtgttggctctacctctaaaatacatcccaaatccaatcacttctctccatctccactgccaccacggtagtctatgccaccattctgtctcacttggacgactgcactagcctcctggcttgtcttcctgcttctatttgtgcctttcccccactatctgatctctacccaaaaaccagaatcatctttcaaaaataccaaactgatcatgccatggccctgtctaaatccttcaaagccccctcgtttccctcaagatcaagtcctgcctccttaccatggcttacaaggccttcctgatctggcctctgactacctctctggccacgtcttacttcttcacaacccctacacatacatgcacacgatctcttctcaaactgaacaacttccagctattcagatcttgcctccaggcctccccacatgcagtttcctctgcctggactcacccttttcacctcactattgtctattcactcctcttgtctcagtgcaggtctccctgcttccaggaaccttccctgatccttctcaacaagtcatcctctgtgatcccacatcctgcctttatcattgggtttattccatggaatgtagctgcctggttacctgtctggctcccccgtgatcatgtgagctctgtgaagaacatttctgtctttttcacagttataccctcgcagagctcagaatggtccctacacataatggctgaccagtaaatagttgttggatggatggatggatggatggatgatctgtcaattagtaatcctaaaggagagcactgtgtgctctgttagagaactagaatgaggccttgggtgggaatgatatatccaaagacataatgaggaccagaaatcagggaagtggggagggccaagcatacccatcccagccacttctcttgccaatactacccctgtctcccttttatacctgcctccagatggacctggaagtaacacagaggattctgagttacacccaggaactagacagccctcttctagtcccttcccagatcttgtgctaggacaaagccacccatgcttggctgtgagatgaacaggctccagccagagcccagtgtcgctggactctccagatgccctgtacccacttgttccccaagtcaaggacatttctgggagctccccatgagctctcctgtagcttccttatcctccttctgcagcagcagagaaaccctccctacatagcatgggtgcctctcacaaaacctggggtcaaggcttctccctggtgccagcccaagaagggactccaagtgggcatctaatccaaataggcgtggcctttttcccttcctctttggcactaaaagagacaggtagtaaaaactacaagctcttgagggcaacaggagggaagtgggggcaaaggtgaagtttttctacagcccttcaaaggtcttggccccttgcccagatccaagtcaagaactgtttgtttcagagaactggcttcccagccatctgctcagagcttaaagagcctaggggccctcatgggatgttctgttcaaattagccaaaaaaggcagggtgaagacaacacagcaggaggggccttgaccagtctgggcctctgaaggtgtggaaggaaggggcaggtatatggcactagggcacattgagggtatggcaagtcccagaacagagagctcttctcacagcccagttccactgatcttagaaccatgtcttccatcctttgtgagcagctaatttatgccaggaactttccccacaacaaacaagatgttctcttgtaccagttgaaggaaccaaggattagagaggttaattgccttgcacgaggtcatgcagcaagtacacagcaggttcaatgagtgtcctctggtgattggttgccaaggctgctagaaaatgattcttcccttcagtgagcagataggcagcctgaggataatagccaggaggggatacagaaagtcacactccttttgcgcctaggacatagcttgctccatccagaaaaaaaaaaaaaaaaaaaaaaaaaaaaaaaaaaaaaaaaaaaaatgtccttattcctttgacacacactgtctctgggttgtagaaatgggtcaggcactaaggtcaggttttacatgtggaaaatcttagggtgaagacaggaaaagactttctcacagtcagagtgtaagagaacagttcagatgaatggagctgtccaagaagccaggcagatatgcaggagaaagactgacaaggaaaccctctctcctaaaatcccccacagccatgaacattcacatgaattgaaaaaccaatcctcagccaggtgcagtggctcatgcctgtaatcccatcactttgggaggccaaggcggtggatcacctgaggtcaggagttcaagaccagccaggccaacatagtgaaaccctgtctctactaaaaatacaaaaattagccaggcgtggtggtgcacacctgtgattccagctactccagaggctgagtcaggagaatctcttgaacccaggaggcagaggttgcagtgaactgagattgcgccactgcactccagcctgggtgacagagcaagactccatctcaaaaaaagaaaagaaaaagaaaaaaaaaaaccaatcctcaggcaaaattgctagggggtaagtttgaggacttgcaaaagtagggggcctttggggccaatctttagttcaccaggggttctcaagtctgcattcatgtgagactcactggggatatcttaaataataattatgtttgcgatatatttatctgacaaaagactgatacccagaatatataaagagctcctacaaatcaataataaaatgaccacccaaaaatatgagcaaaagagtggaacagacacctcatgagacaggatatatgaatggtcagtaagcacatgaaaagatgatcaacataattttccattagggaaatgcaatttaaaactaaaaggacatgcctctacatacccatgagaatggctataatttaaaagacagacaataccaagtgttagcaaagatatggaacaactgtaagtctcatcttttgctggtgggggtgtaaattggtacaaccactttggaaaccagcagtttcaaataaagttaaacccaggaattccactccaagagaaatgagtatatgtgctcacagagagacttgtacaagaatgttgatagcagctttgtttctaatagccaaaaactgggaccaatgcaaatgtccctggatgcctgaatggataaactttggtgtatccatacaagggaataccactcagccacaaaaagaaatgaactactgatcctcagggcagtaggatgaacctcaagggcattatactaagagaaataaggcaatctcagaatgttacatactgcttgattccatttctatgaagttcaagaacaatcaaaatgaatctatgatagaaatcagaacagtgtctgcctctggcaggggtgaagggcagtgactggagaaatggaaatgttctatgttttaatggggcagtggttacacaagcacccacaatatcacaattcactgaactatacatttaaggcctatgcattttactgtgggtaaattatgcctaaattttaagactcatgcccaggcctcacccctaattaaatcaaagtatctaaaggtggggcctgggcaagggcattttcaaaatctcctcaggtgatgctaatgtgcagccgggggtgagaaccgctgataacattaccaccacctttccctggcaacagtccctctcagcctcctgtgttctggagacttttcagagatgcccatcagaaaaagtctctcccactatcacaagcagaggtaggcaagtggggatagaaggcgagtgagggtaagtgcataccaatatatctcaaaggttgtttcatatcaaaacataaaggcactgaattttacactttaaaatagttaaaatggtcaattttatgttatgtaaatttcatctcaatttttcaagttaaaaaaaaaatcagccgggcatggtggtacgtgcctatagtcccagctactcaggtggctaaggtgagagaatcacttgatcccaggagttcaagaccagcctgggcaacacagtgagaccctatctcaaaaaacaaaaaaatgaccaagaacttccttagatttgatggctgcacatattccattgtaaaggtgtactttatttaatcagtcctctattgaaggatatttttcccaatcttttgctgttaaaaacatagtgagagctaggcatggtagctcacacctgtaatcctagcactttgggaggcagaggtgggaggattgcttgagctctagagtttgagaccacactgggcaacataatgagacccgtctctacgaaaaataaaaataaataaaaacatagtgacaataaatattctggtatatggtttttttttttttttttttttgagagggagtctcactctgtcacccaggctggagtgcagtgccgcaatctcggctcactgcaacctccacctccagggttcaagcaattctcctgcctcagcctcccaagtagctggaattacaggtgcccaccaccacgcctggctaatttttgtatttttagtagatatgggggttttgtcatgttgccaggctggtcttgaactcctgaccacaggtgatcctcccacctccatctcccaaagtgctgggattacaggcatgagccaccacgcccggcctggtacatgcatttttttaaaaaatatgtgtgagtgggccgggtgcggtggctcacgcctgtaatcccagcactttgggaggcagaggcgggcggatcacaaggtcaggagatcgagaccatcctggctaacacagtgaaaccccgtctctactaaaaatacaaaaaaaaaaaattacccgggcgtggtggcgggcgcctgtagtcccagctactcgggaggctgaggcaggagaatggcctgaactcgggaggtggagcttgcagtgagccaagattgtgccactgcactccagcctgggcgacacagcgagactctgtctcaaaaaaaaaaaaatatgtgtgagtgtatctgtagaataatttcctaaaattggaattgttgggtcaaagtgtatatgtctttcttattttgctagaaactgccaaattgccctacataagggataaatgaatttacattcccataaacaatatatgaaagtgtgtgttttccccacctttgctaacagtgttttccaaccttttgatcttcacccctctgattattaaaaagtggtaccttgtagttttattttgcattttccctgagagtaagtcttaactgactcagataaagacgttcaagtggaggagaggggtgtttttttcgaggtagggaagaaggcagctgttttagttctggctgctataacagaataccatagactgagtggtttaaacaacaaacatggctgggtgcaggaagctcatgcctgtaatctcagcactttgggaggctgaagtgggaggctgaagtggactcacttgagtccgggagttcggggctgcaatgagctatgattgcaccaatgtactccagcctgggtgacagtgtgagaccctgtctctaaaaaaaaccaaaaaattaaaaataaaataaaaaaaacaaacgaacatttatttctcagttctggaggctgggaaatccaggatcaaggtgcaggcaaattcagtgtctggtgaggccctcttcctggtttgcagacattcaccttcttgttgtactctcacttgagggagaacagagagaaaaaggaaacaagctcttggagtcttttctttttaataaaaaaaatttttttttgagagacagggtcttgctctgtcacccaggctggaatacagtggcacaatcacggttcactgtagcctcaacctcctggtctccaagcctagctatttttattttttattttttcgtagaggtgggttcttgccatcttgctcaggctggtcttgaactcctggcctcaaatgatcctctcataggcatgagccacttagtgcctggcctccaggtcttttcttttcttttttttttgagacagagtctcgctctgtcacccaggctgaagtgcagttgtgcaatctcagctcactgcaacccctgcctcctgggttgaagcaattctcctgcctcagcctcagcctcccaagtaactgggattacaggcacgcgccaccacactcagttaatttttgtatttttagtagagacagggtttcaccatgttggccaggctggtctcgaactcctggcctcaagtgatctgcccgccttggcctcccaaagtgctgggattacaggcgtgagccaccgcgcccggtccctccaggtcttttcttataagacattaatcctattcatgagggcttcaccttcatgacctaatcacctatcaaaggccccacctcctaataccatcccgttttgggttagaatttcaacatacgcctttagcagggacacaacgcatggttcataacagcaggtatcttaccatgtttctgttatagttgtgttagctttgagcaagtcaccaagaatccaagggctcttaactgaatattaaggacacccaaatgtctttcttaggtccaaacctctcactggagtcccagactcctatatcaagtccccctcgacatctgacatttcactctgaaaacgtccaaaagagaattattggttcccaacccaccctcaaacttgacctgccctggttttccccagctctacaaacggcaccactcagttgctcaaaccaaaaaccttgaaattagaaacatcatctctttccctcatccagttcatcaccaagccctgttggctgtctccaaaatacatcctgaatctctccacctatccccactccactgcaactacccaagcctaagccacctggaatttaccaatggtttcctaactagtctccctattcccattcctgttccccagtcaatctttcttattagaaaatcaggccgggcacggtggctcacgcctgtaatcccagcactttgggaggctgaggcagctggattgcctgaggtcaggagttcgagaccagcctgaccaatacggtgaaaccccatttctactaaaaatacaaaaattagccaggcgtggtggtgtgcgcctgtagtcccagctactgggaggctgaggcaggagaactgcttgaacccgggaggcggagattgcagtgagccgagatcacaccactgcactccagcctgggcgacagagcaacactccatctcaaaaaaagaaaaagaaaaaagaaaatcaacgcggggcgtggtggctcatactgtaatcccagcactttggcaagctgaagtgggaggatcacttgagccctggagttcaagaccagcctgggtgacatagtgagacaccatctctacaaaaaaaaaaacaaaagaaaacaaaacaaaacaaaaaacaactagcttggcatggtgctgcatgcctgtagtcctaggtagatgggaggctgaggtgggaagatcacttgagcttggaaggttgagacttcaatgagtcatgatcatgccactgcactccagcctgagcaacagagtgaaaccctgtcttaaaaaaagaaaaaaaataaaagaaaaagaaaagaaaagaaaagaaaatccattcctcaaacagtacccaataatcctttcaagaaacacataaagcagatcaggtcactcctttgcttaagacctttcattgagttcacaacacactggaaatactatcgaaactcctcactgaagcctacaggtccctgtgtgatttccaaatctcaccctttttcttcaggcacattggccttctttctgttctttgaacaaccatgcccatttccaccaccaggtctttgcttttgctgtccccttggccagtaacactttcccctaaaatctgagcatggctggctccttcttatcattcagaaatcagccatctctcctgagaccttccctgacccaccttctttaaagtagctacccccaccactctaatcctatttatatatttcagagcccataccacgatttaaaagtatctgtttccctgtttacttccatgttgtttgtttctcctgtagatatcagctccatgtctgtattttcaaaagccgcaatcgtcctagcacatagtaggtgctgaaaaaatatttggaattaatgaatagtttaacagtactttcttgttttcaaagccttcacctggtaaggatctcagatttggggagaggaagggttgtttttcaagtccctgaaggaaacaaagctgattttaaaaacttgagatctgtgtctatccaaataattagcaaaaagtctgatctattcgtgaactaagctctccttgacctgctgagctgcctttgaaatatcctgtgtcattgcaggcaataaaacagcctttctttgtcaatattctctgcttcaaatttctcactaattccagctggcctcatcccagccaatctgaatgactgaaaggcagagtgaatataatttaatcagcggctctgcccctgcaggatgagcttgaggtgtctctgtgggcctcatctccaaaaggtgtcccaggggctgtgattttgcacggaataaaggagggccagcaggaaccccgctctggcgggggattcaggcaggcaccggctcagggcgggggtccggggaggtgggaggagtcggggtggcggcgaggcgggtgggggcagagccgcagaaaggcagggagaaggggaaaagaagacaataccgggaaaaagaatagtcgtggtaataatagtccattggcggatcgcttgagcccaggaggtcgaggctgcagtgagccatgatcacgccactgaactccagcctgggcgacagagcaagaccccatctctaaaaataataataataataataataataataatagtaataataataatcattgtaatgccagctggccgccgttttagtttacaaactcttcaagccattatctcgtttatgcctgtcaacagcttgcttgcaggttctcatccccgtgtcaccgacagggaaatcaaggctcagacaggtggcggctgagaaggctgcggcctccctgccgcgtggtgccctcggcctttcctgccgccttcccgcccctcttcccgcccacggcgcaccgctcccccacctgatctcctgccatcagtgagcccggcggcgcccggccgttgctatggcatttctggagtgtcagaagtgcccaggaagcatacaaatcgacctgcgtgagacagctctgtgcaaaacaacttccaatttactcgcaataattaccacccccagataatagcctgtactcaggcgggcgagcagggggcggatgggggaagggagagaggactctgagaggcagggaaggaggccgggcacaacagacaaacagccacggcaaggctggggtttcagggagaggtgggggaaagcagagaggtggtgctcctgaattagggactgaagaaggctcagtcctcctaatttggttctggaaactccaacgttcttctggacggatcatatgaaggcatttcattcgatatttactgggcacctttggaggtgggcactttgccgggcaccgggaatgcaaaggcgaagactccaagttcttgtagtgaagtggctcacagactcctgggagagtcaaacataaagggccatgattcattcaagcaatacttactaagcacctactatatgtcaggtattgtgttgaggaaaaaccggagagcaaaacacacaaaaatccttgccctcatgaagtttaacttagagtaggggcagacaacacatttttaaaaaatagccaaagtactgttagttggtgtgttccagagaaatcaaaccaacaggatctctagatttatacacatatgtgacatacatgtatatatttactataaggaattggctcacatgattatgcaggctgagaacaagttctgcagttggcaagctggagacccaggagagccaaggtatagctccaatttgaagatggatgtcccagctcaaagtcggcagagaaaaagaattcttccttactcagccttttattgtattcaggccttcaatgaattggatgaagcctgagggcaccctgctttactcagtttaccaattcaaatgtgaatctcaaccagaaacactctcacgacccacccagaaatcatgttgaatcaaatatctgaataccccacagtctagtcaagttgacacataaaattaaccatcacagtcaaaagggagaaaaaaaacaaaacaggagagcaggaatagcaagtgttggtggagtaggtgttgcagattgaaacaggatgatggggagagtttcactgagaacgtatgttttgaatgaagacctgaaacaagtcgggcagcaagccatgcagacttccaagaatgttccaggcaaaagaaacagtaggtacaaaggccctcaggctctggcatgttggaggaatagcaactagtccagggtagctggaacagagcaagggagagaataggaaagagctgggaacagatcatctaggctatataggctgacattaaggacttagactacaaatgaaacaagagtcactgaaggactttgaggtagaaaagtgacatgatagctgggtgttgtggctcacgcctgtaatcccagcactttgggaggccgaggtgggtggatcacgaggtcaggagatcgagaccatcctggctaacacggtgaaaccccgtctctactaaaaatacaaaaaaattagccgggcgtggtggcatgtgcctgtaatcccagctactctggaggctgaggcaggagaatggtttgaatccaggaagcggaggttgcagtgagccgagatcgtgccactgtactccagcctgagtgacagagcgagattctgtctcgaaaaaagaaaagaaaagaaaagaaaagtgacgtgatttgacttgtgttgtaacagaatccctctggcttctgtgtggtgaatagactgtgtggggccggggggagggcgtgatgggcaggggcaaagtcattaggagcactgctaggagcaaaggagcagtagagtaccattgctgtaacccagatgaaagctgattggaacttagaccagggtggcagctagggagatgatgataagtggtggattctggatatattttgaaggtggagccaagagtatttgctgatggattggacatggggtgggaagaaaaacaaaaggagttgaagatgatcaaggaggaaggtgtcttggggcaggcagtgtggtgtgaaacagagagttcaagttcatagggactcgggagttaagttgggctatacccctgcccttcttagctgtatgaccttgggcaagttgctttccatttctgaacctgagattcctcttctgtaggagtacacagggctgttgtgaagatttaatgaggtgattatgtaaaaccccagttccacggctggcacagactaggtgcttcctgagcacttgctgctcccttgaccttccttttctgaggaagctggaaaagcctcgtagcagagctgaggttggaggcagctgggaaggatgagtggggctctgttaggcagaaaagaggtgcatggggctcatccttcacaacaggcaggaggaaatgaagccaatggccaggcaggccttcgtggaagtctcgggttggggaaagctgcaggaggacagggtgtggagactgtggactgtgtgatggaaaggaagtcctgtgcaaggaaaggaaccccaacagagaggcgtgaggagatgagaggtccacctcctgcctccccagctctgccttggatcggccctggcccagaggacctttgaaaccttctgagttaccggatgaagcaggtcataactatggcacacaaaattcccagcatgccgaggagttactgaggtttgtgtttgtgtgaatcacacagcaaacatctgtcttggccactggccagaacagggctccccccacagccacacgcacactgattgcaaacatatggcccccaaggaagagactctccaaaaggcctcgtgaaccatctttgcattctggcctgaatcgccccagcccttactcccttactccttgtacaaaagcatgaatcccctttatatgggactgttagacccacactgaggaaaccctacccccacctccagaaccacaaacactaactcctcacctcatgaggggctctgacatcagaatgcctgggttcccatccagcccatccctattaattgtgtgaacttggaccaggttcttgacctctctgagcctcattttccacctctgcgaagaaggatgtaaatgatacctccatcacaggcttgatgcaaggctcaaatgggattatctgagagtaagactcaggggctctaaaaaatttgggttttaccttgtcccctgcaccccctactcaatactcccactaccattacgtgattcaaaataaaaattataccaaactgtaaagagggtaagaaatgctctataagttcccgccagaaaataaaaaaaatttttttacaaaagggtaagaaagtctaaccaaggtctgctttttcctgtgatgactactttgatggagttatttgaaatctcaattatcatattattttccaaaacacttttgttgtcatccctgctttatgaatgccctaagcatttttagtgagcagttaggccccagagaatatggacttggaaactgtaactggaaacaacacattcttgttggccaggatcagctaacactcaatagagtttactacttttttttttttttttttttgagacggagtttcgctcttgttgcccaggctagagtgcaatggcatgatctttgctcactgcaacctctgcctcccaggttcaagtgattctcctgcctcagcctcccaagtagctgggattacaggcgcccaccaccatgcccggctaattttttatatttttagtagaggaggggtttcaccatgttggtcagactggtctcgaactcctcatctcaggtgatccaccagcctcggcctcccaaagtgctgggatttcaggcatgagccaccatgcctggcccagagtttactattaatagtcgccagggagtgttctaatacagtttatcctcacaacaaaacctatgaagttggtacaattattatccccttttacagatgggaaagctgagaatcaggggtgtgaattgacttgcccactatcacagctagtgaatgttggtgggggttttgaacactggtactctggcacagaggccatatccttttttttttttttttttttttttgagacagagtctcgctctattgcccaggctggagtgcagtggtacaatcttggctcaccgcaacctccgcttcctgggttcaagccattctcctgcctcagcctcctgagtagctgggattacaggtgcttgccaccatacctggctaattttttttcttttttttttttagtatagacggggtttcaccatattggccaggctggtcttgaactcctgacctgaagtgatctgcttgcctcagcctcccaaagtgctgggattacaggcagaagccaccgcgcctggcccagaggccatatccttaaccgctatgctgtagtgtctcttcaacagttggatcaaactactgccacacatataagagccttgtattccaaaggggctgggctgggttaagagagtgggattggttgtttgggtagctctccccacagctggagacccagccccaagtcttcatcctagctgcaaagatacgagagtgctcaaattggcagtggtgccgcccggtgtccttccgaggggaggcatctataaatgagacgtttgaatcaaatgttttccaaaggtcctttcagttcaaggagctgaaggcccaactttcccttgggcctgccagctatcttctcctatgggagcaagcaggccctttgcagaccctttcactctgtcctccctcaaatagtggtgtgcatcagggtatccttggcccttgcctatcttacttggaggcatggcacgcctgagagacctcatccctccagggctccagttaccttctttatcctgatgcctagtccagacctctcctctgaggttgagaaccatctctccaactgcctcccaaggccctcctccttagtgtctcccacgtatgtacctcgccctctacctgcagtgtgaactcagtgggtgtctctccccggacctcttccttttttcatgttcttttctacaactggctctgccacctactcatccatttgcttaagccagaattcaggcagtcattctcaagttttccttgctctcactctccacatcccatcagtcaccaaggcctgtcaattttaccccctacaaattgcatgaaaccaatcccttctttccgtccccatggctgtctctctaggccaagccacactacctgagagctgaagtaaaaggcaaaagccttccgcggccctctctgcctctattctctgcttccatgagctgctttcaccgtgcagccagagagagctttttaaattaagcaaaatttagccgggcgcggtggctcatgcctgtaatcccaacactttgggaggccgaggtgggtggatcacctgaggtcaggagttcgagactagcctggacatggtgaaaccctgtctctactaaaaataaaaaaattagccgggcatggtggcaggcacctgcaatcccagctactcgggaggctgaggcagggagaatttcttgaatccgggaggcggaggttgcagtgagccgagacgtgccattgcactccagcttgggtgacagagggagactccgtctcagaaaaaaaaaaaaaaaaaaaccaaaatctgggtgtcgacccccctgtccagaactcatggatgactttatttctgtttggattaagtccaaatttttgtacatgtgtaatgagacctagtgctattaggcaaatcattttacaggatgggttctggagtccctataagcctcgattctaatgtaaggccagccatttcatagcgaatgcgactttcggtatgctttttaacatcttgaatcttcaactttctcatttgcaaagtgggagaacagtacctccctggtagcgttgttgtgagggtgagagaggagagagggcatgtaacctgctcaacttggtgccctgcacctaagcactttaatcacttgctgccaattagacctggttattataaagttgtcagtaccagtaatatgatttattgatttaatcaactaacgattactaattgtgatatgatggatttgttatattgtattataagttattattgtgaggttatgatgatattaatttggattctgtgatgatctctccagcctcgcctctcacaacttcctcccacccctcttcccttgcctttacttgtcatacaccctcattcccaggtgttcttgttttctgccatctctccctggaaagtccttctctccccatcctctgagtcctccagcccccttttatctctctaagtcccttcagatgcttaagtcagctcaaggcaccaattcctctgtgaagccttcccagaccctccccccaagacctgtataggtgtctcttctatgggcctccaagagcacctcgtgcttcccttctcagaccacctatcacaacatatttgtgattatttacttgtcacagtcctggacttaggtcgtcagtttgacaaagagctcttatcactgtattccaagttcttagcgctctgctgagcacgtggttgtggttcgataaatgtttgctgaatgaacaagagatcaacctggcagcattcagcgccccaccccatgacaatctgcccccttcaagggggtctgaggccccgagccaaacctcttcaaagccaaaagctgctgtgtctgccctagaagtatttctgtccttcagttcataaccttctcacttcctgtgggcttagtgaaggtgtgggcatttttcttcaccagtaaaatggcaaataagcccaatttttcagggtcgtggaaattcactgcaaggaggagctctgtaaactgcaaagggctgcatgtagcacttaatgatgatcagacacaataaatgtgttgctctttggctcaactcttgtcaagaccccatgcagacaagggccctcctgtttatacagcattatctctagcaatcaggttacaattgattgacattatcactttctttatgtttggcagattcccagcctgcagcaacatgctggtcaccatagagacctgagaagcaccctcatctcattggtatcatatttacaaaccaccccttaaagtggattattttgcagatggctgatctcatctattcaatgttgattctattagttccaatttcagaaggtgacattttctgactttgtccccttaagcacaaacaaaaactatggatttttgtttttgttttcagaaaagagaaagtacaaggtgtgcttggggaacagcaaggaaaccagacagatgtgggggcgggtttgtaggggaactgctggatgtacctcattaatttgttcatttgttcagcacccacagggtgccagtgaacgggctaggtgctggggatagagtggtgaacaagatgagccttatgcacctcacagtctcctgggggagacagccaaatagacaattttaatacaatgtggcaaattctatgatgggaagaagagagaaatggtgtgtgtgagtccctcaccttcccagaggtttcccaggggaagcaacgtttcagctgagacctgaaggatggatgacagtccaccagaaaaaagttagtggagcggggacaagcagggttgcagagtggaagaaaaatgttcctgtgagaagaaactgtccaaagagtctgaagagaaaagggaacagggtgaatttgaggccctacaagaaaaacaggagaccattcaacaggagacgcccagggagcaggtggctttgtgggcctgatgtccaagaaagaagtcgtggtggtaaacagagacttgggattgcaagctactgttgtctttctattgaaaaaatagctgagcaccacactagggaggccttgcaaggacagcccaaagaatttgaacttgattctacaggcagtgattttgaacaagaggttttgaagagaacgtgacacacgtcaagctgagctctagggagtgggcagcagcctgcagaagagggactaggctaggagcacagaaagtagcccacggcagaggtagcagaaggaatggaggagtgcccatgtgaggggtactgaggtggcacacttgccagaatcagggcagcctgcttggtctcataccagctggaaccagttcctaccagctcccaagggctaattgttaaactttcaggaattttctcagcattcattaaaaatgaaaaaaagtatcaatattaaaaatatttttgctggacatggtgtctcaggcctgtaatcccagctactcagaaggttgatgcaagagaaacacttgaggctaggagttcaagaccagcctgggcaacatagcacaatcctgcctcttttttgtttgttttgtttttagagacagggtcttgctttgtcacccaggttggagtgcagtggtgcaatcatagctcactgccaccctgaactcctgagctcaagggatcctccttcctcagcctcccaaatagctgggaatacaggcacatacccccttgcctgactaatttttttttttttgagacagagtcttgctctgtcgcccaggctggagtgcagtggcgcgatctcagctcactgcaaactccgcctcccgggttcatgccattctcctgcctcagcctcccgagtagttgggactacaggcgcctgccactgcgcccggctaattttttgtatttttagtagagacagggtttcactgtgttagccaggatggtctcgatctcctgagcttgtgatccgcccaccccggcctcccaaagtgctgggattacaggcgtgagccaccgcgcccagcagcctggctaatttttaaaaaacattttggctgggtgcggtgttgcatgcttgtaatcccaacattttgggagcccgaggtgggcagattgcttaaactcaggagtttgagaccagcctgcacaacatggcaaaaccccgtctctacaaaaaaaaaaaaaaaaaaaaaaaaaaaaattagctgggcatggtggcgtgtgcctgtagtcccagctactcaagaggctgaggtgggaggattgcttgagcccaggaggtcaaggctgcagtgagccgaaatcagtgcagtgagaccccgtctcaagaaaaaaattttttttttttttgtacaggtggggtcttgccatcttacccaggctggttttgaactcctgggctcaagcagtcctcctgccatggcctttccaaagtgctggaattacagggataagccaccatgcccagccaaaaaattcaaaaaaaaaaaaaaaaaaaaaaaaaaaaaagccgggcgcggtggctcacgcctgtaatcccagcactttgggaggctgaggcgggcggatccaggggtcaggagatcgagaccatcctggctaacacggtgaagccccgtctctactaaaaatacaaaaaattagccgggcgtggtggcgggcgcctgtagtcccagctactcgggaggctgaggcaggagaatggcgtgaacccgggaggcggagcttgcagtgagctgagatcacgtcactgcactccagcctgggcgacagagcaagactccgtctcaaaaaaaacaaaaaaaaacaaaaattcaaaaaaaaaaccccacaaaaaacatatatatgtaagttttgacagagcgagactgtctcaaaaaaaaaaggtaataaatactaaaatctcatcacttcctcattattttactacattttactactctctatgatgcccttgaagttattcacacctgctgtatctgcatggtggaaatgctatgtaatggtgtgctacgttcatctcctcccaactccttgttcagtgacatgttggtagcctcaaatcagccatggaaatgggcaaacactacaaatcagaacttggctaattgttttggtgattgtctagtgttaaggaagtgatggagaaaatgtttaaaaatgcaggttaaacttagaagtgtgctgtcactgtagccattacattgtgaattgtacaaaaaaattgccaagggtgatggcatgtgcctgtagtcccaggggtatcacttaagcccaggagttcaaggctgcagggtgttgtgattgtgcctgtgagtagcagggtgcactcccacctgggcaacagagtgagaccttgtctctaaaaattaaaaaaaaagttaaaaattaaggaaatattctttcagtattcaagaactattctccaagtcagcaaagaagctgctcacatcattgacagatgagttgaagttccaacatatatgtctttgttgtttcacttttgtcttatttgttaatgcaaacaaaaatatcaaccaatactctcatgggagctaacattcttttgtcgattgcaaccataaccataggttggctatggatatgagtttggcaaaagtcaataaaagcattctatgagaatcaactggctacatggacttcacaataaagagtttttttaaatttaataatattttatttatttttgagacagagtctcgctttgtcacccaggctggagtacagtggcacgatcttggctcactgcaacctttgcttcctgggttcaagcgattcttgtgcctcagcctcccaagtagctgggaccacaggtgccagccaccatgcccggctaatttttgtatttttagtagagatggggtatggccttgttggccaggctggtctcgaactcccgacctcaggtgatccgcccacctcccaaagtgctggaattacaggtgtgagccactgtgcctggcccctttgggctttaaaattgatctttgtgtttggggaattttccaggctaaacaacctggagcagatgagtggatttcgaatttgggagagaaaagtcctacctgaaaagatagcatcactcttggatagccagtttatgttcaagggaacatggaaattaactccttgggtggagtccctcagacccagcacttgccaacttttggtaccaggaacccgaggtcatgtctgcaatgtactttaaaaacttttttttttccacgacacagccctcaggaggtcctgagaacatgtggccccccaccctcccttttttctcccaagatggagtcttgctctgtcacccaggctggagtacggtggcatgatctcggttcactgcaacctccgcctcctggtttcaagcgattctcttgcctcagccttctgagtagctgggattacaggcgcctgccaccacacctggcttttgtatttttagtggagacaaggtttcaccacgttggccaggctggtctcgaactgctgacctcgcgatctgcctgccttggcctcccaaagtgctgggattacaggcgtgagacaccgcacccagccacccctttctttttttaaaaaacttttgaggccgggagtggtggctcatgcctgtaatcagagcacttcaggaggatgagaagggcggatcacctgaggtcaggagttcgagacagcctggccaatatggtgaaaccgtctctacaaaattacaaaaattagccgggcatgtggctcacgcctgtaatcccagctactcgggaggctgaggcgggagaatcgcttcaatctgggaggtggaggttgcagtgagcagagattgcaccattgcactccagcctgggaaacgggagcgaaagtccatctcaaaaaattctgagacggtctcactctatcacccaggctggaacgcagtggcataatcttagcttactacaaccttcaccttcttggctcaagtgatcctcccacctcagcctcctgtgtagctgtgactagatgccagtgccatcacacccagctaattttttgtatttcttgtagagttggaggggtctccctatgttgcccaggctcgtcttgaactcctgggctcaagagatcctcccaccttggcttcccaaagtgctgggatttcaggcgtgagccatccatgcccggctgcaatttactttcaaagtgttcagaaaaataagatgtttgtgtacatatacaggaatgaaaataaagcaaatatggcaaaatgttaaccattattgaatccagctggtgtctatataggtaatcactgtactgctgtttcaactttcctgtatacttgagaaagttcataatataaactacagtaagaatcagtgcaaagttctgaggcaagagaatgcctcttgtgttcaagaaacatcaaggaggccagtgtggctggaacagattgactcagagggaacaggtagatgaggtgaggccagactgtgagggcctcgcaggttcttatggctgtggctcttagtctgagttgggatagatgggagctcatttaggagcatgagtgaggagtgacctgacctgtcttaaacaggatcccattcggcagctgggttgagactgtaggggtcaagaatggaagccaagagacccgttatgggttggtgctatctataatctagagtgcaggtaagagttgttggtggctcagaccagggtggtagtgatgcaggtgataagtggtctgatattatctgggaggagggcatacactgtgctatttatttgttcctttatatgtttattatgaaaaatctcaaagatatataggagtagagagcgtaatgaatcccctctatccatcgttcaccttcaacattatcagtacatggccatttttatttatttttgagtcagggtcttgctctgttacccaggctggagtgcagtggcaatcatagttcactgtagtctcaaattcctgggctcaagctatcctcccacctcagcctcccaagtagcttcaactataggtgagaaccaacatgctcagctaattttaaaaatttttgtagagatggtggtgtatctctctacattgcccagactggtcttgaactcctggcctcaactcccatcttggcctcccaaagagctgggattacaggcatgaaccattgcacccagacttgaagcaaatttcagattgcttgtcatttcttctgcaaatccttcagtatgtatcctcaaagataaggactctgtaaaaagctgtatgattgtgcaaaattgagcaattatttctaagtatcactaaatatggattctggacatattttgaaggtagagtcaccaggattttctgataaaaggaacaggaatcaaggatgtgtccaaagcttttggctggagcttgatggggacactataaacagactgacaggccagagggaggtatcactcttctctatctggtttagggaaaagaatacaggatttgggtatcaaaaaatcaaaatggctttgtaaactatcaagtactatatatgtcctagctatttgttattcttcttattcaaagctgtgctgcattgtgctgctctgactcagatgtgaggcctagcctgctggaggcacagggatgtaaactaaacccggtgaatttctgctagcttcagtctgtttcatctcaggacttctgtttggctccctgctgagatgatctcaaaggtttccttcagctctaagaatatgaagcaaattggaaggcttaaaaagccttacaaagacacaagctattttatttggaaatttgcagctcatttagatgattcagggcccttgcgctaagtccacttgcctggtattagaatggaaatcttccccactatgggaagttgctagtaaaaaaaaaattcccggccgagtgccgtgctcatgcctgtaatcccagcactttggaaggccaaggtgggcagatcacctgaggctgggtattcaagaccagctggaccaacatggagaaaccccatctctactaaaaacacaaaattagccaggcgtggtggcacatgcctgtaatcccagctactcaggaggctgagacaggagaaacgcttaaacctgggaggcggaggctaccctgggccgagatcacgccattgcactccagcctgggcaacaagagcgaaactctgtctcaaaataaacaaaacaaaaaaatccctgtgctagtttaacaaatacattaaaaaatcacaagtttaaaatgttgaaaagaaatctcccaggctaggctcagtggttcttgcttgtaatcccagcactttgagaggaccacttgagcccaggagtttgagaccagcctgggcaatatagcaagaccccaatctctacaaaaaaacaaaaaattagccaggcatggtggtgtgctcctgtagtcccatctactcagggagctgaggtgggaggatcacttgagcctgggacgtcaaggctgcagtgagtcatatcctgccactgcactccagcctgggtgacaaagtgagatcctgtctccaaaaaataaaataaaataaaataaacaaaaccccacatctccctgtgatacgagaccacagctgaacacaccaattctccagttgtgctgactggctcaccaattaacatctaggaaaccatcatatatgtgaaaggaactctgaggcttctcattttcctccatatttgctttggtcccttagctaaaattcacatttctatcatctgctgagcagagattttagtacctagaaaggtgcaaagtgtagccaaggatgtgttgagtagtgtagcaccaagagcctaccagcattcaggaccctgcatccaggtgactggctggagtcctgccctctggcctttcatagtctcgcctgtctgttttaagacagggtttcactctcacccaggctggagtacagtagcacaataatggctcactgcaacctccattccccaggctccagtgatcttcccacctcagcctcccaaatagctgggaccaaagatgcatgacaccatgcccggctaatttttggtagacaaggttttgccatgttatgcaggctagtttcaaactcctgggctcagtcgatccacctgctttggcctctctcagtgctgggattataggtgtgagtcaccacgcccggctcacctgcctgtttctgaagggcaccataaggttacttctgacctggcctcaacagaacaaggatgagctccattctcttgacaagagaaccattcttaaagcaagatacctggcaagcccacttacacacctttcccatccctgattcaggggggcccagtccctgcagaaattccttttctggcccaggtacagtggctcacacgtgtaatcccagcactttgggaggccaaggtgggaggaccacttgagcccaggaattcaagactggcgtgggcaatgtagcaagaccttctctacagaaacaaattaattaaattaatttggcatcacagtgcgtgcccatagtcccagttactcaggaggctgcggctggaggatcgcttgagcccaggagtttgaagctgcaatgagctatgactgaaccattgcactccagcctgggtgacagagcaagacgctgtctttaaaaaaaaaaaaaaaaaaaaaaaaaaaaaaaaagtgaatgggaccccagccagtcatgctttggcgtctgcaatatgaatggcagagaagccctatgggaccaaatctgggcttcagggacccctgggcatgcctcctttagctgattttctctggcaagaccaagtagtctgctgactcaaagtccaggatgctgccaggggtagagatactgccctaagccacagtgcctctacaggcctcttatccactgctaaaccatacacctgggaaacagggaccatttaacattcccagctaaatatgccaagtgacttcacatgtttatcttaaagatgtccaaaacgcaactgattttctcccctaaacctgtgatggtgggatgattaagcctgagtggtctacagcaagttaagtgcaaggtgctaaatgaaggtgacctgagatacagcatctacaaggcagtacctctcaacacagggcaactttgcttctcagagggcatttagcagtgtctgaagtaatttttgtattacaactcagggggtggggggtgaatatctagtggatagaggctaggaatgttgttaaacattccacaataaacaggacagctgcccacaaattatgtagccccaaatgttaacagtatcaaagttgaaaagccctgctataggtggcaagggaggttttcgtttttaacaggaagacatgctttatagggtaacaggaacaagagagttggttgagagaaggttgaaatcacaaggtaggataattgacactgagactggagggactggattgaggaacaggtgtgtaacagcaggccccatgaagcaggggcacatcttcctgagactggtaagcaagcctgacatgacccgacacatttggacaagcaagaacaagtttatgttctacatctctgtcctctgaaaaacagagttgaggactgcagcggcagctggagaataagggcactaagtccaaggaactgcaatgctttgcaacatcaacagcccatttatgaccacctttaatggcaactggagattttcatcctgcgtttggcaagatgggcacaggagtgggaaaaacagatgagccaggcttgtggatgggctagtgcaatacagactggagaagaaaatgagggcagatttttagaaagccaagggaacttaacagggcagaggggtccactgtgtagagaagttcttggccaagtcaaggcgggggagataaatactccgggatttcttggctctttctactccttggttagttgctgttcctttcccaagtctggtatcttctacttcccaccactaactaagcccagccaataacagactgcctaagcctgcctgagaacttaatcactgttcatgttatacagtaaaatagcaggaaactgaattaaaaaaaaaaacaacccacaaaaccaaaatgctattaatcctgccacaatatttttaattacgtacaaagatctgacatgtcacccagggacccatttcacccactgctctgtttggccgccagtcttttgtctctctcttcagcaatggtgaggcggataccctttcctcggggaagagaaatccatggtttgttgccctggaagagaaaacaagcagaatcaaaacccaccacacaccaactcatagtggcttggcacatgctacatttgtcacctcacttaacagaactgaagcctgtttgtgagagtgcttggcatcagctaggcagttgcaagacacagatgctggttaccaaaagcacccactgcttgggtttctggggctgtcctatgaaactcaccgtatgcccttcagaattaatgtcttagaagtttattgtgcatagcaggcacctaccatttattcaagtgagtcaaagtttagtagtacctaaggctaatcattatgactcagcccagctctgcgtgagtcctatccagaagaggctttgcactaggttcagcagagccagccaggagcctggatgctacaatcccagcagccacctgcatttacatatttcctcagactagagagaaggaaaacccagacttaccttgccaataacaaaaatgttggaaagtcgagtggcaaagctgttgccattggcatctttcacgtgaaccacgtcaaaagatccagggtgcctctctctgttggtgatcacaccaattcttcctaggttagcacctccagtcaccatacacaggttacctaggcaggaagaaataatctgcttcaactcaatataacaaatgacaagcagctcagagatgggtccaaacaaattttattcctcctttccccccatttgaatttcctcatatggaactgctgcctatgctaggactcccgggactctcgtaagaaattttgtggccaggcttggtggctcacacctataatcagttcgagaacagtctgggcaacacagtaagaccctcctctataaaaaacaaacaatttaaagaaaagaaatgagtattctgagcatttgtgcctctggctataaacacacctgggcgattggagcagatggtttttaataaagatacccagaccctgtgcaattcataatgatctaggccttaaagagggtgcccaggtagcacagaggatgcttaccagtgtcgaacttgatgaaatcagtaatcttgccagtctccaaatcaatctgaatggtatcattcaccttgatgaggggatcggggtagcggatggtgcgggcatcatgagtcaccagatgagggattccttttgtgcccacaaagatctttctcactttgcacaacttgtactagaaaaatacaagggttagccacattcaatccatctcacatgtactttttaaccctatacaggaaccatgggttccctaactgctgcagattaattgtgacgctgatcgttctttccaccctcaagtgtatgttgcataaagcccttctctaggctcgtcctcctaacatccaccattgccctccactcctccaatgtaaatgccactccagtttcccaggctctttaagccttatggggccctgggaattcttcccttcaactcaactttatcttaatggctccctgtacatcacgactgagttttgtctcacaaacagcaattacattaccagttcatccaatcaacaaatacttcacatagcatttcaattttggatctctactccctgatatccttgaagtaaatcaaataatcacagatcccactggacgtgccctccagtctgctgttaacaaggctgtgcaaaaggaaattaggagccacatcagtcaattaaattaaccttcatttacagccaataatccaaacagccctaaacttttgtgtaaaaccatcaaaacaaactggattaaataatcaaagactgtaatctttttttaaacctcaaactagtgcctcaaggactgtctgtttcctccatcgacaccttcccctccccaaagtaaagctactcccacaaatggagacatggcaaagggctcctacgtcaggtacccaataaacaagttcccagaaatcattctccttgactcttaagagacaccaggaagtcgcggttcaactggaattcatttctaccacaaaaaaagaaaatctgctgaggaagttaacttcaaatgggggccaattttaggtatccatcaatgccctacagctatcagccagacttttaataacatgacaaaaagttacatgtaagacagaatctcatcgaattgttagctagatatttccaggtatgagattttaactaatcaatacccacctcattgcaagcagcactcgtactcaatgcaggcccttagaacaaagtaactatactgagtaaagacccagcttgcttgccacactcaccttggcctcctcaggtgtaatacgatgtacagcaaagcgacccttggtgtcatagatcagacggaaattctctcccgtcttgtcaatgctgatgacatctgaaatcaagcagtaaccggttactacatacagtgatccccactacctcatgccgagcaacaaccatagctctctacgaaacaaaaagaacccccatgtgcctcccagttctaatccaacaaggattctgaagattaaagatcacggccagatcttcaatatttcaaaaccccatgactgcatgtaaaatttaaaagtgaatcgaaatttagttttgaaaagcgtttcatgattatttgcatgttttttatttaagtaaaaaacagagggaaggtcaggctttgtttctgagacttgacagattacaaaggttagaaaaatgatcaagacagtatttggataccatagggctgccatcaatatgcgtctccagagtatttaaaacttcttacccatgaatccagcagggtaggttatatcagttcggaccttgccatcgattttaatgaaccgctgcatgcaaatcttctttacttcatctcctgtcagggcatacttaagtctgttcctcaggaaaatgatgagggggagacactctctcaacttgtggggaccggtggatggacgaggagcctgtaacgttaaaaatgataatcactgttgggattcactaaagcactcaaacctacctcctagtccaccagatccactaactgaacaccaagaccgtccatattacacccaacttggacttttacacaggaggtgtaaaaagcatccaaaactatttcataccttaaagttttatagcatcttccctgtcagaggaccaggatcattaagaacatgaatcctgagtccatgtaaatgtactatgtggtatgtggaataaatgaggcacaaaaatattaaatcgattggaagtggaggacagctagatagtatagctccttcaagggcagaggaagccaagaatagatattcctcccctagcctggtccccaaatgagtcctgggagacacttaaaaacagtggccacggaaatatttatataagatacttacaaacacaccggtcaatttatccagcatccaatgctttggagctgccacccgcttcagatgcttcttgggaccacgagcctgaaagttttagattgcaatgctgttaatcaggtttcagaacagcttataaaacctagtgtgaaactaaactcttagtttagtttcatcttcagcaaaatgtggacaatattaaagtatagtgttccgataaaacagaaacaaacacagttatttaacaaacaccgtgagatccataagctgcaacaagccttcttattgtaacagagaatattcttggttactatgtttcagaacgtttactgattactatctttcagaaccttgctaaagtgtttccatgttactgtttgaaactgtatctgcttagaggttagggtctttcaagaacaccatactagtgaaacgcacagcaacagaaatgagccaggagtctacctgtgtttctaaagttttcacaatttattaccgtctgtttttgacacgtatggaacaagattctgacatccgcacaaacacatgtgctgctccttcgtacactaaagccaaaagctgacaccaattttactttaaaaagagtaaggaagcctttttaatgctgtgtccagatgcttaccggccacgtatggtaaagtcaggccgtgccaaaaaggcaatgacaaagaaaacctttctccgccgggcacccccagcgcccaccaacctcgggctcgcagtctgagctcctggcccagccgcggctccggcccgggaggaaaagcagcttctcccgggatcaggacgtatggccgggtcagaaaccgaggccttcccaacagcagcaccagatctgcgcctccccaaccctaggccagcgttcgcccttcgccctggagcccgtcccggcctaccacggaggccgtgatcccttcgcctctgcccggccatccccagtaggaatcccgaaacctcgggcagccccggccgggggaggatggaggcggatacgtcctaagagctcgctaactaaacggcttaccatggctgcgttaggcaaggaaagaggacctccgtcttccggtgcgcgtagaaattggggctggagactgcgcgcgccggattttcagctgctccgcccagctcagccctttgctggcgcgccgggactctttcttgccatctgctggtgggaggtcagaagtcccgagttgaggaaccgccgcggaaagagggtgtctcctaagggcgatttcctccctcccctttttccgcccttcctcctcccatatttgctgagcgcctcttgtgtgccttattctgtgctaggtgctgggaatacaaagatgagctacacaacatccctggcctcaaggagagttcaaagtgagcttacttccagtctcacgtacagatgattctacgcctgtaatcccagcactttgggaggccgaggcgggcggatcatgaggtcaggagatcgagaccatcctggctaacacagtgaaaccccgtctatactaaaaaaaaatacaaaaaaattagccgggcatagtggcgggcgcctgtagtcccagctactcgggaagctgaggcaggagaatggcgtgaaccccggaggtggagcttgcagtgagccgagatcgcgccactgcactccagcctgggcgacagagcgagactccgtctcaaaaacaaaacaaaacaaaacaaaacaaagaacttgtatataatcaatagaatacattttaataaatatttaatgttatttcttaaacgtattttgtctgtcccttttttgtgttcccttgagccagccaggcagcccatactgagttgggaagagccaacaacgtttttaaccccctcttgcttctctgcttgaactctgacatcctcccccttgcttcctgtacaacgcatttggcacttatagagactcagggaggagagaggatattagaaatcgtctggttatatctaactaaaatgtagatctgatcctgcttcgaaactgcccttggccctctgtttcctgccgtaagggagcaggtctgaactttatctggctccattgctctctctccccaatcccaaacttcaaagctcaagccccaccaagctagtttgttccgagggagtcagctctttttgtttgtttgtttgggagacagggtctcactctgtcacccaggctgtagtgcatggctcactgcagcctcgacagacagcccgggctcaagcgatcctctcacttcagcccccacgagtagctgggacaacaggcgcacgccactgcacccaactaattttttgtagttttatttttttgtagagacggggtttcgccatgttacctaggctggtctcaaactcctggactcaagcgatccgcccgcctcgacctcccaaagtgctgggattacaggcctgagccactgcgcctggctagagtcagctctttcaagactgcttgtggactcgattccttagcttggaactgccacaaacagccaaacccccttcctgggtaccacctaatcccacacctcagccttggaaatgcacagttcaagtccctctggttctgtgggctcgtggtcccctcagtcagggtaaatccctcattcttgccccagaggcttgtgttcaaacttggtgagggcacacagcacattaggtagcaaggacaaatttagttacctggcctccaccaaactgagcacctccaggatggagcctgccctaattcatctgggcaggccccttgccactgaacagagagctcggcactgtgtccagcacttgataaatacttgttgaatgaataaacggagtcagcatcccacttattgtgccaagtcctactgtactatccctgagagcatccagcctgtgcctgaattcttcccaccatgagatcaagctcctaactcatgaggttccatttcacaagtctctatctgtaccatccactttacccctcagcagtctgcagaggagcaagagagggaaacattgttggctcttctcaagcagacagtattaaccaagcagacagtattaactaagagggcaggaactcctccttgtctaaaactgggatacaatccacaataaagcatgttataagtgattattggaaaggatcgattaattggaggtgaggagtagagagaaggtgaaggtgatgagataatggaagttggttctgaggtttttaatctgagagcactgggaagatggtggtacaattaacagaaatggtggagaagttgctgtgggagtggggggataaccatgtgctttccagctagagaggataggagaaatggctggttagagctgcagatctcacttaatcaagatcacacagcccgtttggggatgaggggacttgtctcttgcctcccaggtgagtggtttgtttttatgccataggttatcaaaggacttgaggaaatcaaagcatctttttcagtatatttctctctctcaatttgtatttatgcacaaatgacattctaacaacaataaaggaaatttggaaagagctaagtaaatcgcaaacagtacctccccaaacaccctaaacacatcatctgtattcatttgttcctcttcctgttctctttctgatcggcttgtgtgcatgcatacttttacataattttagtcctagcatacagaccattttgtattctgtttttattatattagaaacactttccaagttgctgcataatcctcataattactactttaacagctgtatcatattccattaagtggatgtcccacaattaatacaagttctctgttgttggacatttagttttctgtactttttctctattatgcgtgttgctacagtgaacagctttttccttcagttgaatattttccttagaataaatctattccttcaaccaacacttattgagtgcttactctgtgtcaagctctgcattatgaactgaggatgcagagattattaagatctagttcttgctctcaaggaacaaataataatatgagaagcaggctgcgggggtggggagggaaagctaggagaagcttatcggagaaaaaaatggtggtgaagcgggttgtaatacagagggcagctaaatctttaggatcttggactttagcctgtgggtagacaatggagagctgttgaaagattttaaggaggacagaatcagtgttgtgctttaaaaagataactcaaactcctccacgtagaatggtttgaaggaaatgtgagtggcttggaggacatgggtcaggtctctgtcaacaatacaagcaagaaactgaaggctgctgagacctagatttgtgactctggggctgaggaggagggggctcaaagactcaaaagacattgcagatggagtattggcaggatctgactgggaaatgatgaatgtgcaggggtgagggacaacgaggtaattaggatgactcccaggtttctggcttggtgactcagtgatgcattcaccggaacaaggaggaggcagaggagtgtgcttgaggagaagatgaggagatgagtctgagacacagggctgagggtgcgggggaacatcagcctggagatatcttatagacccagtcctgagctcaggcgcatgatctgggctggagactcagatgtgggagaagtggtgcatctgtgattaattcaggggagtggttggcagtaacccttagaaagagagcactgtgtcaaagagtctgaatccttttgtagtagcatatgtgtattgccaaaaagcctttctcggaggattcttgcaattttactatactcgtgccagcctggtaatcacctatttttaacttttgctaatgtaattattttaatttacactaaaaaatctcaactaggccgggtgcagtggctcatgactgtaatcccagcactttgggaggccaaggcaggcggatcacttgaggtcaaaagttcgagaccagcctggccaacatggtgaaaccccatctctactaaaaatacaaaaaattagcaaggcgtggtggcatgcacctgtaatcccagctactcgggaggctgaggcaggagaatcgcttgaaccctggaggcagaggttgcagtgagctgagatcgtgccactgcactccaacctgggtgacagagtgaaactccatctcaaaaaaaaaaaaagccactagtgaggttgaatattttgccacatgcttgtttactcattccatttcctcttgtgtgaagtatctctggccatttatctttggggacatgttttttgggtagatttccatgaatgctttataaaatatagacattaatcctttgtcataccaattggttattttctttttggttgtacttttcagtgtacaaactttcaggattttatatagccaaatctgttgatcttttctcttgtaatctcttcttgttccttcaaagcttagaaagctgctatcagttcaaagatctattagatactcaattctatttaataacatatatttaattttttattaacttggggttgataaagataaatagaataaatagaaaaaaattatatttccccccaaatgttagctaaccgacattcttactataatatattgaatgatctttcctctgttgttttgtaaaaaccgctttagcatataataaatgaaatcacagagtacatggttctagttctgtaagtgtgggaatgggagatgagtctttgaagagagaactgagacacacgtccccagcatcctgtcccagattactaaggaggatagacgtgtatgagcagttcatggtagtagtgttggaattacaggcctatgccactacatctagccttaaacttatttttaaaacagctttaccagccaggtgcggtggctcatgccagtaatctcagaactttgggaggctgaggtgggcagatcgcttgagcccaggagtttgaaaccagcctgggcaacatagcaagaccccatgtctacaaataaaaataaacaaaattagccaggcatggtggcccacaccagcagtcccagctactctggaggctgaggtgagaggatcaaaaaacaaaacaaacaaaccaaaacacaagctttactgaaaaatacttgacatacaataaatagtaagtgtttaaagtacacaatttgacaattctgatgcatgtatacacccaaagaaaccatcacaactatgatagtgaacatgtctatcaccaacaaaagtttcctcatgtgcctttgtaatccctcactccagcccctcccatccccactcctattcccaggcaactgctgatctgctttctctgactattgatgagtttgcattttttagatttttaaataatagaaataaatagaaatcaaacagtatgtactcattttggtctagtgtctttcactcagcataattattttgaggctcatctatgttgttgcgtgtatcaatagtttagcttcttctttttattgctgactagtactccattgtatggataaacattaattatttacccatgatagacatgtgggttgtttccagtttggggcaattaccacaatgctgctatgaatgttcacatacgagtatttttatggacaatgttttcatttctctcgggcaaataactaagagtggaatggctaggtcatatggtaggtgcatatttaacttttataaaaattgccaaaatgtttttcaaagtggcttgtgtcatgttacactcccatcagcagtgtatgagaatttcagtcgctccacatccttgtcaacgcatattaaggcccatctttagaaaacatttttattgtgatgaaatatacataacatttttttgaggcctggtgcagtggctcatgcctataattccagcactttgggaggccgaagcaggcagatcatgaggtcaggagttcgagaccaacttgaccaacatggtgaaaccccgtctctactaaaaatacaaacgttagccaggcatggtggtgtgtgcctgtaatcccagttactcaggaggctgaggcaggagaataacttgaacccaggaggtggaggttgcagtgagccaagatcatgccaccgcactccagcctgggagacagagcaagaccccatctcaaataaataaataaataaataaataaataaataaataaataaatttatttgccattttggccattcttacatatacaattccttggcattaagcacattcacaatgctgtgcaatcatcaccactagccagttccagaattttttttattttcccaagcagaaactcagtacccattaaaaaataactccccatttcccatacccttaacccctggtaacctctattcaactttctgtctccatgaatcttctcattctaagtatctcatataggaggaataataaatatttgtccttttgtatctgggttgtttcacttatcagaatatcttcaaggttcatctacattgtagcatgtatcagaatttcatttttatgtctgttaatattccattgtatgcatatgccacattttgtgtatccatgatctgttgatgtacacttgggttgtttccatgttttggctattgtgtataatgctgctatgaatgttggtatacaagtatcaatttgagtttctgctttcaattcttttggatataaacccagaagtggaattgctggatcatatggtaattgtatgcttaagtttttgaggaactgccagactcagtggctgcattatttcacatttcccccagcaatgcacagggttccgaatttctccatgtgctcaccaacacttgttattttccatttttgtttttcataattgccatactaacgggtatgaaatggtattgcattgtggttttggtttgtatttccctaatgaatgatgttgagcatcttttcttgtgtttattggccatttatattatactttctttggagaaatatctattaaagtgctttgcccatctttaagctgtttctttttaattggtgttgttgagttttaggagttctttatatattctggacattaatcccttatcagatatgatatggtttagctctgtgtccccacccaaatctcatcttgaattatactcccgtaattcccatgtgttgtgggagggtctcagtgggagatcatttgaatcatgggggcagattcccccatactgttctcgtggtagtgaatatgtctcacgagatctgatggttttatcaggggtttccgcttttgcatcttcctcatttttcccttgccacccgccatgattctgaggcctccccagccatgtggaactctaagtccaattaaacctctttttcttcccagtctcaggtatgtctttatcagcaatgtgaaaatggactaatacaagatatttgatttgcaaatattttcttccattctgtgggtttttttcctccactctcaagtcctttgatgcacaaaagttttacattttgataacgccccatttatctttttcttttgttgtctgtgaaggtcagtctttggcaatttgaacacatacgtagtactatcttattgtggttatactttgcatttccttcacggctaataatgcttaaaatattttcatgtgcttttttttttttctcctatgtatcttctttggtgaaatatctgttgaaatgatttgcccagttttcaaaactgggctgtttatcttcttcttattgcatttgagagttgtttatatattctgggtgcaaatcctttttttaaaaggctagtcaagtgaagcagtaagagtggagaaggaacaaaggaatctgtaactggttatgatcaattagttgtgaatatcactgcactcggactaccatggaagcaaatcctgtatcatgtgatttgcaagtattttcttcaagtctgtggtggtttgttttcattttttaaagtgtctttttttttttttgagacagagtctcactctgtcacccaggctggagtgcaatggcaccatgtcagctcactgcaacctccacttcccaggttcaactgattcttttgcttcagcctccgaagtagctgggattacaggcgtgcaccaccatacctggctaatttttgtatttttcgtagagatggggtttcaccatgttggccaggctggtcttgaactcctgacctcaggtgatctgcctgcctcagcctcccaaagtgctgggattacaggcatgagccaccgcacccagcctgaagtgtctttcaaagagcagaagtacttaattatgatgaagtccaatttatccatttttttctcatattgattttgcttttggcatggtatgtaagaaatctttgtctaatctaaagtcacagagatctcctataatttcttctggaaatttaataattctagattgtacatttaggtctacaatccatttttgtgttaacttttgtatataatgatgggtgtggatagaggttcattttattatttatggataattgttttagaatcattgttgaaaagacagttcacttctgaccatttaatgatacttccttattataggaaaaattcattttaatcgcataagttggagatgaatatgttcttgtaaaatataaaatcatttttgaccactttcacagccgatcgtgctttctcctgcacgtcctatcaggtaacaactctaacaacatccctatgaagtgaatctttccggatttttttctatgcatggatatatgtatccatatatacaatattgtacattttattttgtttagataggatcaccccatatgtattattctgcaactatgtttttgttacataatagcacctctcagagatctttccttgtcaaaacatagagatctacttaattctgtttagctgtttcgtagtactgtattccatagtaccactatatcttactttgttttaccgtctcctttttaaaaacatttttattttttttgagatggagtcttgttctgtcacctaggctggagtgcagtggcgcgatcttggctcacagcaacctctgcctcctgggttcaagcgattctcctgcctcagcctccccagtagctcctggctaatttttgtgttttagtagagacagggtttcaccatgttgcccaggctggtctcgaactcctgagttcaggcaacccacctgccttggactcccagtgttaggattacaggcgtgagccaccgcacctggccccatctccttattgatggatatctaggttatttcctttttttttttttttttttttttgagacggagtctccctgtcgcccaagctggagtgcagtggcgcgatctcggctcactgcaggctccgccccccggggttcacgccattctcctgcctcagcctcccgagtagctggggctacaggcgcccgctacctcgcccggctaattttttgtatttttagtagagacagggtttcactgtgttagccaggatggtctcgatctcctgaccacgtgatccacccgcctccgcctcccaaagtgctgggattacaggcgtgagccaccgcgcccggcccttttttttctactattataaacaatgctgaacatctctgagtctacttttggtgcacatgtgcaagtgtttctctaggtagatactgaaaagtgagatttatgcagcaaacacatttataacattttaatgctaagtgctgtttttaaatgttttacgtatgttcattcatttaatcttcacagcaacctcatggttttgtccttgaggacagatgaggaaactaaggcgcagagaagcaacttgtcagaggtcacacagctagtcaatagcaaggtcaggatttgaacccagatagacaggctctagagtgaagtttgctgggttatagggcataggcattttaattttttttttttttgagacagcatattgctctgttgcccaggctggagtgcagtggcgtgatctcagatcactgcaacctccacctcccaggttcaagcagttctcgtgcctcagtctcctgagtagttaggattacaggcatgcaccccatgcctggctaatttttgtatttttagtatagaccgggttttgccatgttggccagactgatctcgaactcctgactgcaagtgatccacctgtctctcttcccaaagcgctgggattacaggcgtgagccaccgcgcccggctggcatttttaattttaaaggacctgccaaattgacctctaaagaggctgtaataagttgcactctcacgagcagtgtatgagagtattaatttcccttcaccctctccaacaatttaatcttttaaaatagcattttttgtggttattaataacaatgtgtaatgacactaatatttttgcacttgatcttaaccaaaaggctgagaagtgatacactaatatttttgaactcttactacatcctagctaaagtttctatgctttctctttcatctcactttgctttacttttcctcatactacaatctgctgatatatattaatttctatctttgtttatttcctctcttacccattagaatgtcagctctataagagcaaagattttgggccaggcacgagggctcacatctgtaatccagcactttgggaggctgaggcaggaggattgtttgagttcaggagttcaagaccagccttggcaacatggtgaaacctcatctacactaaaaatacaaaaaattaaccaggcatggcagtgtgtgcctgtagtccctgctacattggaggctgaagtgagaggatcccttgagcctgtgaggttgaggctgcagtgagccatgattgctccagcctgggtgacagagcaagaccctatctcaaaaaaaaaaaaaaaaaaagattttgtttgtcttgttcactgctatcctcggcacctggaactaaatgtttattgactaactgaataaatgaatttgaaaaccattttacacatgaggaaatcaaggctcagagagattaagcaactcacccaaagtcacactagcacatggtggagctgagtttagaagccaatgtagttccagggcttatttgtgctcttaaccatttagtctccagttgatatggtttggctgtgtcaccacccaaatctcaactttaattgtatcttccagaattctcacatgttgtgggagggacccagggggaggtaactgaatcatgggggccagtctttcccgtgctattctcgtgatagtgggtaagtttcaggagatccaatgggtttatcaggggtttctgcttttgcttcttcctcattttctcttgctgctgccatctaagaagtgccttttgccttctgccatgaatctgaggcctcccaagccatgtgtaactgtaagtccaattaaacctctttttcttcccagtcttgggtatgcctttattagcagcgtgaaaacgatctaataggccgggcgcggtggctcacgcctgtaatcccagcactttgggaggccgagacgggcggatcacgaggtcaggagatcgagaccatcctggctaacacggtgaaaccctgtctctactaaaaatacaaagaattagccgggcgtggtggcgggtgcctgtagtcccagctactcaggaggcagaggcaggagaatggcgtgaacccaggaggcagagcttgcagtgacccgagatcacgccactgcacaccagcctgggcaacacagtgagactctgtctcaaaaaaaaaaaaaaaaaaaaaaaaaaggaaccgaactaatacacctgtgatctgttttccactcctataattacgctatttcatgaatgttacataaacaaagtcataaaatatgtctcctttagattttggctggtttttactcaggataatttcctttatgttaattctttttttatcgctgaatagtattccatggtatggctgtaccaccatttgtgtgacccatggaagcatatctgggtggtctccagtttgggactcttaggaataaagatgctaggaacatttgtgtacaggtttttgtgtagacataagtttttatttcactgaggtcagtgtccaagagtgtaatttctggattgtatggtaagtgcatgtttagttttataaataactgccaaattctatgccacagtggctgtaccatttcacattcctactggtaatgtacaggtcatccaatttctctgcatccttgccagcatctggtgttgtcagtactttttattttagccattctgataagtgtgtagtgatatattattgtggttttatctccctaatagctacatggtgttgaacaccttttcatatacttatttgctatctatatatcctcttcagtgaaatgtctgtgcatgtgttttgcccattttctaaatggatttttttttttttttgagacagggtcttgctctgttccccaggctggagtgcagtggcacaattatggctcactgcagtctcaaactcctggactcaatcagtcctcccatctcagctagaactacaggtgtgcaccaccatgcctggctaattatttttatttaaaaaaaaatttgtagagacagagtcttgctatgttgcgcaggctggtcttgagctcctggcctcaagcaatcctcccaccttgacctcccaaagtgctaggattacaggcatttccggccccctcctcctttaaattgcttttgcatctttgtaaaaaatcatttagttatacttatgcgagtctatttctgggatctctattctgttccattgaactatgtctctccttccaccagtatcacatttattgtagctacatagtaagcctgagcatggactagagtgattcctcccactttattcttctctaacaaaattgtcttagccactctagttcctttgcctttccatagaaattttagaataagcttgtgtatgtctacaaagaaccttgctgagagtttcatagaaattgcattaaacctatggatcatttcaggtgttctttgaatttttttcttcggcattttataattttcagcaaacagaccctgaccaggttttatacataagtatacatacatttttagtgatggtgaatggtatcatgtttttattttgttttttatgtgttcattgatagtacaggaatatagaaatgtgattgctttttgtgtgttgatcttgtatcttttgaccttgctgaactcacttattagttctaacagtgtttttgtagattccttgggattttctacatagagcatcatgtctatctgcaaatagagaaagttttctttctgatctgtataacttttatttcctttttttaccttaccgcagcagctgggacttctagtactaggctgaataagaatgatgagagtgtatgttcttatcttgttcccaatcttggaggaaaaacattttgtttttcttcattgagtatgatgctgcctgtggggtttttttgtttgtttgtttgttagtttttggagatggtttttatgagactgaagaaattcccctctattgctggtgtattgagaggtgttttggtttttttttttttttttttttttttttttgagacagagtctcatgttgtcgcccaggctagagtgcagtggtgcaatttcagttcattgcaacctccccctcccaggttcaagtgattctcctgcctcagccacctgagtagcagggattacaggcacccgccaccatgcctggctaatttttatatttttagtagagacggggtttcactatgttggccaggctggtctcaaactctgaacctcaagagatccgcccaccttggcctcccaaagtgctgggattataggcaagagccactgtgactggcctgtattgagagcttttttttttttttttttttttgaggtggagtcttgctccatctggagtgcagtgcgtggctcgatctcagctcaccgcaacctccacctcctggcttcaagtgattctcctgcctctgcctcccgagtagctgggattataggtgtgcatgccaccactcccagctaatttttgtatttttagtagagatggggtttcaccatgttggccagactggtctcaaactcctgacctcaagttatccgcccgcctcagccttccaaagtgctgggattacaggtgtgagccaccacaccccgcctattgagagttttaatcatgatctggtgttgaattttgtcaaatgctttttctgcattaattgatataatcatgtggtttttcttctttagcctgttgatatagtaaattatttccattgagttttgaattttttttgtattttgagacacgggtgttttttgttttttgagacctctggtacccaggctggagtgcaatgatgcaaccacagcttactgcagcctcaaaatcttgggctcaagtgatcctcccgtctcagcctcccaagtagctgggactacaggcaccagaccatcacgcctggctaatttttctgatttgttatagagacgaggtctcaccatgttgcccaggctggtcttgaactcctggcctcaagtgatcttctggccttagcctcctaaaatgctgggattacaggcatgagctaccatgcctggcctcgttttgaatgttgaaccaaccctgcatatctagaataaaccccacttggtcatggtacattattctttttatatattgttggattggatttgatcaaattttgtttagaatttttgcatctaaattcaggagagagagtggtctgtagttatattgttttgtatgttgtttttgtctggttttgatatcaggataatacttgggaagcattccctcttcttttgtgtaaaattggtcctaatccttcttagaatatttcataaaattccccagtgaaaaaattttggcctagagatttcttttctgaaagctctttaattatacaaatccaatttatttaatggttgtagaattattcagattatctatttcatctcggtagagttttgggttttgaagaattgattcatttcttttaagttgttgaatttattagcacaggagtgtttgtggtatttccttatgattcctttaatagctgtaggatctgtagtgatagcctctctttcatttctgatgttggtaatttgtgttttctctttttatttctgtcagtcttgctagaagtttgtcagttttattgactttttttctgaagaaccagctttttgcttcattgattttctttactgttttcctgctttcaatttcatttatttctgctcttatctttattgtttcccccttttctagttggttttggtttattttgcactttttttcttgttttttttacgtaagaatttagattattgactggacttttctggtttttgttttctttttgttttttgtagagatggggtctctttatgctgcctaagcttgtctcaaactcctgggatcaagtgatcctcctgtctttgagtcccaaagtgctgggattacaggggtgagccattgctcctggtcccttttctgttttcgaaatgtaagcatttggtgctataaacttctctgctttacctgcattccacaagttttgatatgtcgtattttcattgtcattcagttcaatatattttttagaaatttcctttgagacttcctttttgacccatggattatttagaaatatgctgttcagttttcaagttttaaaagacttttttgttatctttgttattgatttctagcttgattccattatagccagagaatacattctgtatgatttcacttcttttaaatgtattaaggtttgtttctgaacccgcatatgatccatcttggtcagtgctccatgaatacttggaaagaacgtgtattttctgttgctggataaagtattctataaatgtcaattagatcctcttggttgatggttttgttgagttcttctatatccttgctgaatttgtctagtcattttaccaattgctgagagagggagttgagccctccaactctaactggggatctatctattttgttgttcagctctcttggttttcgcttcatgtattttgaagctctgttgtttgacgcaaacacttaggattgctacgtctttttggtggattgatcctttaaacacgtctcttttgtccttagtaactttctttgctctgaagtctattttatctgatattaatataatcatttttgctttttaaaattaatgtttgtatgatatatcatttttccatccttgtgctttcaacctacctatgttggcatgtttgaagtgagttttctgtagacagcgtatagttgagttgtgctttttagacttttttctttttttttttcagagatggtgtctcgctatgttgcctaggctaggcttgaactcctccttcctcagctggaattacagatgcgcacgaccacacccagctgggtcgggctttttttttttttgggagacactctcactttgccacccaggctggagtgcagtggtgcggtcttggctcactgcaacctcagccttctgggttcaagtgattctcccgcctcagccacccgagtagctgggattacaggtgtgtgcaaccatgcccagataatttttgtatttttagtagagatggggttttgccatgttgggcaggctggtctcaaactcctggcctcatgtgatccacccccgtcgacctcccaaagtgctgagattacaggtgtgagccaccatgcccggccagggttgtgctcttttaaattcactctgcaccaggtgcggtggctcatgcctataatcccagcactttgggaggctgaggtgggtggatcacctgaggtcaggggttcaagacaagcctgaccaatacggggaaaccccgtctctactaaaaatacaaaaaattagccggtcgtggtggcgggcgcctgtagtcccagctactccggaggctgaggcaggagaatggcatgaacccgggaggcggagcttgcagtgagccgagatcgcgccactgcactccagcctgggtgacagagcgagactccgtctcaaaacaaaaaacaaagaacaaaaattagccgggcatgatggcatgtacctgtagtcccagctactagggaggctgagacaggagaattgcttgaacccgggaggcagaggttgcagtgagccgagatcatgccactgcactccagcctgggcgacagagtgtgattccaactcaaaaaaaaaaaaaaaaatgcactctgcttatctctttcttttaattggtatatttagtccattaacattgaaggtaatttttattatgtcagggattcagtctgccattttatattatttgttttttgtttgttctttttttcattctgcttatttttgcttgccttcctgtaatatattttagaatttcatttggatttatttatactgattctgaatatattacttcgtatagttttcctagtggttgctataggtattaccatatatatatatgtgtgtgtacatatatatgtacacacacacacacataatttatcatagccaagtggtgttcaaatgagttcagattgagtaaattctattgatctgtcttcaagtttacagaatctgtcctctgtcatctccactctattattgagtccatccagtgagttttaaaatttcagttatttttttcattccattattccttttagtttttttttttttttttttttttttgagagagagagggtctcactctgtcgcccaggctggagtgcagtggggtgatatcggttcattgcaacctccacctcctggactcctcccacctcagcctcctgagtagctgggaccacaggcatgcaccaccatgtttggctaatttttgtattaattttgtatataaattttatagagttgcattttgtatttctttgtagttgcattttgtattaatttttgtagctgcattttgtattaatttttgtagctgcattttgtattaattttgtatataaatttaattaattttgtatataaatgttgtagagttgcattttgtatttttttgtagagacagggcttcaccatgttgtccaggctgagttctattttaaagtatctatttctttgctgagattttcaatttttcatttatttcaaatgaatttgtaattgattgttgagaagcttaaaggcccttgtcagataattccagcatttgattcatcttgatgttggtatcagttgactgtcttttctcattcaaactgtggttttgctggctcttgttatgatgagtgattttcgattagtatcctgaacattttggtattagcaggtagttaccctacttagcatgtaggttctggtctactttagtgggccagtgacagtttagtcattggccaatgacagtttagttttctgagcccatgcaatgttactttggtcggcttgatttttctgctattcctggggtttctgctcaatccttgctggttctgtctacaggggcagaaggtccttccttctttgagctgcatatttttggtgggtgatcttccaggggagagagttgctgaagccactgtgtgtgagtctccttatgccattgggtggagggaaaggagacacagggctttgttcctgctacctatgcaggcaaattgggttgcctgctggtaccccagttctggagggagccactgagacagcccaggactttgcttgctgctacaagtagattggaccactttctgggggctttagttgtggagcagggcttagatctccccactaggtgtgtgtctggcttcatctttccccgtcctttgtgtgtgcatgcgtgcatgcttgcacgtgtgtgtgcgtgcgtgcatgtgtgtgtgtgtgtatgactgttggttttaggttgcatgcctctttggcacccagtctaggagtatacaggagataaaaagaaaactgaggaagctcaccatgtcctgaagttcctgacctgtctgtcttctttcctgctttcagtgtccttttatcattgcttattgaataatttctagggtatagagttgcatttgaaggagaggagcagtcattttgttccagaatcagaagcccctagtgtagttttaaattacatttcttgtagtgtgagtgaggttgagcatcttttgataagtttttaaaccattttaatttctttttctctatttcattttctgtgaactgttaatatcatttgcctattttcacattgggctgggggtctttgatgtattgatttgtaagagttgttttcgtattcactaggaattgcagatattttctctttttatctcagtttatcttttgactttgactttgactttgtttatggtatgatttttgctttgcaggtttttttgtttgtttgtttatttgtttttttgagacaaagtctcactctgttgcccaggctggagtgcagtggcatggtcatgactcactgcagcctcaacttcctaggtccaagtgatcctcttgcctcagcctcccaagtagttggcaccacaggtgtgcgccaccatgcccagcaaattttaaattttttgtagagacaggatctccctatgttgcttaggttggccttgaactcccaggctcaagcaatcctttcaccttggcctcccaaagtgttgggattacagttgtaagccaccatgcctggcctatttttttaaatgcagttaaatatatcagcctcttccatagcttctgggttttgtgtcattcttagaatggcctccctatttcaaaattttatttttaaaaatctcctttttggtcttctactactttcatgattttaatttttatttttaaatctttggcttatctggaattcattttggtgtaagtttgggttagtgtatccagttgtcccaaagcgtttattgagtaatccattatttcctcactgctttggaatgctaattcttgtttttttttttatttttaattgtggttaaaaccacaacataaaatttaccatcttaaccatttttatgtgtacaatttagtagtgttaagtatattcacattgctgtgcaacagatttctagaactctttcatcttgcagaactgaaactctatacccattaaacaacaactctccattgaaatgttaccattttatcataaactaatttcccatcttctttattcttcctggaccactgtcacagctttctagaatcaccataattccaatttgtcatgcacaccattgcccgattaattttcctcatgcaagctctgacctcaactcttcttcatttaaaaccttcagaggccctctctgacactgcaattgagattaaacccccatgataccctttcattgtgccctgtaccttttcttcctatcacttctcatgatttgtaattttaattatctgcatgatcacttgactactggctatctccttgctaaacttgaagtttcatgagagcaaggacaatgtgcttaccacatattcccagtgcttagcattgttcctggcacaaagtaggtgctcagtccttatttgtggaatgagagattgtcccttacctgtggaataaagtattaacaactgcaggatctgattttaccctacctcctctcggtcctctgctctttgaggaagtcaagctgtgggacttccttgacagaggcttgggttttctaacattttgttctggtttacatcatgccctgattttatctttgtatttgtgctccaattgccccctcatcctggaggccatgccatccactcaagcccccaccagcattgctgcttgatggaaatacagttcatctttcaaggctatggctatctccaccactgagctatgagttcctggaatgcaggaacggggttctctctagtttgtccctagggagcagcactgctcctgggctctaggaggtgctcttggctacacatttgttctgagcagcaagctccttgcgggtagatagtgttctttacttgtgtacatctgggtaccttgcctcctagcccccagggcctattccaggccaggacttggagttggcttcaggaatcttctagtaacctaatgaatgactgcgtctggtgtgaatatgacctctatggcaaggactgagacttgcctgcctttcttccactgtgccttgtgggttcccttactccctctccttctctagcaataaagttactgacccatgccctccacatctgcccctgtgcagggccttgactctcccttcaggatgtcccatgtcttctccctccaagctctctggagaggaggctgctccgttggccacatttctggccactggcaccaggaggcagggttgccatgccaaagttcctgctctccctccccattcagaagcaccttctctaggtttgatgggtaattttgtatgtcaatttgactgggctaaggacattgattgctgatcaaacatttctgtgtgtgtctgagagggtgtttctagaagagatgagcatgtgaatgggtagactgaggacagaagatcaccctcagcaatgtgggtaggcatcatctgatctgttgagggcccaagtagaacaaaaagacagaataagggtgaatttctttctgtctaagctgggacatcattttctcctgtcgttggacctctgtgctcctgtttctcaagccttcagactcagaccaaggcttacaccattactatcctccaccttttcaggccttcagactccgatgaattacaccactggcttgcctggttctccagcttgcagacagaagactgtgggacttctcagcctctataatcttgtgagccaacatatgtatatctgtatatctctatcctatttgttctgtttctctgtagactctggttaatatactagagatgctcaggccattccccaccatcatctgcctcccagccacactcctgtcactcccatgattccaaagcagcccatccccctcctgaaggcactggcccctggctcaagcttctctccaccccaagggctactgccatcctgggggtcccagagcttatactcatagagattaggggtggcaagctggggatcaggcgctgaatgcagcctcctgacctgtttagtttggccagaagtgcgttttttgaaggccccagcaggggagggaccctgggatcctctagcctttcagagttcggctccatccacatcctgtcattctgctttagctgccatgcctgtgtccacactgcccttgtgttgctaggagctgtgcagattctgagaccctccttcacctcccttcctagctcccccaatcttgcccatgtgcaatagatagatagggccgaagaaggatcctatgacctgggaagtcaggtccctccttcctctcccttcctagctcccccaatccagttcctgtgttctcctcagagacccaaggccctcaagcctgctctgctctccccaccttcttccagccttcgtttcttccttttccgttttcctacccttgcctcatcagccccctcaaaaccccatgtctccctgttcccagccttagatgaatctaaccatctacctttattgaaatcatcttaaaaacaagatgttaaaagttggttaattatttgctttcctacaaacctccagagattcttccagagccacaggactggtggcactaaggcgaaggcttgtttccagaaggccctatggactctgccttttgtgaacttctccaacctcatctcctcccgtcccctctgccagccctgtgacatagcctgcatgctgaactcctggttttcagccactgtcacccctctcatgcacctgtgcctgtttaacagctgttcccctcactcattcttcccttggctgattcaagtcttatttcgaaagccaaaactttcttctggtggatctacctttatgtaaggacagagagcaaggccagcaaggatgcaccacaaacagataaacagttgctacctccgtggagaaccagaggcaatcaggattgagggggagatttggtcaaagggtactttagccttatctgcaaagcttctactttttacaaggagattggataatggatttattgcttgtgaaatatgaaaacaaataaagcagttcaatacaaggagccttccccagacttcccaggcagatggagctgtttccttttctgggattgaatagcaccttccccctctgttctaggaaatgctgttttattataatttgtttgtgcctgtctttctccttctgagatgaggaactccctcaaaggtaaacttcatctaattcatgctcccagtgtctagcaaagtgcctggcccagagcaggtgctcagggagtgctgaatccaatcaacgcccctgctagcacactcttttgaaagtgcttgctagggggcaggcctgatgctagtcctgagaggctgattagagtcgttttcagcattcaaggaagaaggctgtctgggagtccgaaacatggacagagtgtccaggacattgggttgtatcaacatgaggacaaggctttatcagtgtatcacaaggccaggatccagtgcagtgccactgccttgccacttggcatgcttctgaagccactgcttcctcagcagttaattgaaaggcaagggatagatcgccaaatgttgaacttgtcaagcctagttctgatctgtatctctaagatggagaggccagctcaaacagggtgggtcaggaaggtaggagttagggacactcaagaccagctcagagtgtcccaggctgggaggactgagcagctatgtgaggaacctggagaaggcacctcaaaccccagtttaatgatgggagtctcttgcttttgcaattttccagagaaatctgagctcccaggtcacaggatccttcttcagccctatctatctattgcacatgggcaagagggcaaaggaaaggccttaatgggtcagttggattggggctagagagtgggtgggggtggcttttacagttggtgaagtgtgtgccacgtggccaggaatgtgcctttagacttggatgtgcatgtagcaaggaggctgcacaaaggtctgatcagtctctcttccaagaaagcccccaaccagcccctgtatgccatggtgttcctggagtcttagggcaatgagaccaggtactcctgaggagatagccacagtggtgctggcagcaggaattcagtgaacagcccccttcaccctcccttctccttccatcccatccagctccttcccagctagccactcacaaccccgccatgggcctcagaattgctaaagggacatcagaccatactacacatcattagatctcaatgaagaacacctctagttggcccgtctctttgtaagtaactttatttttatttacaacagaattggtggctttattcctccatctttagggacacttggcattagcagctagatggaaagtccgcagtgaagtcaaactcattctgccccagccacagctccggaagctcattggctcggtccaaccccagttccaccaccagcgacatcagcacttcctcatccactgggtccgaatcgatgatagcagggctctgggcaccagcagaaggagagagtgattctgcccctcccgcctgggccccaaagtcccagttttgcaggggtcctgcctccccgggttggcctggagtggcagcagccatcccctgatactggctattaagtttctgcaggtgcatactagccagcaagtgaggggcggggtgcaggttgaaggatgggggtttagtgggaggggtggttgtaggagagcctattggagatcccgaggaactagtgggagccccactggccttggttccatttgaggctaccccagggtagtgcagaatggccactgctttgcgatctttcaccgcaaggttggagtaggccacggagctcatctcttggttggcatcctagaagacagagaaaagcacaccatagtaaccctgctcctggcttgtccttcaccattcagcagatttagaaggttcctacctgcacttcatttgggactagaggtggagaggtagcaagacgacccccttgaaaattaggctcccacctcaagcatccttttgctgccatggctctgagcactgaggccagagcccagttacagtgctggagcacctgccatcctaagtgggttcactgctttcagctccttccccatagcctccacctcaccatcctaaaaagggcacctcctgtccctcttctcagcctcactttagtctcttcaacagagtggttttgctcctactcaatttctctgctcccttccctgccatctttcaacacccctagtgggttcaatctgaccacaatttaggcagaagctgttctcattctccccagagatagtcctgttgtctcctctctgctcaaggacactgggtaatgcacctaggagggcctggcccatgaccccggaaaatttgtctttccctgcctcatctgtaaaatggcaaaaattacctccttcgcaggtgaggtgccacccttgacatcaagtgcaggcctcgacgttgttggcatttcagagccttggcagaagttggataaattggcgggaagtgatgctgccagctggagctgttgtgctgcaagtgaggaagaagcagtggtaagggcaaaaggcttcactgaccaacaaagcactagcaaagcccaaagcagggcaatgccacgcagctatgaggcaaggatggtgactgagttagaatcaagaccagagatcacccgagcacagggaggagatcaagctggaacttttgcctgaggcaggaaaggtgcttgattcggccaggtactgcccaggcagccacctacccatatcaccaagatgggacatactgcttcctcatgcaagtgacttcacagtcccaaggtgtatgtgtgggggtgagggtggcactgttcctggttcagaggacaggaatgtccctgagtaagcaacatattgtctcaatgggctactagcatccaggctggagagttggggcctccactgggactgggagaatgtgagaagaagtcagggcaaggaagacctagaaagctagaggctgcagcacagggaaataacaagtctctagcgcaaatgtcatggagctccaaagcatgaccttgggcatgcctgtgagaagccaggctgattagggtggtctgggggctctgaggcagctggagccagagaagctaggaatgtgtcactttcctccatgtctcaagccccctccaagacagccccagcattgggctttcctaggatgcctaccccagaaacctgagtccagccattcccatctatagtgacaagtgaggcacagagattcaatgcctttttagtcaggtagcagcggttctgggagcagaatctagcacccctatggccacatgcctcacctgaccactggctaagtcatcatacctagctggattcaaaaggcttccaaagaagtgatttcctggctcaagtgccaaaggataagggaatgaaggcaaaagaatacctccaaaccagaaaataaacaaacctctgaaaatctcaacttattttcctggaggcctgtttacaaagaagaaaaaaatgtcccatagctaggcacagtagcaccctcctgtagtctcagctactcaggaagctgaggtgggaggatcacctgagccctggagtttgataccaggctgggcaacatagcgggaccctatctctttaaaaaaaaaaagccccatatattctagctttcatgatcaattagagatgtagaatttcatatttataaatacctcttggtccaaagaatcttgaggaccttaaaaagagtctctaatctttccaaggaggctagaattctccgtgacactctccactccgcagcggtcattaagaatctgctcagacacttctagaaagtggccacttactacctctctgtatcatctttgcattgcttacttgggtggatgggggtaggggagggaaaaaatagagaaaggggtaaacatttttttaaaaacatgaggaaaaaatatcagctgttgggtcccgcatcattgcttgattgaagccctgctccttctctgaggcaaccgtagaaaaatatttcaaaagcaagtgatcaccagacaagaagtctaacacatgtcgtcttcaagagccctagcacaatcagtatcagacaattttcctgtcctaagaaaaatgtctgggggccctgtccatcttttcctgttcctatccagccttccctctcctttttgccgcttggtacccgaatgtacaaaacgaagaaaaaacaacaggagcagcagcaacaacagcaaaaccaaaagagaaacattagaaaaatcaaaagagagaacgagcaaaaaaactctctctattctgatatcagttcgtgggggaagaccattttaccgcgcctccctcttcaatctgggagctcccccagaagaggccctgtgtccattcagatcttctgccttccattactgacccaccacccaccctgaccccagcctgggtctgcgctcaataggcgctcagtaagtgttgttgaatgcgtctgaagaagcaatcgcatttccatcggcatccctggctctgcttccccggctttctgccctcctccaccaccctctagcccgttcgtgggcaaaacttggcaacgcggaaacgtcccagcccgctctccaagccgcgagctgaccactgcgaaacggctgcgacaggcggctgggaaacctagagcaacaagtgccttctcgccggctgatgcctggcggccccccggccaccagttcccagtcccgctgcccgctcttcgcttcaggccttcccttgggcgagcagccccctcccgcctagacaggggtgggaaggggagagggaaaagagaagggagaggcaggtgggggcctcatctttaacctgttgggggaccaaaagttaaaatggcaccaaccggatggttccatctcgattgctattttctcactcagaaggagaaatttaaaaatccaaacagcactgcggcttggcttggacgcgctctaaccagaccagtcagtttcgccacctgaaaactaaaggcccgttgtttgcggacagctcggctgccctcctcgccgcatcccagatggagccgcggaaccgggggcggccgggagcatcccttgcacggcgggcgcgtgcacccaggccaccggggccctgagcgtccgttcccgcaagtgctgtatcaggaactgatcttagagacaggatggacaggcaggaaggggcacggggtgtcggcctccgcggcgagtccgcactccggcgccggctgctgccactctcgcgcctgatcaacacttactgagcgcccgctgagcatccgacgcggcagcaggctgagcctaccccctagccaagccgcctgcggtcagtgctaaaaccccgctaggagaagagtgagagaggctcggagaggtgcggtaacttgcccaaggtcacagcgctagaaagtggcggagccgggattcgcagccaggtctctctgactccaagtccggtgctctgcgaagcagggactcggcgcgcggctcgccagcccgcgtttatagggagaggggtgtgcgcgtgggtgtgtgtgtgtgggcgtgtgtcgggggaggggagggctgaggtcgactgggcagtagaggcaagttgcccaaattcgctaacttccatcccgcaattccgctgaactcggcccgaaaagccccctcttgcctcaattccccgaagtaaatctgagctttgtgcagctccggagccagagcgtccagatgcggtccgggagattagcaaagtcggtggaagccaagctggagaaagcgcgggcgcagggagaaaaggtgctgccgtctccccgggagaagcgggcacccggccccgctggccggcaggggggcgcgctggcaagcgaacccgagcgctggcgggcgggcgggcgggcggcccctcgcccccagcagagcagctttccaacagaaagcaagtctccccagaaccctccggcccgcctggcggccgcccactccccatacccgctccacgggagtcctcggccccgccgcccagcccggcgcccagcccggcggcccggcttacctctgagaagccgcctgccctggagagagggaagcgcggagctcggtgagccgcaagagaggcggcggagcccccagcccctggcacgcacgccgccgccaccgctaccgcgaaccggtcgcgctcagcgcccgcggccgcgccgttggccacccgaccccggggcgcctgggaaaagcccgcaccgcgccgcgccgccgctgcaccgcacagtgccgcgccaagcagcccctgaccgagctggtgcccgcccgcccgcccgcagcttcggcgccggactccggggcggtggcggtggcggccaccgcgctcccttcccggcgctggggacccggctctcaagcccccattgccgcccggagagccctgacgcacacgcacacggcagcagactggcctcggctaggaatcccaggaaggacagaccctttttttccctttttttttctcccctcaatttccacgtctttataaccggcttagggcattattagcacatgtcctggctcgtgggcgagttggtggcaaaatctgaactggatactcacggagggcccgcgcgggtgctgtgccgtccgctgctctcttcctcctcaccgagaactgcccctcgccggcggactacaagagggcagccgggcagagcgagcttcctctcggcagctcagcggtgccccttctgcagctttgccgccgggcacatttttatagcagcggctggcgtctgtggccctttaaaggcgctcgagctggtgcagtcaccgcggatcgtgtgaaagcaaagggccggctggggaacggagtccacgcggccacgcgagtccggcagccctgtggaccggccaaggctcccggggtggggctggcgagtccgggctatgggcagccctcgcccggagccctggccagtgcccggcttctaaagctgtcgggggccagggcccgggacaccggctctccccaccgccctgcgtggacttgcccaataaattccacttagtaatttcactgaggcaaaggagagccgttagtgtctgttttctgacctaaatctagtcgggggccaaaacgggcttcaggggttttgggagagagctgtgggctcaaggagtgacctggaagagcggggcgcacacgagacgggggaatggtcattagttttctgcagggctgtcttggagcctgtctgccttttgggggggctgtactatctcattcgttgaagagctgaggctgggggctccttttcctcttaaagtcgccagattctgggcagagtcgcatggggggcctatatggcagcggtggctcttctagaagttctgagctggggttgggttcgagggtttctgttctgtggtcatccagggcaggaggctggcaggatgcgacccggagaaatgctactctcccggaccgtggggccaggtacagctcactaggctcgccgaaaagccaacagtaggcaacggggtacgaagagcttgccccagggttcgcggagattcctcctgccttcccacgatgtcaggttgttttattgtaactacataatcattcccgtctagcaagaataacgttttgcatttggagttcgtctttcttaggtagagatgttgtcttacaaatccttactggaaagaggtctgggtcttctccttcacctcaattcggattctttgtggccaagaaattcccaccttaccacttacagggaggccatcgggattacccctctgtcacccccccaccccgccccggccccgccgctctttttttgctgcctttcagcaacagcgactcagtttacactgtttataaaacatactctttaagaaaaggtcctgatgttaaaaaagggggggagggaatgtcacgaagtcattttcactatgtatgtgttctgtcttcttaattggatttgaagacctgaagttctctttttcttttctttttctttttttagtagccccaagtgccctgcatttgctcttctaacaaagttctgtttgttgacggactgaccggcttaccgacacaaagatgggaagcaaatggagagacggatcaaggcccttcctcggcatctggaggaagcttgggcgagtgtcttggtcgccaggtaaacccattctccagccctcaaggctgccttgcacagctccagtcttttcacttaccctgtcccaacacaaaccccggtagcatccacaccccacacatcttcgctgcactttctcactttgcttgccagattgtgggccctgcctagtctccctctgataaaaggcgggatctgtcggcaccctaaagccttactgcaaaccgcgtgtgaaatacactctcaagttctcttggtgtttgcctgggatgaaaaaaaatgtttctgcgaaaactaagtggtggagaatgagcgactctaggctttcgaattgcatgttactaatttgaacccctgacccaccctccccgtcagccccggcttggctcgggagcaggtctggcaacagcggcagcttctccgctgcaggctccggatccgggaggtgtggatccgccctccatctattggatggctcccaggccaattgttagaaagaggcatatgttcatctcggcttctggagtgtctccggagcagttgctcaacagccagccccctcccccatccggaccattgaagggcagaaaaaggagcgccctccaccacatttctctgtgcccacatgccagaaagggtctcccccctggtgacttcctgtcatctccactgcttacctcctggggagcaggaacgagaggggcttcaagcactcagctttgaagcacaaaagccacccctttcctttttggggagatgggagaggaggttagttgcagaggctgagagggagcaaaggagacatttgcatttctcggcaaaaatgctctgatcactgacttccccgttggctccagcagagctcagagctctccgctgaactcttatctccaacttggcaactagaccgcgagcttgcgaagcaaggagaggacagggatggtcacctaccgagaacctctgtgctccagcgctgggcctggcatgttccccatccatcatctcatttaattcccaggacagccctttgaggtagggtttaccaaaggtgaatgaaacagagcctcgggaaattgcccaagttcacatagccacgtggctgagtgtttgaatctggatcaggctgtctgcaaagtttttaccctcagccctaatccccgctgcctaggagggtaaggaggctgtctagagtgcaggttcaggggtcagtaggcctgggtttaaattcctactttgccatttgttagcggtgaagtcttaggccaatggcttcatgctttggtcttcaattttcccatctgttaaatggggataacaatggtacctaatctgtgggggttgcttagcctgattggtgcccgcagtgtagtaaatggccaataaatgctgttatcgtactggaccttctgattattttccttttgcctcccgtccctgcctcagctcacacacttcagattcagtaatacttgctgaatgattaattttaaaaccagactgagaggggatgaaggaggtctataaactcagggaggagagagagagagaaaaatgcagatttcttcttaaaatcccaccctccagaaccaaggactgcctgagccatatgacaggagtaaatttgggaccaaaaaaaggtgaccactttttacaggtcagcctataaacttacagagtggtctccagaaacatatactcaatacgtgtgtagaaaaaactttaaaagcacaagtttttattcaagaatatttacagcagaattgttgataatagtggaaaatgaaaaggaacctaaatgtctatggtaagggtgtgtcccttggtaccttgacacacacacacacacacacacacacacacacacaatcctgactttgaaaactcttattcataggaaaatattcataacaaaatatgaaataaaaaatgctgggtacaaagttgcataaatatgatgccaagctgcaaagggcacaaagggaacaaaattaaatactcactatgtttccaatcatgtatgaatatgtacagaaagcgacagtctggaaaataccaaaatgataacagtgccagtagagtggtaggattatgagtgattttcttctcttttccccatattatgcaatattattcttataagtaaatatgagtttatagttaataaactccataaatattatgttcccacttttgttaaaatatatgtgcatagaaaaaatatccataatctcactactcaattataatcactgttaacaccaaaaattgttaacggtgattataattgagtagtgggattatggataatatttttattttgcttttctttttctgcagtatgattatattactttcttacaattaaaacagattcataatttgaaaagtacataatcagagggatcccacttgggttaagagtatgaatgtaaattgaaaaaaatgagaaggaagaatactaaaatattaagagttttatattaggtggtaaggaattatgggtaatttcctctctattttctgtaatctgcttttattatttttacaattaaaataaaatgtacctaaaaataacatatacaatatgatcccacttttgttaaaaacgaatatgtatatagaaaaaaataataaactactccaaaatgtagtagtctctgggtggtgagtttattagtgatttttgttttctctttcatacatgatttcttcatatgccaaattttctacagtcatcatgtattaatttttttaaaaagtgtaaagtacttcggtaatgaagtttttatggaaaaaagagcatgtctgggatttgctttaaaacattccagttgagggtggggggaaagtggacaggggatatagattaaataagatgataattgttgaagatggcttcattataatgtgtttttgtttatttgtttgtttgttttgagacagggtctcactctggcacccaggctggagtgtagaggcgcgatcttggctcactgccacctccacctcctgggctcaaacaattctcccaccttagcctccagagtagctgggactacatgcgcgtgccaccatgcccagctaattgtttgtgtttttgcattttttgtatttttttttgtagagatggggtttcatgatgttgcccagttcttgaactcctgagctccagtgatcagtctgcctcggctgcccaaagtgctgcgattacaagtgtgagccaccgcgctggcctataatgtgttctttactcatgtatatgttttttaatttccataataaattttttacaactatttttcatatacattatctcttttaatcttatgctacccctgtggggtcagttatctccattttatagaaaattgagattcaaagaggtgaagtcactggacctgtaacacaactgggaggcgagactgggtctccatactccagttccaattccaagagcccagggctcttctacatatcccagttgctgctgctctttaaaataactaaaaataattaacactttgtctgaccataaatgtaattgttcactgcacagaatttgcaggtaacagaaaagcactaggaggaaaacataataatcaacccaactgcatcctagttaaccctctggtgtctggcggtgcaaacttcatctcagttgcctcttactccagaggtattgtgtgctgcaaattctcagtaagagtggctagtctttcctgatgggccaccgagtgaagctgcaactctttggggcccctgtcacgtgtgggttcccgggagatggtgggtcctaactgcccccccgaccccccttatttcccagtgtcccctttagatacttcagccaggaccacggttttaggggaagtcctggtggcccttttcctcttgctccatgtggagactctgcccagaagcccccttaggatcctgtgagtttgcaaccactgtgaatatgcctgtgcctccatttccccatctggaagatgctagtgagaatagcagatgggtcagcctctgccagggagtgatgagctaacgtctgtagtgctttccagcccctcggagcaaggtgctggatccttcccggctctgcgcctgcccctgccagcctgagtgagcgcctgggcggctctgcgcctgcccctgccagcctgagtgagcgcctgggcctggccgctctgcgtggagggagtggccgcattcctctgacccaggccaacaggcttggacaggcactcacttttgcttctgtgtttaaaaaaaaagggaagaagaagaaaagaagagaagagaagatgaattgaagaagaaggggaacaagatcagttactaggggaatgggcctggagaaatagaaaattgagaagagagcagagcgatcacagggcatccttgggcaccccaatcagcttcgtagattctagccctggtttcctgtttacacatggggtgggggaagtttggaaagggccaagaattgggtctagttgaattgattccctacttgatttcctgttatttatgcataatgggaaaaccgcaaatatacaaacagctcaggccacccggcctcttgaatccttaggggccatcttcacagctctgtccaccccagacttcagagatgtcattccagtgtatgtcccttctctgtgcccccttctggcattcaacttcataagaaccctagccagtcaacgctatcatccccattttaggaagaagggcatcgaggcacagagaggggaaacaagcctaagatgacacaaagggttaagtggcagagctgggattcacagccgggtctggctcactcctgaggccaaacaccccccgctaggctaccttgttatcggtgtccccctgttattggtgtctatgcttttctttcttctagaatggatggttcaccacactcattgcagtaaatagtcaacgcgtatggccagaatggatgcgtggcccagatctagggagaactcttgagggaggagtccagttaggggctggggcagcaatctccagggatgaggtgcaggtgggagagggcagcagcaaagatgactctgaaaactttacccagggagaagcccagggttcaaaggcagggagggagagaggtgctggtgtagaggagaaagagaagcagcaagcaggcctggccctgggctgttcgggtgtcagcagtgaggctggaggccttgggaaggtgtgaggctttgtgggggaagagaaactctgctttaagcatgtttagtttaagctgttggcagaacatccaagtggaaatagctcacacacagccaggaatataggactggaaagaaagtgaggttgtgtcaaaaagagcaatcggcaggatgactttcggccaaactgtggggaactttcccctgcttctctccatggcacagagaggggctttctcctcaaggggcctgggggacactggcttttcactgcagccatccctctcccctctccagcccctccagctcagcacaatcatggacacgtgcttcaaatctctaaagggcagtgtgagaggatctcagtccataaatttccccatgccagggagtgataggggcctcatctcacgttgctaaatacatttggctaggcctcaagcatgccaggccttccctggtttcacgttagcttctagaacacaggcctttggggtcttgtttgctctccttttttggccacatgccattgtcaggtcagcacagtgtctcccagcttactttgtccttaagaaggtgaggccacttcagtctggccctgctccctgcaacagcaggctgaaactgctcccttggcctaagacctgagagattttgcaaccctttgccctgagtctcatctccacgctacggggatttccctggactcccctttcttggggcccagccctcctagtctcccaatcccatctcagctgaggcctcacacttccattcatccatggatcccactttgcccttagtaagagtctccactggcatggagaagtctcccagcttggaccactggcccctattgcctctcttggcccttaactttggggctgggaggctggcctgggcaaacatggctgagtgaacatggttaggagtcatttcacatgcacaaactgggggactggaaagatttccacagatccccacagccacagagacttgtccccctgtgttccccgcaaaggcctgtgctctagaagctaaagtgaaaccaggaaggcctggcatgcttgaggacaagatcagtgctgaagatggattgaggatctggggtatctcagggggtcaaggtgcagactgccgccaggcaagcagagaggaccacaggcctggttatacaaggtaaaactttcctgcctagatgcagggagagtgcctcagctagcacatacagtctgcttgtactaattacaaaaaggcacctcctctgggaggagcaattagaaccaggtgctgcttcctctgggctttgcacaaccctcacccctgggcccacggctttgcaagaggaacacaagctgaatttcagggcacaacctgcacagactttgaggccttgtaaagagatgagtctgggtcaccacatggcttgcttaggttcctgcagtggcccggcacccctgaatataccacctcaagggagaattcttcctactagctctaaataataacatcagtgggaatggtcactgaacacttattaggagacagatcctctctgttcctagtgctctgtgcttattctctcattaaatcccccaataaccttaggtgttaggtcagtactattattacctcttccgtattttgctgatagggaaattgaggcacagagatattaggcagcttgacaaggttatacactttgtatgttttgggccgagaatcttaaccaggctgactggccccagagcctctgctggtgaccactgggcctcactgtcccctaagtaacgcccgttgccagtagggacctgccccttgtagttcataaagacctttcccatccatgagtaaagtcaattctcacacagcttcctcactccttggaatgttgtcactgttactatcaggtcttccctgatgacttttttttttttttgtggagacagagtctcgctctgtcgcccaggctggagtgcagtggcaccatctcggctcactgcaactccgcctcctgggttcaagcaattctcctgctccgcctcccgagtagctgggatcacaggtgcgcaccaccaatacccggctaattttttatatttttagtagagatggagtttcaccatgttagcctgactggtcttgaactcctgacctcaagtgatccgcccacctcggcctcccaaagtgctgggatgacaggcatgagccaccgcgcccagctactgatcacatcttacagatgaagggaggaggcttggagaggtgagatggccttgctgaggtcagacagccagcaagtgaggatgctaccatttgaatctgttcttccaggttcaatctttctttccccactctctgactgtgtaccccatctccctgccttcaggttctcacctttcctcaaaactgaatgtccgagctggtaaggactggagagatgaccttatctgacttgtcactcagcgttacagaatagaaagttagcgctctattgatacctggttggactggagtcagggtaaaaaagacagacctgagcagaaagaaatgtattcaatgcagagagaaaggagaaccaatgagaggaagagaaagataacaatgggtggggggatggggtggggtggagggaaagaatacgcagatgcctgggaagaaaacaaggtaaggaaaagaaatcaaatgagaaagaaaaaggcccaaagtggggtgaaggcataagtgaccagccatctggaagcagcactgagctcggcgggggcgtgtgtttgtgaagcaggggagctggaccgacaggtgcgagggcccagctgcagccagccaggaactctccaggcccagcgcccaaccggaaagaaggcatggcccccgcaagagacttctcaagggagattttggctgcaggaatacagggaggaaactgccttcttctagaggcagagtagaccctcagcaggtccaaggtggggaggcttgcctctgaagagctcctggggttccaggggaggaaggttcccatggcctatctttgcacttctcttgcatttttttcaagcctctcccaagtgtgacctttggagtctggaatatggataatgctctgctatgtttgtatctcaggctgccttgtcctggccttgaatggtccgaggggattagtaaatgccaattcgtgctaccaacagctgaaacccaacaggaataggtagggaggggaaaagggctgccagacccaactggccactctccctctcagctccagctgtggcctagtctgatagtgagagcacagggctccaccatcaaactgtccctggttcaagtcctgaggctaccacttcctagctttgtctttgggcaagtgactttggctctttgggcctcagtttccttacgtgtcaggtaggggaaaataagaatgcctacgtcatgaggctgtgccagggttgaatgacataacgtctatggctataaactctcaagtgctgtacacatgtaagtaattactcttccctgatccctcttccctgctgcttgggggatggagtcagcttttcaatctgagtccagttccaagcctgacttcacctctttggccctgttttcctcattgtcacatataactgtgtgggaagtcaggcctctctgacccactggggtgggatcagggctggctcttcttcccacacagtttttcattcaggccacaaatgtaagctgagcccctacatggcccttcttcagtcaccgaggcctcagagggaccaaggcaccacctcaaccctcaaggagttcccaatatagtgggggagatagaaaagcagaccttaaaatgaagtgggagataggtgacatctgagctgaggatcagcattctccaggtattggggacagcatgggcaaaggtgctgatgggagctgggaaacagcacaggatgggatctatgaggttgcaggagccagacttggatgccacgttaagaaattcagcctttatattgtggtcactaaagatgatgtgggcagataagcgtggagtctggtacagacagttactcagtaaagcatgctcattgccttgactttctctctccatcttccatctccaccagtgagcaagcgagccagccctaggcttcctggagggctcccaggtctctgccctgaatatggccccataagggctcttgagccccctgtttccctgcacattttcccaaactcagtaaatggcacctctgttcacccagtttctcaggcccaaaaccttgctttcatctttttctttctctctctccctagatccaactgatgaacaaattctgtcggctgtttctgaaatacagccagaggccaggtgcagtggcttacttctgtaatcctaatacttagggaggctgaggcaggaggattgctcaaggccaggagttggagaccagcctgggcaatgtagcaagacccgggttgtaaaaaataaaaataaaagaatcagcaaggcacagtggctcttgcctgtagtcctagctactcaaggggctgaggaaaaagaaacacttgagcccaagagttcaaggttacagtgagctatgatcacaacactgcactccagcctgggtgacagagcgagaccctgtctctaaaaaatttttttaaatgcagccaaaatccaaaccactcctcaccacttctatagccacaaccctgggctgagtcactctcatctcttccctgcagtcaccctctgaccagctctctagcctctggcccctattcctcacacagcagccagaggggtcctgtcccctctgctcaggagcctcgaatggctctccatcccatacagggtaaaagccaaagttcttacagtggcccatgtcacttgatccttcctgcttctctacactcattttctcctactctaccctcattccctcagcttcacgcacattggcctcaccatttcttggatatgacaagacagttcctgtctcaggctctttgcatttgctgttccctctggctgggacactctttccctgatggccacctggctagctgttcaggtttttgctcactgtcacctcctcaaatgggccttccctgggcaccctttctaaaatagccctgtcccactcaacttttatcttgtttgattttctccatagtacttaccactgcttgccatattgtatttattctctgtctctccaactagagtaaacactccatgagagcaggcattttgttttttgagacagggtctcgctccatcgcccaggctggagtgcagtgttgtgatcacggctcaccacagcctgacctcctgggcaaaaggattctcccacctcagcctctcgagtagctgggactacaagcatgtgccaccatacctggctaatatattttaatttttttttttgtagagatgggtcttgctatgttgcccaggctggtcttgaattcctgggctcaaacaattctcccgtgtcggtctcccaaagtgctgggattataggaatgagctactatacaccctatccttttaagtctctggtaaccccaggaccgtgctatggggctaactggtgggcgcctttggaggaagcattccagtctggcaggaaagctgcagagtagtgagcggtgcctaccagcctgggagtggagtggcccagaaaggatggccacagtgtggaggggattaagggcagatgaaaagtgctgaatacagggcattagtaggcctaagaaatggcagtacccatccactgtccccaccagtctacagctgtgattttgtggtttctcttcagcctgtctcctttcacatacatatgtgcacattagtaccaatccccagctcacccctcattcccacccttattctacctttatcttcactttcagcttgtgcaaacccatgccctccatgctgcccacagtgtgactcccaacagggaattttttgttgttgttgttttgtttttgagatggagtcttgcactgtcgcccgagctggagtgcaatggtgtgatctcggctcactgtagcctccgcctcccaggttcacaccactctcctgcctcagcctcctgagtagctgggattacaggtgcctgccaccatgcctggctaatgttttgtatttttagtagagatggggtttcactgtgttggccaggctggtctcgaactcttgacctcatgatccgcccgcctcggcctcccaaagtactgggattacaggcctgagacaccacacccagcccccacagggaatttcaaaaggtatttaggtagcttttgggggaagatacgttaggattgcactgtatgtctagcactagcctgagcctctgggaaaattaggatgggctcatggtcactgctattccctttaattcctcccagcatttactgaggtcctactacatgcctgtcatgagtgctggacctgaagagatgggaaaagtcaatgagtgttgtcaaagagacaggtaactaaataataacttactattaagcatctgaaacatgcccaatctcactaataaaacaaaaaaaatgaaaattcaaacaatgagatagttttactttttaggtgggaaaagatgaagttgtagggagggtgtgggggcagccacattcacacagctttagtgggactgtgaattgggacaacacctctgggaatcaaaacctataatctcttttgtttgttttaggttacatgccctttgatccagcagtttcacttctacaaatttatcatgaggaaataatgcaacaaatgtgcaagggtataggtaagaggatcttcgctgcaatttttttgaggtgaattgcgcacaatggaaatttaacagttttacccaatacagagaaaaaataaatgtttgaggtgatggatgttccagttcccctaatttgatcattacacattgtatacagctatcaaaatatcacacgtacctccaaaatatgtacaacttttatatatcaattaaaacataaaaaagtaaattaaccattttgaagtgaaaattcagtgacatttggtacattcacaatgttgtgtaatcaccattgctatctggttccaaaacattttcattactccaaaacaaaacctgtaccctttaagcagttactcccaattttcccctctgcccaggccctggtaacaaccaatctgctgtctttatgaatttgcttattccgggggtttcatgtaaatagaaccatacaatacgtgaccttttatgtctggtttctttcacttagcgtaatgtttctaagtattgtatcaagtatcagtgcttcattcccttttaaggctgaataatatcccttatatgcccatgtcacaattggtttatccattcatccattgatgggcatttattagaatattgtggcatttatttcactaccttttggctattgtgaatagtgctgtgataaacattcatatacaaatatttctttgaatacctgttttcaattcttttggatatatagctaggagtgtaattgctgggtcatatggtaattccatgtttcacttgttgagtagccaccaaactgtttcccactgcggctgcaccattttacattcccacaccaaggtacaaggattccagtttttgtacatgctcatcaacacttgttattttctgtctttgattatagtgatccaaataggtataaactgacaagtgattgcgattttgatttgcagttcccaaatgactaatgatgttgagcatcttttcgtgtgcttcttgcccatttgaatatcttctttgcagaaatgtctaatcaagttctttgccttttttttttttttttttttgagacagtgtcttactctgttgcccgggctctggagtgcagtggcgtgatcatggctcagtacagcctcgacctcctgggctcaagcgatcctcctgcttcagcctcctgagcggctgggactacagacgcaggccaccaagcctggctaattttattttttaatttttttgtagagacagggtcttgctatgttgaccaggctgatcttgaaatcctggactcaagagatcctcctgccttggactccagaagtgctggcctctttcactttcttgataatgtttgctgcagcaaaaaagtttttaactttgatgaagtctaatttatctatatttttcttttgagacagagcctcattctgttgcccaggctggagtgcagtgacacaatctcggctcactacaacctctgcttcccaggttcaagtgattctcctgactcagcctcctgagtagctgggattacaggcgtgcactaccacgcctggctaattttttgtatttttagtagagatggggggtctcaccaggttggacaggctggtcttgaactcctgacctctggtgatctgcctacctcagccaccaaaagtgctgggattacaggcgtgagccaccacacctggaaggctaatttacctatttctccttttgttgcttgtgctgttggtgtcatagctaagaatccattaccaaatccaaggtcatgatctacccccatgttttcttctaagcatttcatagtttatctcatacatttaggtctttgatccattttgaactcatttttgtgtatagtatgagatagagtttcaacttcattctttttttttatttttcctagatggagtctcgctctgtcgcccaggctggaatgcagtggcacgatcttggctcactgcaacctccgcctcccagattcaagtgattctcctgcctcagcctcccgagtagctgggattacaggtgcatgccaccaagcccgggtaacttcattcttttgcatgttgaaatccagttgtctcagcaaaatttgttaaagagacttctttttccccattgaatggacttggcatctctgtccaaaatcaattggccataggtgtatttctgtactttcaattctgttccattgtacctatatgtctgtacttatgccagtaacacaatgttttgattactatagctttgtggtaagttttgaaatagggaatcatgagtcctccaactttgtccttctttttcgagatgtttttactacttggggtctctggaaactccatatgaatttcaggatggatttttctatgtctgcaaaaaagtctttgggattttcataggaattgctttcaacctgtagatcgttttgagtagtattgacaccatacaacatgaagtctttcaatctatgaacacgtttttccatttatctgtgctttgtttaatttctctcaacaacattttatagtttcagtgtacaagttttttgcctccttggctaagtttattcctaaatattttattcttttggatgttattgtaaatataactgttttctttttctttctttttttttttttttgagatggagtctcactctgttgcccaggctggagtgcagtggtgtgatcttggctcactgcaacctctgcctcctgggttcaagtgattctcctgcgtcagcctcccgagtagctgggactacaggtgcgtgccaccacgcctggctaattttttgtatttttagtagagacggggtttcaccttgttagccaggatggtctcgatctcctgacctcgtgatctgcccacctcagcctcccaaagtgctgggattataggcgtgagccactgcgcctggccagaaccgttttttaaatttccttttcggattattcattgttgttgtatagaaacacaatggatttttttttgttaaccttgtaccctgctactttgctgaattcatttattagctctagtggttgttgttgtgcagtgtttttatttgtaaggaaaattgagaaaattctgaatgttgagcaataggggacaggttaaacaaattttgaagcatccatataataggatcatttcaagcatcaggtgtgccttcctttttggtatgtctggcatatgttataatggaagatgaataaagtagctgtttctagattgatatggaaagctgtccacggcgtataattaagtgaaagaaaaatcaggttgcagaacagtttcatttcatttacataaaagtcaaatggtcatatatgcataatgccagctccattgagacagagatcgttgtctgtttgtacacagatgtaaccctagtgcctggcacgctgcatggcacatagtaggtgctcaataatatttatggagcaaatgaaaaaaagtctggaaagaaaaacactaaattgccaatagtggttatcactgaagtatagggatatgagggaaccattatctgtattatctgaaagtttttacctgaagcatatattgaggggaaatatttcattacacacacacacacacacacacacacacacacacacacaaacacacacacacattctcttaccaagtaagtggttaggagaaaggcatagtgggccaaaggaggaaggtgccaggactccatctgaggtaaacagaggcttctcacaggcagtcactttggagctgggccttaccaggctccttattatttatttatttttttgtccacacagtagccagagcgagcttttcagaatgcaaatctgatcagaccactccttggcttaaaactctgatggcttccttacctgcaggctcaagcccagccccccaacctggcacaggaagccctttgtgatctggtccctgctatctttacttgcagcaactcaccaatatagattttaatgttttattatgaaaattgaaaaaccacaaaaccagagagactatataatcaactcccatattttcattcaatccactttaacagtgatcaacattttaaaattttgttttacccatgtccccctccctccccaccctccatatacattttcctcctctggagcatccagatacagttcatctataaatacttctctttatctctctataagatgaggatataaaatatatgtgtatataaccaccatgctgttattgtacttaacaaaattatcaataatttcttaacataacctgtccaatgttccctcattgttttaataacatctttttacagttggtttgcttggataccgtcaaatatcctgtgttccagcaacaccaagctgcttattgcttccctaaatttcctgtgccttcttgccttcatgtattccagtccctttgcctggaatgcctcctcccatgcctggcccaagattcagcttgagtgtcaccgcctgcttgtagccttcatggttgccccagtctagattgcttgtctcctcctctgtgttaataatacctagaataaggcattgctctgtcttattacatagttctaccattctctaagtatgtattgagagagagagagagaggagactgggcgcggtggctcacacctgtaatcccagcactttgggaggctgaggcgggcggatcacgaggtcaggagatcgagaccatcctggctaacatggtgaaaccccgtctctactaaaaatacaaaaaattagccgagcgtggtggcgggcgcctgtagtcccagctactcgggaggctgaggcaggagaatggcgtgaacctgggggaggcggagcttgcagtgagctgagactgtgccactgcactccagcctgggcgacagagtgagactccatctcaaaaaaaaaaaaaaaaaaaaaaaaaaagaaagaaaaagagagagagaggaggagagagaaatagataatgataaatgatagatggtatctggggattgccaggacaagatggctactttagttagggtagggtggtcacagtattattattataacttatttatttatttaatttatttttttttgagatggagtcttgctcccgtcgagcaggctggagtgcagtggcgcggatcttggctcactgcgacctccacctcctgggttcaagcgattctccttcctcagcctcctgagtagctcggattacaggcatgcgccatcacacccagctaatttttgtatttttagtagagatggggtttcaccatgttggccaggctggtcttgaactcctgacctcaggtgatccacctgcctcggcctcccaaagtgctgggattacaggcatgagccaccgcacccggctttttttttaaattttttgagacagagtctcactctgtcacccaggctggagtgcagtgacacaatcttggctcactgcaacctccatctcttgggttcaagcgattttcctgcctcagtttcctgagtagctgggattacaagcatgcgccaccaagtctggctaatttttttgtatttttagtaaagacggggttttgccatgttggccaggttggtctcgaagtcctgacctcaggtgaatggccaacctctgcctcccaaagtgttgggattacaggcatgagccgccacacccagccatattattattattatttgagacagggtcttgctctgttgcccaggctggagtgcagtggtgcaatcatggctcactgctgcctcgacctccagggctcaaggcatcctcctgcctcagcctcctgagtagttggtactacaggcatgtgccaccacgcctagctcatttttgtatttttagtagagatggggttttgccatgttggccaggctggtatggaactcctgggctcaagcaatcctcccacctcggcttctcaaagtgttgggattactgatgtgagcctccgggcccggccctagggtatttaattgagtcagacaactgaatgaggagaaggagccagtctagggaagattggggcattccaagcaggactagcgtgtgcatagatcatgaggtgaggggcccctgtcttagacagctctatttatgtctgtctttacctctacgtctgtagatctcatcctttttgtaatcacaaaactcctttgagtgttgagactctgataatagctatggctctgtgccccagaaaaatgtacatatgtacagtcacacaaatttgcatactatttccctaattcctgaagccagggaaccccaggaagtttccttacccacagcgtgttcacatttagagcaagaacagtgtctactactaatatataacatgcgctctactacatgcttttctgcattatctctttggtccctcgcaaccacccccatgaggtaggcacaggtaagtgtcgccatttgatagacaataagactaaggctcagagagagggagttacttggccaaggtcacacagctagtaagtgaagggagaggcttaaactcaggcagtctgaggctgaagtgtgttatgttgcatgccaaggcactaccggtcagctttgggcccagcactgagcaggaggtttggggatctgcccctggcaaatgcagagaaggaggagctgcaggagctttctgtataggggcttagagatgtcaaaacacacttgtttacgtggttgttttctttcattcttctgcttttctcttcctccttcttttccttctcctcttcctctttttccttttttttgttgaatgacaatatttgattttcttataaagaagtctttctgccttagagtcttttaaatatataattggaaatatactactgctgtctctgtgacagctagcattgaatgcagcagaggcagatccaccctccccaaaggaaaactggtgggaattttccattgacttaaaaaaaaatgttatgtattaacttttttgggaccaggtaatacattcacatggttcaaaaatcaaaaggtacaaaaaggaactgagtgcaggtcgccctcactctgccacttgccatctggttcccttgcccagaggcaactgaggtgtcccagttccttgtgtattttcccaaaggtgttttatgcacatatatgcatatccaatatcgatattcctttttaagtggttattttcttaccccttgagttggagacatagtctacacttctttcttggtctctttggcccttgtgagtgccctggagacagagggggctggtgggtttcctataagcactgggttttcctcagaggtgagccttccctggaccatttccaaggcaggccctcctgtccagaatacacgcttttcaaagtgcttccatctttggtaattcatcaaccactcacaatagcccatgaggtgcaagaattattcaccccattttatgggtatggaaacagacccagaaaggtcaagcaacttgctgaaaagcacacaaacgaatgaatgctactgtgtggtgagggcccagaagcagcatgtggcttggtccagcttgggctttggaagcagtaagaaagttgtttacttcaaagtcacagtttaaaaatattctagtggcactagtgtgggacagtggaaaaagtaagggaatttgcagttccagccgggtttttcttcctggctctgccacttaaaaaggggcatgttacttcatcattcttagcctcaattttctaatctatagagtggggatgataatacccactagcagggtggatagtgacgtacaagtgaaaatgatctgtaaaatggggcatatgccaatgcttgctttaccattgttgttatagttattgtggctggtcccttgcagacacaaggggtgggtggtggcggggtcggcagcaatttcctaaaggtaagacaggcaggcttatggtggggacaaatttgccccaccctcaagccaactgatctaaaaagcatccccctcccccgcatccccctccccgccatcgcccccactgatcggtcttccaggcaattagaacagccccagggcctgagcacaaagtcttcctcagtgggtgtcttgaactgactttgatctgtaactaccccctaactccccgcggatcaattgtttcttttttttttttggggtttatgtatttatttttttctattattaaagtaaaatgtgcccactacagaaaatttggaaaatactgaaaagtagaaatgtgctcccacagctctgagctcatgttgataacagagctggaaacatgttgggatctgcttctttttctcctcccttgccttgtctgggaattcctagacagccaggatggatggggctgtgtgcttgtctgccgtcccggtcccagtagttagttgaaggagctttgtaaatatttggtaaataaaattacaatatcatgacatttagttgtctcttcctcatctctcccattatctcccatccccatttttccatgttgccaactccccagaggttgcagtaacaccacacattacaacttcctccccttttcattatgtgccaattgtctactgggaagcatcctttctatccatggaagtgctcctcttggatctgacatgccaacacaccttttccatccctaaatcactccctggacagggacagctcctccccagggtgccaataagcccctctccatgactgcagtgccagtattcctaccccaccatggacagccccagtgcaacacagagcttggccttctgtcccaagaacttgggctagggacacactagttccccagtgaggtcagactctcaagccgggccagagtagagattggaaggaacagggttattcttgacacttcagcgagaagaaaagttcagaactgtgtgtgctgtcagtggcgctttacaatgaagacaacgggacaaagaggtaggttttcaaagattttattaaaaaaaccaaagatatataacactaaaacaacaccagcggacttctccccacctcccagtctgctgatcagtaccctctctcccagggctccacctggatggtcctgaggcccaaaccctgcctctcagctgcctcctgccctacaaactggtgactgctctcatccagcttctgatctgtttcatttaagatgattaaaatactcccctccccaattcgcttaaaaataattttcaaagattaaaaatttcatttgtgtgtgtgtgtttttttaaataagaactttaaatgtgggatatctccttcttcccctaggtccagttgaggactctggggtgcctgcctcttcaccccaggaagccagctgccacttgatgccccttggaaattttcaggaagtaatttctttcaaattttccctgcagtcacaaattccacaaactgcttgcataaacacgctgtcttcattataggcaccactcctcagctctggaaacctgatctctttctgtcaactagaccacatgcttcagattccctgcaaacaggggagaaaacaaaattcaaagtcaggtaatgtatgtgaattataccccaatagagctattttttaaaaagcacttatattttggggcttattctctgctgctcttgggaactctgtgacctcgccataaggaacaagaccagaatagcttgctggatgatgagaaacaaatggcccagagatccctgtcacccaggcaaccaccagccaattactggacatgtgatcgaggcctttgacagccagctgactgcagatgctgggtgtatccagccagaaccagaagagccacccagctgaactcagctcaattgccaatctatagagtcatgagctaaacaaatggttgttttaagtctctctctctctctcgtaacacttttcagagttcattctttactaactgcatcaaatctcatgctccccacccccaacttttcttccttcccttagcaaggcacaaccctcctagcattttctcttgtgagtacctgtgaaacacggattgggggctttcctctgatctcaggcctaagagtctttgagggaaaagtgatcatttgaaatcctaccggactgggctctaggaatgaaaagttgctcactttgtccctccgtagtctttgccttgccacacttccccaagtagaaacactgggctccaaaccctactggccacttctctgaaacagaaacaatgctccctgagggcagggcctggctgtcttacttttggttgatttccaaagtcttgcacagtgcctcactcatagtaggtgctcagtaaatggctgaatgaatggacgaatgaaaggaaggaaggaaagaagaaacaagtcagaaacaaactacttgcctatcttttttttttttttttttttttgagatggagttttgctcttgttgcccaggctgtcgtacaatggcgcggtctcggctcactgcaatctcccgggttcaagcaattctcctgcctcagcctcccgagtaactatgactacaggtgtgtgccaccatgcccagctaatttttgtatttttagtagagatggggtttcaccatgctggccaggatggtctcgatctcttgatctcgtgatccacccgactcggcctcccaaagtgctgggattacaggtatgcccggccttgcctatctacttttattttaaattttattctgcagtaaaattgacatttgtgcatgtgcagatctgattttaaacatatgtatagattcatgacagagaggagttccataacccctcaaatctccttgtgctatccttttgcaatcacatcttcctttctcccccacacctagcaagcactgatctgttctccatcactgtagtgttgtctttttgagaatgccatataaatgcattcaaacagtctgtaaccttttaagataggctattttatttttttactcagcataatgcctttgaggttcatgcagatttgtgcatgtatcaatagaagttcattccttttttgtactgagctcttacttttaaaataattatagaataacaggaagctgcaaaaaaaaaatagtgcagagaggttctacacacccttccccaggtttccccacatgttaacatcttacataattactgttcaatatccaagtcaggaaattgacattggtacaattcacagatcttattaatatgtcactagttttacaagcactcatttgtgtgtgtataagtgtataattctaggccatttaatcgcaagtgtagattcatgtaacctcaaccacaatcaagatgcgaaactattttatcaccacaaagatttccctcctctacctcctttacagtcattcccatccctcctccttcaccatccctaagtcccaacaaccattcatctgttatccttctctaaaatttggtcattttgagaatgttatagaaatggaaccatacagtatataaacttttgagatagataggcttttttcactcagcatactgctcttaagatccatccaagttgtggtgtgtatcaagtttgttgcttctttttgctgagtagtactccacagtatggatgtagcacaatctgtttaactacttatctgctgaaggacacctgagtcatttccagtttttggctatagaatcaagccactatgaacattcacatacaggtttttgtgtgaacatagttttcatttttctgggacaaatgctcaacagaataattgctgggaggtatggtagtagcatgtttagctttataagaaattgccaaactgttttccagactggtggtaccattttactttccctccagcaatgtttgagtcatctggtttctcagcattcttgctggcatctggtgttggtttttattttggccattctgatagatgtatagtgatatcacattgtgatctcaatttgcattttcccaatggctaatgatgttgaacatcttttcatgtgctcatttgctgactgtatatccttttcatgtcttgtcttttgcctacttcctaattgtttttttttttttctgttgagtttggaaagttctttatatatattttttatttttattttttgagacacagtctcactctgtcacccaggctggagtgcagtggtgcgatctcggctcactgcaaactccgcctcctgggttcaagcgattctcctacctcagcctccctagtagctgggattacaggcatgtgccaccatgctcgactaatttttgtatttttagtagagaggggatctcaccatgttggccaagctggtctcaaactcctgacctcaaataatccacccgcctcagcctcccaaagtgctgggattacaggtgtgagccactgcacccagccctttatatattttagatacaaatctgttgtgggatatatgatttgcaaatatcttatctcagtatgtaacttatcttttcattcccttaacagggtcttttgtaaagcaaaagttgattttgatgagctccaattccttatcaattttttttctttttttggatcatgcttttggtatttcaaccccctaactcaaaaaaatctctggataatctttgatccttaatttcttagttcacgccttctccacatcttatgagttgtgaagcctaacctcaagatgtctctccaatctatccccttctttctgttccactgtctctgctttagtcacatctcttgttactcaggtcactgcgacaacctcttatctggtcctcctgcttctagagctattccctgcacaattgctagctgtgatcacattccttctctgctcaaaaagacttcagcaggctgggcgtggtggctcatgcctgtaatcccagcgctctgggaggctgaggtggatgcatcacctgaggtcaggagtttgagaccagcctgaccaacatggtgaaacctcgtctctactaaaaatacaaaaaaattagccaggtgtggtggtgggcgcctgtaaccccagctactggggaggctgaggcaggagaatcgcttgaacctgggaggtggaggttgtagtgagccgagatggtgccattgcactccagcctgggtgacagagcgagacaccatttcaaaaaaaaaaaaaaaaaagactttagcagttcccgacctaccacctatgaatgaagtccaactccttagcgtaaatgggccccatccatgctttcctgtttccacaccttcgcttgtgttgttgcctcagctgaggacaacctacaggggacactggtgtgaagtgagagtccttccatctgtaagtatagccagagctaggggaatgactgaatgcaaggatgaacaaaattccatgtcaaagcattccaacaagacatgttcgcagggaggaaaggtgggtgctgtactcctctgctgctctgcctcactctccagttaaatttggaggcaattaagaaaaacaacagaaataattttcaccaagaagttgatgatgagcaatgttgaattggggtaacaataaaaatgcaagcttaaataatgcccattgttttcccctcacatctagcttttccagcagtgggtggcagcctgagaaaattctaaaggctagcacaggctggggcctagggagacaagaagttcagaccacagcgggcagactcaactgcctagagaggccaagaatatactgtttgtaaagcaggctgggggcaagacacaaggggccctcttgatccttttttcattttcttactttgaatcatgacataagtgtaagaaatatttcccttttttcttaactctgccacagaagaaaacaaaaccaagacagtgtaaatggaaactcacacttggcctagagtaagagatacaaaagggactggtggggcttgtggcaaagaggaaggtacctgctggcaaaagtgggcagctgctgctcagctccagccactcaccactgtgcagtcctgtcggccccatgggaccgagtccttccattttccaagagaagtccaaatttcacatttttatgcagtttccactgtgttaaatttgggcaaatgactgacattttaaaagaatatcatatgaggcattaagatgagtggccaaacagaacaattttggaggcgagatgtagcttatggactgccagtttgtgatttctggttatctctgaaacagtcttgatttatacctaaggcaccccatttcactctcaaatatcctggtttggacaataaactatactgttactctagctctgatgtacaagaaggagtactgaactgggactcagggggcctgggttctactgaaccactggttgactcatttgtttatcaatttattcaataaacatttatggcgtgtctactctgtgccaggtattttgttaggtgttgatgaacaatctctttagtctttcttttttaaattaatatattttacttttagaacagttttaagtttatagaaaaactgaagagaaagtacagagagctctcatatatttccttccccttcccctacaggcagtttcccctattattaacatcttgcattagtgtgatacatttattatagttagtgaatggatactgatacattatcattaacttaagtccactgtttacgttaagattcgcttttggtcttgcacagttctatgagttttgaaaagtatataatgttatgtatccaccattagagtatcatgcaggaatagtttcactgccctcaaaatcacctgtgttccatggactcatccctcccttcctttcactgaagcccggcaaccatcatctttttacagtcatatggttagaatcaaacagtatgtaacctttttggactggcttctttcaagatgcatttaagtttcctccatgtctttttgtggtttgatagctcattttttcttagtgctgaataatagtccattgtctggatgtacaacgggtttatccattcacctattgcaagacatcttggttgcttccaagttttggcaattctgaataaagctgctataaacatttttgtgcagggctgggcacagtggctcatgcctgtaatcccagtgttttgggaggctgaggcgggaggatcacttgaggccaggagttcaagactagcctgggcaaaatagtgagaaactgtctctacaaaataaaaaaattagctgagtgtgatggcacacccctgtagtccaagctactcaagaggctggagcaagaggattgcttgaacccaggaggtcaaggctgcagtgagctatgattgtgccactgcactctggcctgggtgacagagtgaaacactgtctctaaaaaaaaaaaaaaaaattaacaacaacaacaacaacaacaacaacccaaacaaacaacaaaaaagacccccaaacattcatgtgcaggttttcgtgtggacatgagtttttaattcatttgggtaattactaaggagtgtgattgctagatcatgtggtaagaatatgtttatttttgtaagaaaataccaaaatgtcttcccaagtgactgtaccatattgcattcctaccagcaatgaatgagagttcctgtagttctacatccttaacagcatttggtgttgtcactgccttggattttagccattctaatagatatgtaatggtatctcattttaatttgcaattccttagtgaccatgatattgggcatcttttcacatatagtctctgacttaagatgtttcaactttatgatggtacaaaagtaataatgcattcagtacactcctcaacttgagatggggtgacatctagataatcccatcataagttgaagatactgtaagttgaaaacatactttccacttatattttcaacttacaatggatttattgggacataaccccactgcaataggcagaggagcatctgcacttacttgctgtctgtatatcttctttggtgaggtgcctattaatatcttttgtccatttttattttttttaaatatttttaaattttttgtagagatggggtcttgctatgctgcccaagctggttttgaactcctggcctcaagcaatcctccctcctaagcctctcaaagttctgggattacaggcaggagccaccacacccccaaaatgggctcgcttttgcccattttaatttttttatttaatttttttttttgagacagggtctcgctctgttgcccaggctggaatgtagtagtgtgatcacagctcacttcagtcttgacttcttgggctcaagtgatcctcccacctcagcctcctgagcagctgggactacaggcacatgctaccatgtctggctaatttttaaattttttgtggagacagggtttcaccatgttgcccaggctgttctcaaactcctggactcaatcgatctgcccaccttggcctcccaaagtgctgagattacaggagtgagctactgcactcagcctcttttgcccacttaaaaattgagtgttttcttattgttgagttttaagagttctttgtatattttggattgaactcctttactggatatgaattttgcaaatatttctcccagtctgtggtttgtctttttattctcttaatctttttaatgtggagcagtgcggtccaatagaactttcttggatgatgtgaccatcctacagctatgctgctcaatatggtagccactagtcacatgtggctattgagcacttgaaatatgtctagtgcaagtgaggaacagaattttatattttgtttaattttaatgaacttagccacatgtggctagtggtgagactatagtggacagagcagacatagaacagtcctcttgtgctttttttttccttcatgacgttgactaggggtcatccttactcctcctttgtttacaaccttccttttcaatctattagcaagtcctgtggattctacctccaaaatagattccaaatctacctctttttttccctccttcactgctgtaactgtaccccaaactattcttaccctttatgtggatgattctaatagcctcaagactggtctccttgcttccttccttgtctcctacaaccctgttctctatatagcagccagagtattttgttaatacttaggacagaccacatcactcctatgctcaaatccctctaacagcctccaatcacaataaaatctaagttactcacctgcaggggccggtcccttgcctcctgtctcctaccaccaccctccttgctcacttgagtcttctttgtgtggcttgagcacagaaatcatttttccctcttagggcttctcctgtctttgaacttgctcttccttcttcctggaatgctctgtcctggctatccccatttccaactcttctcataacctttgtcaccttgagtcgacgagtctcaaccccaaagtcacttctgagagaccttaggaccacccaagctaagaagccaccccctcagtcactccttttctgtcacatgattctgttttattttcttcaatccacttagcgcacagaaaacatcttgtgtgtttgtttctttatttgctcgctgttggcttcctctcaccacctctatgagggcagggaccttgtctgctgtcttggtcattactctactgttagcaccctcagtagtgcctgacacctagtaggtgctcagtacctattcactgaaggaaaagacatctgtagactacagggcagttgatcaagcactttcccattaaattcccagaggcttaaagcttggtcattgctcttaaggaccttataagtgtgggtaaggtgagcaaacacatgctaacaaaaggagaaccaggctaggatacataagttctgaacgcaatcagcatcacagcagtttggagggatgctggtgtgatctcaggaacccttggaggttgggtggcaccacaaaggaacagagaagtgaatttaggactgttgaaaaatgtttccaaaacttctgtcatatgagtacctcttttaggaatgtttttatatctacttaacagctgtattaatagtcaccttgatatatatatatatatatttataaatatatataaatatatatatacaaatatatatatatatatatttatatatatataatttttttatttttttattttttgggttattaactcacttttaaaccttcaggccaagcccagtggctcacgcctgtaatcccagcactttgggagtctgaggcatgaggatcccttgagcccaggagttcgagaccagcctggggaaaatagggagtccctgtctctattaatttttaaaaagaaattttaaaaaataagaaaaaaactttaatacctattttggcctcatctatcataagcagcaataataataataatagacaacttgcttattacattttaaagcatacgttaaaataaatatgactattaaaattaaaaatgtctttgtgtcacctcagattgtctctcatatagaggaacatgaggcacatcttgagaaaaatcattgtagggattacccttggccagccggtgtccaggctgtcctgctgctggcaggctctggtatctgagaatcttagatggtatgcacccccgctctcatccagctatccagctccctcagcccaatctggtccatttttctgtccatttattgcctaagcctttgctgatgtctacaatggcctaggccctgtgctgggtgctggggtcacagaggggatcaagacagttcttgccgtgaaggagttcttggcctcgtgaggaagacatatatggaggcaaacacattatagtccacagcagcaaggtgatacaattctagtatgtacagagtgctgtgggcagaaaaagagggcataagaggcttcacagagtaggtggtttattgaagggcaaaggagggaagaatgttccaggcagcaggaacagagcaggatgtataaagccaactgcaaagtttttgaggtcaggatacaggatgaagttcagggaggggagcaatgcagctggagaggtggccagaggccatatcaaggccagggccttatctgagaggccatggggagcctctgagagattgtcagggagcaggggatcttgtgggatccagggctagagcaagatttccagctgctgccccatcatggccaggttcaaggacctcattttctacctgggaacaattgcagtaccaagggttcctatgaagccttgggcatgtgatgatatggatggctggtttaatttttagctcttaattgtcaactgcattgcttgccttggaatgtcgatccctcctgtcatcagagagcctttaattgacaattaagtaaaactgccaatcaccacttgtctgcctctgacctgaattagaacctgaggttgtggattaatcccaccaggcttctgacatttacaggacaccagcacttagaggatattaccctgatggttagggtgctctcgtcttagttctcaaggcactactgcagtctcaaacagaaccgaagcaatttctaaaatagcctatgattcattttttctcccctcctgtgcctaaatctgctggcttcatgtggaaggatgggcgcaagtaactgtagaggtgacatcacaggagtgggctgcttgcctgccagccagcttgtggagctgggccccggcagttgtctatctgctgggctgggcaatgcctcccagccgttttggagacagagctccgaggttctttggtcgatgtgccttctccacatttctttttctcagacaaaaattctgggctgggaaatccaggataatgggaatagcagtggtaggaggaataatacagccttacatctgtataatgctttagagtttgaaagctatttgctctattttgccccacccaaacaccagtgggaaatggaagctgggatttttgacttgaactggagaccaactctcgctctcttgcacaaaaaaacctaaatgctaatatcccctattcacctcaaggcatatcatgattaggccttggacgccaccagaaggtcagagaggctcccttcagcttctaggtgcttcctggaagataaattctccaggacaaattgcctggcaggcacaatctattaactatgccatcctgactgagccaacaagtaatgccagtctcagcactgccaactccttctgcacaccctggtttacagtcccaatggtcccaaagacctttactggagccaaagaaacagtcgctaactgtggagccctgaaggtagggtgtgtcacaaacatctagaagtgccaacagctgccagagagctcaagggcctgtgaaaggaaaacccacaattcaagtcacattagctatcactgtggatcctgaagtgaagggtcactgagcccagccgtgaacagctgaagagtggggtagagggattcttttcttggaggagccataaaaatggttctgtggtggtctcatgattgctctgtgatcattcagcatgtgagcccagcatggcttggtgtccccagttccttattgccatagtgaacatgagaagtctcctctggcccagctcccctcctgtgatcttccccaggatcatggtcaccaggctggaagccaaaagagtggtatactcttgactggccttcctggttttagattagatttcagtgtcactagtgtgcacgtatgtgtcaggggatgagggtgggggttggaagcagtgagccatagatgctcagcagtattgtgagagcagcaggtgctcctgctattgttgctgccatagctgccaccaccaccactatcaccaaatgaatccaggatgaccttgtgtaagaccacagttgctggtcagtgccatgaaaatgtcatctatgtaaaccaagatgcttgtacttgggtagttctctgtcagaaatcttggcggggtataaaagtgacccttttgaaagttgaatctgtaagtctatatgtggaaagtgactgtcagaacagaacatcaccacctccaaagcagacagacctcccagaacttgttttccagctcatggcagaaatgtgcacctatgaaagtagattaagaatcaccacctcagcctgttttagagatgtgaataaaaatcttggcttgggactgccgtctctctggttgactgatttttcaattgatttgtatttattagctaatgaaattaaagttgtaaaaatgataacagaaacacaataaatctctcccacaactggctgtttctatgtcactatggtgcattcctcactttgattacttcaaagtctattattttgttttcaattattctgtttttctggcactggagaaaatcaatttgttttattttctcttattcatgcactcaattatgctcttcgggcacatttaatcactttgatgtttccattttatggcccgtctctaggcacttcagctgcattgctgccaatgggcaagcaggactaatttgcatgtcacaatagacttgaaattctaactcaatttagaaatctttgtgaaatctccctccaaaatgtgcttggagctgcaaagaggcagaagaatgttggcaaaccaggagcctgtaaagatactttcctttctcaaaagactgtgagctccttcatgacccgaccatggcttggggaagtccctgtccaggtacagcagaaaaccatgggatgggaggtctgcagaccctcctctggaactctgtggtgagaatcctgcagcagctgcccctcagtggcaaggccaaggaggctaggcccacttaccctggcagaaaatgacccttagcactgctggatttggtggctgtgctcaagacagcacctgaatctcagttgtctaaagagcctccaggtagactgacaaagttgtcaacagttaggcattccaaaaccctgagtggtttaccttatttttcctaataatttccaaccttccttctaccccttgatcattttagaactagaagctggagggaaatgagcaatacaatcgctttgggcatgtacttcgggcacacaagaaaaaaatgcttaattaaacgtattagaggcctccaactactctttgaatattattggtttgtttatgcaacaatcagcagctctgccaggcagaaggaaaattccttatttcctcttct

SEQ ID NO: 24309 - DNA, 193488 bp, Homo Sapiens
gaattcatcaacagattcaaacaggcagaagaaggaatcagtgaacctgaagacaggccctactgaatctgaggagcaaaaagaaaaaagaataaagaaaagtgaacagagcataaggaatttatggggtgccatcaggtagaccaatacatgcattatggggcaggtgggtcttagtaggataagacatagagaaaggggaaggagataggcagattatttcaagaaataatgacccaaaacttcccaaatttgacgaaagacatagacacgtaaatccaagaaacttaataaaatctgaagaaatacacaataaaatacataaattgttgaaagacaaaaagagactcttgaaagcaataaggaaaaagcaacttatcacatacatggtgctacagtttgaatgtctgtcccctctaaaactcatgttgaaattcagttgacactgtaacactagtaagatgtgaaacttttgagatgactaggccatgatggctctaccctcattggtgggatgaatgtcaccagaaaatgggaagttcaggttccctttgtctctctctctcacccctgttgctcttctgccacgtgatgcttgtcaccatgggatcacacagtaagaaggtgacatggaagaagaccctcacaatatgccagcacctcgatactggatttcttggtctcaacaactgttagccagtaaatttctgctcagtataaattgcccagtctcaggcattctgttaaagcagcacaagatacttcctcaaggaaattatcagcatatttctcagcagaagttgtacagtccagaagttagtgggatggtataattaaaatgctgaggaaaaaaaacaaccaaaaattctatatctaacaaaactgtccttcaaaagtgagggagaaattaagatattccagataaaagctgaaggacctgccctacaagaaatgctaaagggaatacttcaaaaggaataaaggatgctagacagtaactagaagccatgtaaaaatacagattttccataaaggcaaatctatggataaatataaaaatcagtttttggcttataacttcactttttattcttctacataatttaaaagacaaaagcataaaaataattatatagtaatgggtacacaatatataaagatgtaactgtaacatcaataatataaaatggtgggtggtgttgtaaaggagtagagtttttaaattgtgatcggaattagccggtaccaatttaaaatacactgttacacatgtaggatgctatatgtaatccccatagcaaccacaaatatcaatagaatgtacacaaaaggaaatgggaaggaaatcaaaatatttcactacaaaaatcaactacacaaaaaggcaataatggaggaaatgaaggacaaaaaaagcaataggacttaaaagaaaataaatggcaatagtcagttcttccctatcagtaattactttagttgtaaatgtattaaactctgcaattaaaaaacataaattggcagaattgattttttaaaaatatgattcaactagagaatatctacacagactcactttagatctaaagacacaaataggacgctggccacagtggctcacacctgtaatcccagcactttgggaggcagagaagagcagatcacttgaggtcaggagttcgagaccagcctggtcaacatggtgaaaccctgtctctgctaaaaatataaaaattaactgggcatggtggcgtgcatcggtaatcccaactacttgggaggctgaggcacaagaattgcttgcaggaggcagaggttccaaggagccaaaatcatgccactgcactccagcctggacaacagagcaaggctccatctccaaaaaaaaaaaaaaaaaaagacacaaacagggccaggtacagtggatcacacctgttaacccagcactttgggaggccaaggcaggcagatcacttaaggtcaggagtttaagaccagcctggccaacgtggtgaaaccccaactctactaaaaatacaaaaattagctgggcatggtggtgcacacctgtagttccagctacatctactcaggaggatgaggcaggagaatcactctaacttgggaggcagaggttgcagtgagccgagattgcgccactgcactctagcctgggtgacagaacaagactccatttcaaaaaaaaaaaaaagataaagacacaaataggttgaaagtaaaataatataaaaaggtacctctgattctaatgttgggtgtgttaggccttaggtgtaggtctcaggaaacagaatctttctgactcctcttgtcttcccttcacctgtcccaaggtaggatctaatcttccctcacctcttccatgaaaccagtccctggtgccgaaaaggttggggatggctgctttagaataaactggcaaacattaagtgctttcctgagctctgtaagccactccagcaaattaatccatcccaaagagggaaccccaacttgaagcctgtcaatcagaagttctggaggcccagagttgtaactagtggttggtgggggagcagtcttggaaactgagccttcaacctgtggggtctgacattatgcccaggtagatagtgacagaatttaattggaggatacccagctagtgtctactgcttgctggtggggagaatcccatacagtttggttacagacatcttctatgttgatgactgtcttggtggtttgaaagcagaagaaaaacatggtttgatggctccacccccgcaaaacagcaccctatgcaaatagtaataaaaagagattaagaccaagcgcggtggctcacgcctgtaatcccagcactttgggagaccaaggtgggcagatcatgaggtcaggagatcgagatcatcctggccaacatggtgaaaccccatctctattaaaaaatacaaaaattagctgggcatggtggtgtgtgcctgtaatcccagctactcgggaggctgaggcaggagaatcacttgaaccagggagtcagaggttgcagtgagccaagatcgcgccactgcactccagcctggtgacagagcgagactccatctcaaacaaaaaaaaaaaaaaaaagaaaaaagagagagattggggtgactatagcaacattagacaaaatagactttaagtcaaaaactggtataaggtacatgaacactgtataatgataaaagcatgaactcaccaagaagatatacacatttttctcaagtgcacatggaacattttccaggacagactatggtaggccaaaaaataggtcttaatagtttaaaaacatttaaatcatagaaaataccttttctgataaaaatgtaatcaaactagaaataaacagcagaagaatccacatatatgtggaaatcaaacaacctttctctttttttttgagactgagttttgctcttgttgcccaggctagagtgcaatggcatgatctcggctcactgcaacctctgcctcctgtgttcaagtgattctcctgtctcagcctcgtgagtagctgggattacaggcccccgccaccagcctggctaatttttgtatttttagtagagacagggtttcaccatgttggccaggctggtcttgaactcctgacctcaggtgatctgcccaactcagcctcacaaagtgctgggattacaggcatgagccaccacacctggcctcaaacaacatattcttaaacaaacaatggatcgaagaagaaattacaaggtaaattagacagtatctttgaatgaaaatacaatataccaaaatttatggcagccagcaaaagcagttctaggggaaatgtataactgtaaacacttcgattagaaaagaagaaagatctcaaattaatgatgaaactttacatcttaataaactaaaaaaaaaaaaccaaaaaacaaaaaactaactaaacccaaagctggcagagaaaagtaacaataaaggttagggcacagaaataaaatagaaaattttttaaaaaataggaaatcaggccaggcgcggtggctcacgcctgtaatcccagcactttgggaggccaaggcgggcagatcacaaggtcaggagatcgagaccatctgggataacatggtgaaaccccatctctactaaaaatacaaaaaaaaaaaaaattagccaggcatggttgcaggcacctgtagtcccagctactcgggaggctgaggcaggagaatgcctgaacctaggaggcagagcttgcagtgagccaagatcgcaccactgcactccagcctgggtgactgagcgaggctccatctcaaaaaaaaaaaaaaaggaaatcaacaaaatcatgtgttctttgaaaaaaaacaaaacaaagaaaaaacaaaacaaaaccaacaaatgaaaaaacaagggctgggtgcagtggctcatacctgtaatcccagcactttgggaggccaaggtgggtggatcatctaaggtcaggagtttgagaccagcctggccaatatggccaatatggtgaaacccgtctctactaaaaacacaaaaattagccaggcatcatggcatgcacctgtagtctcagctattcaggaggctgaattgcttgaacctgggaggcagagcttgcagtgtgctgagatcacgccactgcactccagcctgggcggcagagctagactctgtctcaaaaaaaaaaaaaaaaaaagaaaacaaaaaaactaacaaatctttagctaggttacccaagacaaaagagagaagacaactaaaattcaaaatgaaagaggggatattgctgatttcacagaaataaaaaagataagagagaactatgaatgattgtatgtcaacaaatggatgatctacatgcaatagacaaatactacaaaaacacaatctaccaaggttgaatcatgaagaaatggaaaatctgaagcctataactcatcaggtgattgaatcagtaatcaaaaacttcccaaccaagaaaagcccaggactaggtgaatttactggtatattctaccaacatttagggaagaattaacatcaatccttctcaaactgttccaataaattgaagaggaggtaacacttccaaactcactctacaaggccagcattgtctgataccaaagccaaagacactgcaataaaagaacactagcaaacaatatcccttataatattgattcaaaaattctcaacaaaatactagcaaaccaaacacaacagtgcattaaaagattatccaccaggaataggtgggatatattcctggagagcaaagatggttcaacatcaatggtactgatagttcaacaccattcaacaaagatggtttcaatgcacaaaatcaatcagtgcagtacaccacattgatagaataaaggaaaaatatcaattatttcagaaaatacatttgacaaaattcataaaacacttcccttaatcaatacctctaaactctatcacatcataaactatgcatatactttcaaccccaaagcatcctaaaacaactcctatttaaaaatacacttatatccatgctactcacaaatatacatcccaagtatatgcaagaaccctagaaataaagaattaaaatttctgaaacccacatatacatgatattattctattctgctgagcagtctaggaagaaaagaataaaaaataaataaataagaaggaaatagccctcgtgtgccccactgagggggaggggtgggccggaggtgtgggtggagggtttgcagttccattgcagcaagggctcctgtgtccctgtgcagaaatgtcacatggagtcctgtcatgtcacatgagagcgcagcacacagacactcacaaagagaggggaaatacacggtgcctggctgtctgccgcccccggcgcctcccccagccgccctggccaggccctttgtgcactgctcccactccctggccccataccctccccaccactgggtgcctaaacttggctcaggctgctcagtaaagtacagaactcgagtcccactggaacagaagatgaactcaactgaattcagtgaagatgtagaagaacttctaagaagtgagagtggagacaggccaaagttgctgctctaggcagctccatgaattccaggacttctgagaaacaccctctggaaagcatcttcactgccctccaggacttgactggtcagcaatggccagccagagtccgtccccagcatagagaggaggcagctgatcccagaggtgctcctagcacgaatgtggaacctgagaaaatctagccctgccaaggcaatggagagcaggccagcagggcaggagctcaggctctgtgtggccaggcaaggaggagctctgcaaccatgccaccaccccttactacaaaaagcctatgtatggcacctcacacaagttcatggagaagaagaaccgtccctcaggggacctgctaaacatatatgagctcttccagaaggtaaatgccagcaacagaccctcgtcacttaggctcctgaatgagccacagaagtgggactatggcagcactggggtggccaccaacagtgaccctaacatctacttcctgatccagaagatattctacatgttcaacaccctcaagtctaacaggtcccagctgcacagcacaatggacatactctccctgaaggtgaaccccactgagatggtggccaaattccagctgcccccaccaccgcatagcagctcatgggccgcagagctcaagcagatggtggaccagagcctgtcgggtggggtcttggcaggctgcccactggtgcagctcttccccaagctcttcagctgcagttgacttctcccgaggctgcagtgcctgtagctttgaggccaagcgtaagttggagtcactgcacctgcagctcatccacaactacgtggaggtctactacccctcggtgaaggacatggccgtgtgacaggccgagtgcttgccccagctgaataacttcttcagccacttctgggcccagagggagatggagaacagccagcccggtggccaggctgccagcttctttgaggccgagcagtggaccccggccacttcctggaccacaaagacgaggaggacggcctgtctctggaccggagcagcaccatggcctcagaccacgtggtggacatgcaggacctcaccgagttcctggatgaagcctcttcgcccagcgaatatgctgtcttcctcctccactggctcttccctgagctctttgaccactgcaagctgggcgagtactacagctgctatggggatggcagcaagcaggagctggagccgcagaggctgcagatcatctgcaactacacagaggtctacttctcccatatgcaggaggaggaggcctggctgcagcagtgtgcccagcgcatcaacgacaagctccagggcctgaggctggatgcgggcagtgaagacgagccccccacgtgatgactgctacaactcctccagcctcccgatgacatctcagtaatcagggtggaggatagctccaagggcgagcagcgccgctccaagaagatctggctggtactcatcaacctggacaaattggagatcccccagcccaatttggaggtgcctggcaccgactgcctgctcagcaaggagcatctgcacagcatctatgagagcagcctgtccattggcaacttcgccttgcacctgctggtgcccctgttccccaagctcttcacccatgagaacctgcacaagcagtacagctccagcggttccctgggcaagaagcagctggacctgtcctgcatcaagctcattcgccagtatgtgtgtctgctctacctccatgccaaaaacgaccgcttctggaccctggagttcatgggcaacctgcgccgggacacgagcagaggcgctcctaccagcagcagtgcaaggtccacgtgctggcccccagtgcagagacatgaggagctatgcaatcaaccctgagaggtttgaggaggagtttgagggtcccccgctgcccccaagaggagcaggaaggacttttgcaagatccccttggacaaggtggtggtccctcgcccagcttcccggtgccctctccctacctgctgtccgacaaggaggtgcgcgagatcatgcagcagagcctctccgtgggcaacttggctgcagggctcctccactgccaagaacctcccgctgcagtacaatcattcccgggcttgcaacaagaagcagctggaccctacgcagctgtggctcatctgcagactttttagtacacttttagtgtgctcacttttagtaccttttagttccctttttttggttgaaagtgagacatgatacactgggcaaaaggaacagaggtaaagaggtcttttgtgtaaggctcttgtgtttatctggctggtagttagactgtcttcactgtttggtgttgctgtaggtgtcagaggcaaaatgtactcaggtgtccttgttagtatctccccgcttgtctttgagtttccctagagactccttcttaaataagtgctgagacagtcaattccttccattataattcccttattatacaaaagtcctactgatgtggtgaggaggcacttatgtgggagaggaaatgttcgataatcctgtaattaggttccaggcacagtgcacagtgagcctatgctcctaggctgtgacctgcacatgtgcttctcagtagcccgtgtccctggtgggacaggaaggcacagggaactggagtttgacacttctctttccgcaactcagttagactctgataaaaccccaatacattaggctctggtaaaaatattttctgttaaggataggtttttgcaaagtagaactaatgttctgcttttatttcaaaatggttacttttcccatcgtcctgccaaaatcaggagggggtttttctctgatctacaccctgagaatctggtaaggctactgaaggtaaaactcctgaaagttggggctctcctaagactggacatggagtttttaactgtcaagctcatccacattgaaccctcagcactttgtcaattacagtttaggtttttctaccctgggattggctccaatagccagcttttacatctgagcttcccttcagattaaccgtgattctctgtatctgcctgtctccagttttgagggtagtaatctgccctgtgacctcaattctctgacagatctaagaagagttgttgactttcagtttgttcagcttttttttttcttgttttgagaatgggagtgatgacttccaagcttcttatactccagactggaaactggaagtctttaattgatcttggttcatttcatttcactcccatagcttgtctggggatgactttggcaacaaaagcagcagcccatgcccgtgcaccatctgggagaacaggggggccctgatgatgactctagggccctccatgccctactcgtctctctcttcaggagtggatatctgaggctcactttggggacaggtcagagtaagcctccctcaggtgtctgaggcttggataaaaggcatcttgggtgcagtctgtgggtgtggaaagaacagtgattgagctctctcaagagagatctcagtttgaatttctgttccactacatactacctatgatatctttaaaaagccactcaaccctggccgggtgtggtggctcacgcctgtattcccagcactttgggaggctgaggcgggtggatcacgaggtcaggagagtgagaccatcctggctaacatggtgaaaccccgtctctactaaaaatttaaaaaattagctgggcatggtggcgggtgcctgtagtcccagctactcgggagaatgaggcgggagaatgaggcagtagaacggtgtgaatccgggaggtggagtttgcgatgagcggagattgcgccactgcactccagcctgggcgacagagcgagactccatctaaaaaaaaaaaaaacctactcaaccctaataggctgcagtttatctttaaaaataaactaaaccaggataaggatactgagcacttacattggtttcaagaaacagggaaactaactgtgcaggaactgagatttgtttgatctgtcgcgtggactaggtatgtatccccaccctttggtttagaggcctgagagcatccaggaggacaggaaatcacctaacccctggcataaggtgtataacaggcaggccctcaggacacagccagcctgtggctgccacaaaggagaatagtggctctggggacagtggagtggctaatactctaaacagaactgcccaagctcccctgaccttctggagaacatgcgtggagcacatgctgtcttggtaactcactgacctctcagagtcctgagcagccctgctctgagaccccataactgagcttaccaccaggggagggaacactttctgtggagaccgctgagctctaaggctggacactagtagtggacatattactaggcatggcagtacctcagtggtggagctctggtcagaggcagggactgctggaaatacccctacaggagtggatactgggaagacactttcttcaggcctcacaatattattttggggtgagaattcctgcatgagtagtagagggtttaagccagtgaggtcctagtgttgacatgcatgtgagtctatctgtgccccttgcctgtgagggtacaggaaatgtggccaataccaagactggggacaatgtgcactgaaacttttggatggcgccttgtccatacagacatgtgctaaatgggagctctcccgttttcccgtggtctctgaaggctgggggtaggctgtgctgagaggcctctaggagtcctgctggctgcacagggctgtgtccagcaggcttgcaggaaggatggcccagaacactattttgaggcttattgctggggcactaaatcctgcatcagctaagtagataaggtaataccaggctctaccagctggaggagtacagacttcttggggcagggttggccaagggccttagacaggagggagcatgtttatgcaggattgggggctttggagatgggcagtgggtcaagtgcctgcagacttggggaaagcagggcctacggggacaggtgaggaggggcaggaattgtccctaggcgcagagctctgagcatggctgacctaaacctcggcttttggcttggcatcaggaccctcctccatctgcttctgtcagtctttcccagaccctcatgttttgaaagcactctagctgcaggctggaaccctcttctcatggctgggatcctgttccccagtcctgctcaattactttgtgcaccagccacttccctttttccgtctccactgggagtcgaacctccctcctccacgccccaggagcgctgttcctgtacttcagagaagcccttgctccctgacactgtggacaccaggtgtagtttcagctcctctgaaggcctgggtgcttcctgtggcaggagcaacgttgagtgcagactgaccccactccctcccagctggcggcctcagctccctcagcacccctagtgtcccccctacccctgctttcctcctaggagcccacagttgagattctttgtgtgaggtcccaggttcctgccctgggagtcagacaatgaatcctatggaaagggcaagcactaaggagcaggaggggccttggagggccgtgcggggtggaggaggagcagatgactcttttgttgggtttggttttgtgttgccaagcttggtttggggaatggcagttgataggcagaaaagccaggattaggaaccatttagagggacagtgggctagggagagggagggtcaagcatggacacctaggccgagcagagagaaggggtcgaggggctctgcggtcatcacagggtctgccatggggccctgagggtaagtggcagcaggagccaggtctgtggcagcacaagggctgcgcagggcccaggcaggccagcagccctcagaggcttgggtggagagcaggtgtgaggagccagcgcggggtcagaaagaggagtgagcctcatgattttgtcaatccagttgatgaagtaggtgaccctggtgaagatgctggggtaggcaggatgccggcagtccaggccccagctggccagccccaccaggacccaggcactggggaggtagcagactagaggccccccagaatcgccctgagaacaaagaaagaggagttagctttgggggatgagtgtgtctgagacaccaggtggcaaggtcggacgttctgcgcctctgctctctgagtcagggtcccgctgcagacccaccagatggaaatctccaggcatcaagctcctgagctgaccctcagagtggacaatcatagatctgaatctaccaacacgtgaacccaccctctgccctctacacccaggacaacacactgcttgaagcctagaggggacagctgtatgtacagggcctgagaggcgctgggcctgctagcaaagcacagccagctgaaacctctgtgcagagcgcagctcttgtgaaccctaagctgcagcagaacatcccctctgggcgccccgtccttttttgttcatttaggcctttggttttctctcaactttttggtaaagtatctttagaaagtgcccatgcccaggccctgtggagacagcccacatcactagggaagcaggcaggggtctccagaaagttgcttggagttactggagtcctgaaatgctgtcagggtgggatcatgcagttgaaagccccctatatcatgggccaaaaagtgagacccaaagaaagggtctcagctgggcacggtaactcacacctgtaatcacagcactttgggaggctgaggcaggcggatcacgaggtcaagagattgagaccatcctggccaacatggtgaagccctgtctctactaaaaatacaaaaattagctgggcatggtggcgtgtacctgtactcccagctactcgggaggccgaggcaggagaatcgcttgaacccaggaggcggaggttccagtgagccaagatcatgccactacactccagcctggcaacagagcgagactccttcaaaaaaaaggaaagaaggaaggaaggaaggaagggagggaaaaaagaaagggtctcatcttcagggtggtgggaggcagggcccacagccggctcttccgcccactagtccagggtgcacctggggcatccagtgcaggcactgctcttgggaaacacggggaaaagacaaaccctgtcccccatggtgcatagataaataagccaactgaccctatggaagcgggaggacatttcgtatccatggatcacaacaagctttcctgaccttacactcaaataggaaacagaacctacttctgcgaggtccagaagagagggcccagttggcgcaaaccaggagaggatggggcaaaccttgtgggagggagtgagggggcagagggaggtctcagagctgcagaggggcaacttggagaactgtatgctggagggtgggggacacgtgacctgtttaaaccatcagtctggtgccatgtagagaaagaagttgctgagcaccaggtagagaggagggaccagggaggaaactacaggagggaagaaatggtcagatttgggatggtattttgaaggaggagccaaaggacttgtggactctggccttttcttaccaaccagggaaaaggagtggagacaaaaggaagaaggctaagaactcggctctggggtctccagcactgagaggccggaagggcccagcccctctcaggccctgtacatacagctgttccttctaggcttcaagcagtgtgttgtcctgggtgtggaaggcagagggtgggtccacgtgtgatagattcagatccataattgtccactctgagggtcagctcaggagctttgatacctggagatttctatctggtgggtctgcagtgggaccctgactcagaaagaggaggcacagagcatccgaccttgccacctggtgtctcagacatgatcatcgcccaaagctaactcctctttctttgtcctcagggtgattctggggggcctctagtctgctatctcctcagaggcagctggtagcaaaaagtgggagtggagtggctggcgactggcaccagcagctgagcgtgagatgctgctgatgtgtcaagggagcagtgactctggcaaggcagaggctgtggacaaagtggctttggtggcatgagagggacaaggctggtttgggtgattcagtgcagtcaggcctgggaggagtcttcagggaagaaaggtggagaaatggggcagtagctggaggagattgttgccatgccttgacgtgggaggcatgagagggagggcaggggacacaggagtaggggaaaggccctagcgacccggtgctcaaggatgggttggcccagggtgagccatcggggcaagggggagagactaggcagatcagggtgggcagatgtggggccaagaagagcgagcttctcattgcttcatcttctcagtttgatgagaagcaagagagcacactgagagggaggggcctgggctgggggagtggaggccagaggagagagaaggggtgacgtggtgcggtcactaaagaatactcccaaagacatccatatcctcatccctggaacctgtgaatgtgttatcttacatggcgtaggggactttgcaactggagttgagtggagactcttgagatgggagattattctggagtatctcaaaaggcccagtgtcatcacaaagttttttataagggaaggcaggaggcagaagggtcagagtcagaggaggagatatgacaacagacacagaggtcacactgatagctttgaagatggagaaagagaccatgagcccaggagtgtgggcggcctctagaagttggaaaaggaaattgaatctcctctagagcctccagaaaaaaacccagctctgatgacaccttgattttagacttttgccctctagaactgcaagataatagacatctgtggtctcagccgcccagtttgtggggatttgctcctgcagccctggcaaattcatgcccggggtcttcttgggagtggaaagtgccttcgctgtctcagatccacccctcagtgcttccctactcggagtgcccacccagcttgtttgagggcaagaggaggcctggtcctccgggcaatggtccctgactactccaggcctcagtgatccatgcagatgaaccacctgcttgccaacatcacgcttgattctgggccagtctgggagagacgggaaggactccaagggtctcctggccctgacccttgggagctccgagtacgcagaggaagtcccaacattaatgtaccccatgcaaactaggctgtggtttgcactactgtggagacagaggaagccacgtgtaactggtgggcctggtggtgaattccacattgggtgaaagggcaggtccgagataggcccagaagaatgagtacaactcagatagaggaaaacagacaaggccaggaacatggaagccaacacttattaagcacctgctaaatgccaggcatggtgctacatttctacaggaaccttatgaagtggaggctgttagcaagcccactgcacgggtgagaaaacttagctaaggtcacagcacatgcaagtgacagagtgaagactgcaaccagctgtgtcctgctcgcagtctgagcgctgagtcaccctgcagctctctctctcctcaaagctgtttttgcgtgctccatgcagggaagagaagagagccacagggtggaggcggggaccacagcagatggctcagcaggagatgaatccagatggaatctcacagacaggcagtggtggctgaaaggctcaggagatgtccacctcagtggtgtccttggcctgggcaaggaactagaggaggggcagggctgagggcactgtggaatgtccagcaggtaggcaaagtgtgctggccctgaggctccaggggcatgacctttgcaagagaggctggtggggaacaaggctggaagggagctggactaaggacttgttggctgagccccaccagggctgggcattgggcaggctccctgctccccctggggtacagatgactctgtgaggagaaggggccaggccacagccagaaaggaggaacaatgaagtatgtggacgtggacaggaaaccaagaagcctggggctggctcccgctgggcaggcaggtgggctgagctccctcccactactcagttagcttgccgggcaatattgaaaacagtgctgccaatgagcccttcccacgggccagggggactcagggctcagactagggggaaggaaagacctggttctagttttcaatctatcattttgctagcattgtggtctttgccaaacatatccatttccaagggcttgccataacacactgccaccaccttggtggcttagaagcaacagaaatgtattctctcacagttctagaggccacaaaactgaaatcagtgtgcttccagggacacactacctccaaaggctctaggggaagaccctcccttggctgttccagcttctggcggcacaggcattccttggcttgtggcggcatccctctcctctccatgtctttctgcacatggccatcttctccatgtgtgtctctatggcctctccccctcttttaaggacaccagtcattgaatttagggcccaccctaaatctaggatgggttcatcttgagattcttaactaattacatctgtaaagatcctacttccgaataaggtcacactctgaggttccaagtggacgccatccttccaaccacctcatggaggaggccttggaatcctcacgcagctgatgaggacccaggctcaggaggtgaagagaacatcccaggtcacagggcaggcacatgtggtggagcaatgtctctcattccagggtcccagcactttcctctctgccctacagtggtgtctatgcaaaagctcggcccacagatgtcagcttaagaggctaccacctgtgggagaggttgtggaggcagggttggccttggagtcgcaacacctgggcccaggttgtactgcctcacttaggctagccacttttcctctctgggcctcaatttccccacctataagatggaacattacagaaggttgaaaaggattttcacaccatgtatcttactgtgaacttatgtccggaatacataaagagctcctagaagaaaaagacagacaacccaacagaaaaatgagaggagaaaaagaacttgaagggaaacttcataaagatatccaataataataaacatacaaaaaattttaagccaaaaactacacactcaccaaaatggccaaaatcagaaaagatggaaaggaataaaagttggtgagaaaagaagctctcatcctctgctagagggaaggcggtttgctatcctctgccaaagctgaacacacagacacatctttttatctagcaattctactcataggattctatgcaataaaatatattcatctgtgtcccaaagacaaatacaaacatgtacatagcacagctacttataatacctccaacttggaacctactcaaatacttatccaatgtagaattcaactcacacaatagcgcgctgtcgagcagtgagaagaacacaccataacaacgtgtaatagtatggacaaatctcagaaatacactgttaggacacaagagagtgctgactgtaaattccacttacaggaatttcagaatctacggtgttaaaagtgaaggtgtttgttacccttgggcgttagtgataagaaggaggcacatgggtgcttctcgggtgctggtaacatgttgtatcagtgtgggaaagttcaccaaactatatacttattaattatgtactcttgtgtatatatattatgctttaataaaaagtttaaaatatattaaaaaatgctgtttgaagatccttccagcagatgttcctgctgagatgcgctggggaaggggctagtctaggggagacttctgagggatggagcccagggaggacactcagaggagaggaaacaggaattccaagggacaccacaaagaaagcagaggcaacacagagacccgtcccaagggaaactgaggccaagagaatatgcaaaggaagagaggaaatgaccgtactcactttgcagatggactttcctgtcgagaagtccccccccacacagcatctcctcgtgcaaagcttaggtctcgcctttgccagttctttgcccatataaggtattacagagtgtgttctcaatgaggcccaccttgccctcctggagatagaagggtggtgacagttgcactgaatagataagggggagatcaatgacatgtcctgtaggttaactaagaaagttcaggctactctgagcccctactctgtctgactgctaaccacaaccccccaaacataggttttctcagaactgctgagctttaactgctgcttcactctactacccatccttgataagcttctcttctttttctcaaacctttgcacatagtcatcctattccctctacctctctcatagcaatagatcacacctctcttattctacaagaggcaaatcccaccaacacatgactcatttattggaacttagcaactattcactgaccaacttactctttcatgaaccatcccatccattctccctccatctatcactaacctttcttctccacccatcatcccatccactcactcacccattcctccatctacctatcttcccacacctacccattcatccactcactttccagatatttgcccatccatccatccttgcagccatctctccatcgagccctccatctctcacccacctatcctcctctccacctactgacacatccacccactgacacatccacccactccatctgtccacccctcaccaatccttctatctacacatctatccaaacatccatctaccaactcaaatatcatccatcaatccatccatccatccactcatccctccacttatccttccatccatgcagtcacccatcattctagccatccattatccatccatttatccattcatccatccatccatccatccatccatccatccatccatccattcactaacacaatcactgatctattcactcatctattcagctatcctggtgctgtcttttacatgctaatgatatagataatttttagtagaaagtgacagattatatgaaataataaattaaaaaatattttagattaagtgatatgaagaaaataaaacaggaagatgtgatagagggggttgcctattttagctcacatgattaagtaaaaccaagaaaaaaaactgaatagtaaatgtaaagaagtgactcctgcaaagatgagaatgacaagcaagctaagaaaaaaaaaaaacagcagctaaaggccccgagatagaaatagccttgagatgttcaaagagtacccaggaggcccaagaggatggggtggggtatgtgaaggctgcagtaaaagatggggtatgtaatggctgcagtgaaatatgaagaatggaaagggtgcattggaaggtgggatgtgtcatgactggagcaggagatgggggatgtgaagggtgcggtgggaggtgggggatgtgaagggtgtggtgggaggtgggggatgtgaagggtgcggtgggaggtgggggatgtgaagggtgcggtgggaggtgggggatgtgaagggtgcggtgggaggtgggggatgtgaagggtgctgtgggagatgggggatgtgaagggtgtggtgggaggtgggggatgggaagggcgcggtgggaggtgggggatgggaagggtgctggaattgcaggcatgagccaccacgcctggccatgtgtctggatttcattttgcacaaatgagaagttactgtagaatactgaaccgggaagtgacatgactaatatttaaagtaacactccgacacccacatggagcctacagtgggggcacagaagaatggaagctgggtgaccagttccgaagctacaggcaagaaatggtggtctatcagtgtcatgcagcacggtggtaccagcccaggagcaccgtttgggatattaaaacaagtatatgttgcctctaccctcaaggtataaccagatgtatgtgtgaatgctggggaccagccagcagatgatcagggagaatcccctccatctggcagtcaaaggccatggatgctagcagagccccactcagtgaagacatattctatcaaaaatacgtacagcacctctgttgagaaatgctaaccctacacataattaaatatatgttcttcctttttcccttaacatcataccataagcatttccctaaactgtaaacactcctttcttcaataaacactcttgtgtataaatctttgcttacatttctttcctactcatctaacgatgaaaacacacacaactctctcctctgttattcagtcacgtaacaagactgtgaagtagatgaatgacccaggttaggataagagcaacatgaggttcagagaaggtcaagagttctacgtcgcaatcattctaactggatcatgcagcctcagactgcagagccaccatgtgttttctctccactcttcccaagcaccttcccaagcaagggacgatccaagtgtttggtggtgacctagaatgggccagcccccaagcatgtctttggagttcaatcgagtcatcttagtcccatggctgactaaaaccttaaaatagtggctcacgcctgtcatcccagcactttgggaagccaaggcaggcagatcacctgaggtcaggagttcaagaccagcctgacctacatggagaaaccctgtctctactaaagatacaaaattagccgggcatggtggtgcatgcctgtaatgccagctacttgagaggctaaggcaggagaattgcttgaacctgggaggcggaggttgcagtgagccgagatcatgccactgtactctagcctaggtgacagagtgagactccgtctcaaaaaataaataagtaaataaataaatgaataaataaataaaacattaaaaagaagaaccatgaagactcaaagaacccagattctggattctcaaaagttaaagattcccagactttcagagcctgggactcagggaactctaaagctatgggatcacaaactttcagaagtagaaaggccccagcgtggtggtcctcaccttaccggtcatggaaatgaggcacagagggccaagtccagtggcttcctctttgcctggctaagccatccttccttcttcccctctgcctccctctccttcccctccctcatcctcccgcctctcccacacccctcttatggtcttcggtgagcattccccagccggttatccaacaggacacgttactgggcagctgcatgtcccgggatgggaggcagacagggacaatgtaggaagtgaagttcataggcaggtgcagctgcaacatggcaatgtcactcccaaaggggtggagcttctcaaagtctggatgggtgatgatccggtgcacagacatcttctgggtgtgctgggtttgatgatacagttggatgtttcccaacagaacctgatagttcttcggggcctgggatttgctggaggaggaagggcccatttttaccattctctgagagtgcggggcagcactctctttttacatccacttgtaactgcccacacacctctgggtccttctcccctgacatgattctaggcagctttgtatccccctttctgacagtcaggagctctttttttttttttgaggctaatggctattctactcacaacctcaggacatatggcttccccagcacacccttgaatcagaggagcagagaatcctagtgccaggaaagtccttgacagagtcatcaaatccagcccttttattttacacaagaggagctctggcttaattctggctccagcctgatccttccgaaggctacctatgacctgcttcctggcctaaccacctttcctgctctccccaagggtgtcttccccactgttgtaagcactcataaaggatttgttcaatgcccagatgagtgcatgaaactgatgctcttcttgttcctgaacacaagtaatgaaacttctgacctttgtgactttgttcacatgggtcagctgccaggaaacccctcgccacactccccataccaaagcctcccctctggcaatcccctgcagctcctcatcctccctcaagactacagcatctctctggatgaccctgcctcgggtcagctcttctcactcactctgggctttctctcctgcatcctgcttgttggagcttgtgcctcgccttcccatagagacaccttcacttggggtcttgccacactctgtgccatagagggtcttgggtggtgtgacacccaggagatgctcacggtgcccaatagttggagtctcaaagccactaggtgcccaagctgactccatacctggactgtgatgccttcctctccctctgggtccctccatgactgttcagaagctgggcactgagtcaggctcaggagggccagaggagtagcacccctgactgtccatgtcattctccagggtcagggggccccactcttcccaccaatacatgcagcctggcacagctccttccaggcatacagttttacagaaaaaaagcatcgcctggctgctggctacctgcagagtccccagtccctgcctggagtctgactcacaggagcatggtgcacactgaagagaagccctgcaggtggccagcacagacactgccaatgctctcacgcatgtctgggttgagcagacagacacaggggccagggaactccctgccagagctgaggatgaaggatgaggaggttctgggcagatggagggacagtgggtggagagtggggaggacagtcctggtggaggggactacgggtcaacggcaggcactgcatcagtttggtggcagcagacttccccagagcaaagcccagaggagaaagacataacccccccagccccctaaccctcgtcccttgcatcttcctccccatcagcccctctgctggggcccagggagggaggactcacttgagaaagcagtgggtagttgataccagccagcaggagtcgatgaggacagctccacagaggtgcgagccccagtagagcaggctggcctgccatggccactggccagctgctgcgtcccggccaccatagatcttccccaccaccttaggcttcccacacactgtggagacaccccggtccacctgttagagacactagtggtgcccatgaatgccaccccagtgaggcctctgctctcttcacagatgggaaaaccaaggccaaagaataggtgacctggccaaaatgactgagggctactccagcatctgccttctatggccactagcaggaccagatgacagagtacaattgagcaggctctgtgggaatgagggaccaggggtctggcaggcagggcaaggctgacccagggtggccacagcagctcatccggacctgccaaggactggtggactggaatccagccctgggactttacttccctccatcagaacacctgcatgcctactttgcagatcaaagaactgaaggtctcgggggtgtccaagtggctgtgcccacccccgcacctcactccagtatcccagggagagagattctcaggcaggagtctgttgtgctgtgtgacttggggaaacttgctccctctctctgattcttgatcttctatttttagaaggtgagagggggtggggctgatgtggacagccttggttctgagactcacagctgggagggggagctgcgggcctggacccctgaggggcagtgtcctgatccctggcctacgcttccaggcctcaacaaggggacatgagaccccagggcccaccccactcccggggcccagcagcagtcccggtgctgtctccctccacccagccccggcaccaggcaccaggccctggcaccccgtccagtttcgtgggccccacacccagtcctgggaccaagagcgggaagcctgacccaccttgcttgatgtcgtctctggagccacctggctgggagggaaggagagagagacaacggattcgggtgacttccggccctggcaccaggcccagagccccggccttctccccaccgcctctagcctgcagttcccccatctctccgcagacgcctgcctctcccggacactccttacctcatctggtcttgccgagccctcgaccccctgcccccgtggcccagtggccccctcaaatgccccctgccccctgccctctgcctccgaggccggctcggccccacaccctctgcttcaaacggaccttgggctctggctgcgggctcccggccctgctgcgcccccaagctctctctggcctcccccggagcctgcgaggggctggcggcgcgggactgtggggcaggggcggcctctgggctcaggagcagcagcggcagcagagaccagagcaggggccccggctgggctctggtccgcgttgaccccacacccatcatcgcctgacacgaggacagaaggaaggggaactggagctgaccctgacccccgaaacaggcggtgactcctggccctgactcctgggaaacaggtcctgacctcgccctgaccccagccccagacaggcgctgaacccgtccctaaccccctcccaagacagcccctgaccccgccctgaccctccccatgtccgacccctgagacccaggaagcagtcttttgccaaagaattccttaggcagcggcaggttccagaacaaaggagagggtgaaagctgcggggagcctgtcaatccttctttccactacagagccaggtgtctgggaggacctatggtgcgctgcctagcccaccgaatgaggcagggacagaaggcgctatggctgtaggttgccgtcactgggccagtgtagccatcacctggcccggctgtgaggccccataggcagctgtccatctacagtgtctggcaggtttttgctggtcagcagctgagctagtgccaagaaggcctctttctccttggggaacatcagcaggacaacagcgacctggctcacaccctggcagtagcccatgtcctgcaagagtcaaagtcactgcgctagaacctcacctggcagggcagaggtcacctgggaggatagacctcacctgagagatctgaggtcacctgggaggcctaaggtcacctgagaggcccccatctcaggccttgcaggatttgacactaggcacccttctcctgacagaataagcccaaagcacacaaaataaagcctgctgcctagaaaagagacaaaagaatgttgtgtttgttttgtgctaatgctgtttaattttgtagcaaaccctgacaatgcaactgaggcccttttaagattgtctgccaagtaagtagtgagatcttcagggcacctcagtttctacattattagggtaaaatctacatacaatgaaatgtaagtatcccatgtatacgtttgatgagtttttatttccatcctggttgatttttttagtttgcacacacgaaagttcagtctcagggctgtgcagttccatggatctgagccaatgtgtagagtctcccatccaccactccagcaacaaaaggagcagttcctacatccgcaaggtctcccatgcatcccctttggagccaacctctccccactccatcagctcctggcaaccacggatctgttctccatccctatggttcagcattgtccaaaatgttctatgaatggaatcatatcacgtgtgccttttgcgtctggcttctttcacttagcaaaatgcatctaaaattcatccatgtggctgggtgcagtggctcacgcctgtaatcccagcactttgggaggtcgaggtgggtgtatcacctgaggtcaggagttcaagaccagcctgaccaacacagggaaaccccgtctcgactaaaaatacaaaaattagctgggcttggtggcacatgcctgtcatcccagctactcaggaggctgaggcaggagaatcaactgaacccgggaggaagaggttgcagtgagctgagatcgcaccattgcactccagcatgggcaacagagcaagactccatctcaaaaagaagattcattcatgttactgcatgatcaatagcttgttccttttatcactaaattgaattctgttttatggatataccacagtttgtccattcccctgttgatcattttggctgcttcccgtttttaatgactaggaacaaagcagtgaatgttgcatgcaggttttatgtggacatacttttcaaatcagttgggtaaatatctatgagtgctttcgggttccatggtaggcgtatacttagctttgtaagaaactgccaaactttcttccagatgctgtatcattttgcattcccccagcagtggatgagagtcattgttgctccacattcccccaggccccgccttttccctccaggcatctgtgaaacgcacagtgcacacccagctgctctggcctggcccccagcctcacctcagcaccatttcctgctgcatcactctggctgcagctcagcggctctttccccctggccctctgtccccaccccgctcactgttcactgggtgatatggtttggctgagactggataatttaattccatctcaaattgtaatccccatagtccccatgtgttgagggagggcctggtgagaggtgattggattgtgggagtggtgtcccccaggcctgttgccatgtaagatgtgcctgcttccccttccgccatgatagtaagtttcctaaggcctccccagccatgcagaactgagtcaattaaacctctttcctttataaattactcagtctcgtgtggcgactttatagcagagtgaaaactgactaatacactgggccagttccttgtctctctgtagatctgggcttgcatatgcgtacctaggagtcccttctcctcacactctctgttttttgtgggttgttgtggcttttgttgtttttgagacagggtctcatttcgtcgcccaggctggagtccagaaatgtgatcaccgctcactgcagcctcaaccttccaggctcaggcaatcctcctgcctcagcctcccaagtagctgagattctacaagtgcatgccaccatgcccagctaattttgtgtgtgtgcgtatttttgtagagatgggttttaccatgttacccaggctggtctccaactcctgggctcaagcgatcctcttatcttggcctcccaaatgtggagtcttaattagggaaaaggagtcaggctggtgggaccaaatcaaagcaaagagataaagcagataagctgtaaatatgcttttcttcacggttcaggacatataaacaaaaagagaaagcagaagaattataggtctgtttttccttattgcccaggacatacagacctcctgaacaaacaacatacataactctcaaatttctgcttagcatcaaatgcctcaatttatcaaacatcctggctgacagaagagtgcaagtttgcaagttagttcccaagttccattctataaaatcctcagcaagcatttgtttcctggcagttagcttctctcttgcaggctgcccattgccttatcacaatgtattttcctactttctttaatacatctgcctttctctacctacagctgtcttggtagtttcttttacctccacgccaccagcccagatagtcgttgctccccggtgacacttgggtggcccatacggggactctctctcctattgggaaactctctcccctctctcttttcatttcccaactcaggacccttagcggacaaagtctaagcacagaggcaattgcaggtctctggtcggagtgacacgctggtgagactgaaaggtgtctgtgtggaagcatctaaccaccactgcccattcaggtgagagacctaagggtttttttgttgttgttgtttgctttttttcggtctttcagaggctggcttctagtatctctctggcaactgacagtaactggctggagctactccccagtgttccctgaaagccaaagagtgaacagggctagctataccacctataagggtgaaaggctctctcctatatgttctggctagaagtccctaacccctatgtgtaacatgactgacagcagaatagatttttaaatcaactttattaaagcatactttatatactatgaaatccacttattatattttagagtttaatgagatttgacataagtatgtgccaatgtaaccatcactacaatccaggtatgtcatatttctaccacttgagaaggttccctgtgctttctccagtccatcatggcccacttcaacctcaccacccactgggaaaaaaaagaaaaagaaaggaaggaaagaaaaaaaaagaaatatggtcccagacaagcattgatctgctttagatgtctttttttttttttttttttgggatggaatctcactctgtcgccctggctggagtgcagtggtgcgatctcagctcactgcaacctctgccacccgggttcaagcgattctcctgcctcggcctcccaagtagctgagattacaggcgcctgccactgtgcccagctaatttttgtatttttagtagagacagggtctcaccatcttggccaagctggtcttgaactcctgacctcgtaatccacctgcctcggcctcccaaagtgctgggattacagtcatgagccaccatgcccggcctagatgtctttttcatacaagttgaatagtaacacaggtatatttagggatctggcttctctcagcataatgttttggagattcatccatgttgatgagcaataataattattcttttttccctctgagaagtagtacattgtaaagatataactcaatttattaaccttttcacagacatttggatagctttaaattttttattgttataaataaagctgctaggggcattcctacataagcttttatatggacatatgctttcattttttttcccggtaacaacctaggagtgcaatttctaggctgtttggtaaatatatatttgatttataagaaattgccagctgggcatggtggctcacaccagtaatcccagtacttttgggaaggcaagttgagaggattgcttgaggccaggagtttgaaaccagcctgggcaacatagtgagaccctgtctctacaaaaaataaataaataaataaatagttttaattagctgggcatgatggtgcatacctctagtcctagctacttaggacgctgaggcagggcgatcacttgagcccaagagtttgaggttatagtgagctatgattgcactactgcactctagcctgggtgacaaagtgagactctgtctctatttaaaaaaaaaagaacttgccaacctgttttggaaaaagattttatccctttgcattcccaccagcagagtttttgtatgctctgaattctgtccaacacgctgtagtatcagtctctgaaattttagccatttgaatgatagtatagtagtatttgattgtggttttaatttgcattttcctgatgactaatgatgttgagcacgttttcacatggtttttttggcctatttctctatctccttttctgaagtatctattaaagacatttaccttttttaattgggttgttttttattattgagtgatagaagttctttatatattctggatacaagtccttagtcagaaataagttgaatgtttagaaataaaaaatgcatggcctgaaattaatatttattatgggcaataaatggcagaataaaagattagtgagcttgaagacacaggattagaaattacctaaaatgagaaatgacacagagggaagaaaagagtagaaaacagagaatcagtgatgtgcatgggacaatttaaaggggcttaatataaatttaattgaaaactccaaaggaggcaggggcatacaaaaatatttgaagaaattaaggcaaaacatccccaaataatgaaatccatgaacatacatatccaaaaatcgcaagaaatgcaaagaaaactacaccatgcacatcataatcaaattacttaggctgggatctgtggcttatgcctatagtctcagcactttggaaggccaaggcaggaggatcacttgaggccaggagttgaagaccagcgtgggcaggtggtgagaccccatctctacaatgcaaaataaaaaaaaaaaaattacttaaccagctataaagagacaaaaggaactaggaaaaaaaaggaaaatttacagggaataaaaaataagaataagggctgggcatggtggctcacgcctgtaatcccagcactttgggaggccaaggcaggcagatcacctgaggtcaggagtttcagacgagcctggccaacatggtgaaaccccatctctactaaaacacatacacacatacacacatacacacacacacacatacacacatgcgcacacacacacacacacacacacacacacacagaaattggctgggacctatagtcccagctactcaggaggctgaggcaggagaatcgcttgaatccgggaggctgaggttgcagtgagccaagattgcaccattgcactacagcttgggcaacagagacagactccgtctcagaaaaaaaaaaaaaaaaaaaaaaaaagaatgaaacaaacttcttatcataaacaatggaagacagagggcaatggaacactgacctttaaactactaaaagtttctaaaaagctgtcagctctaaagtaagggggtagggagacaataaacataaaagcagaagccaatgatatataacacagaaaaagagagaaaattgattttttaggacattaatgaaatcaatagaagagaggaggtggagcaagatggccaaatagaaccttccagtgatggtccccctacaggaacatcaaaatgaacaatgatccactcaagaaagtaccttcataagaatgaaaaaatcagatgagtaattacagtacctggttttaacataataatgacagaggcctggaagagggtaggaaggacagtttcacattgcctacagcatccttttcctaaccccaggcagtgcaatacaaagagagaatctatgttcttgggggaaggaaagtgaagtgagtgtaggactttgcattggaaatcagtgctgccctgtcacagtggcccataacacagggcaaaattctgctggtgcccaaggagggagtatttggaccagccctaggtcagagaggaatccctcataccagcgggaggaaactgagtcccagctggcttaaccaccagctgactaaagtagccttcatcttgaataaacatcagtggcagccaggttgtagtggccatgggctttggatgagcctcagtactgtgctgttctggaaagctgtgggcttcaagtgccattcaacatggagccagctatggtggccatgggagtgcctacatcacccctccttcaactccaggtagctcagtgtagtgagagactcctgattaggggaaagagagggaagagagtgacgaattttgcctggtaacccaggaaattctctcttatctttcccaaagccaccaaggtcacatgtctatgagtctacaagagttgcagcattcctggacttagggcactcacagtgctaaaacagctaacaatgaccacaggcttatgtaacaacactcaatcccatttcaattactgaaagccttctcaaaaaggatggatacaaacaagtccagactacaaagactgaaataaatacctaactcttgaatgctcagatatcattgaacatccacaagaatcaagagcatccaggaaaacatgatctcaccaaatggactaaataaggcaccagtgaccaattctggagtgattaaagatatgatctctcagacagagaattcaaaatacccatcttgaggaagcccaacaacttcaagataacacagagtaggaattcagaattctatcagattaatttaatgaagaattaacatttaaaaatcaagcagaggccaggcacagtggtgcacgcctgtaatcccatcactttgggaggctaaggtgggtggattacttgaggtcaggagttccacaccagcctggccaacatggggtttagtagaaaccctatctctactaaaaatacaaaaaattagctgggtgtggtggtgcatgcctgtagtcccagctactcagaatgctgagacaggggaatcacctgaacctgggaggcagaggttgaagtgagctgagattgcaccattgcacgccagcctgggcaatagagtgagaatctagcagaaattctggggcttagaaactcaattgacaatctgaaaaatgaatcataatctctcaacagtagaattgatcaagtggcagaatgaatcagtagattcaaagacaggttatatgaaagcacacagtccaaggagaaaaaagcaaaaatacgtaaaagagaaggaagcaatattacaagatctagaaaataatctcaaaagggcaagtctagtaactattggtcttaaataggaggtagatggagagactggggtagaaagtttattcaaataaataataacagagaaccttccaaacttagagacatgaatacctaggaacatgaagatcaagaacacttagaatattcaagccaaataaaattacctcaaagtatacaataagcaaactctcaaaggtcaaagataaagaaaggatcctaaaagcagcaagagaaaagaagcaaataacataaaaaggagctccaatacacttggcagcagacttctcagtggaaaccttaccagcctgaggaaatagaatgacattcaaagtattaaaggaataaaaactttggactagaatattatacccagcaaaattatccttcaacataagaagaaataaagactttctcagacaacaaaagctaagggattttgtcaataccagacctgttttacaagaagttcttcaatatgaaagaaaaggacattaatgagtaacaagaaagcaactgaagatataaaacacactggtaaacttaagtacacagacaaatacagaatagcctaatactgtaattgcattatttaaaccactcatatcgttagtaggactaaaagacaaatctatcaaaaataataatgacggccaggtgtggtggctcacacctgtaatcccagcactttggggggctgaggtgggcggatcacaaggtcaggagatcgagaccatcctggctaatacggtgaaaaccatatctactaaaaatacaaaaaattagccaggcgtggtggtgggcacctgtagtcccagctacttgggaggctgaggcaggagaatggtgtgaacccaggaggcggagcctagagtgagctgagatcgtgccactgccctccagcctgggcgacagcaagactccatctcaaaaaagaaaataataataataataatgataataataatgacaacataggaggctgaggtgggcgggtcacttgaggtcaggagtttgaggtgagcctggccaacatggcaaaactctgtctctactaaaaatacaaaaattagccacgcacggtgttgcacacctgtaatccccactactcacaaggctgaggcattagaatcactggaacccaggagacggaggttgcggtgagctgagatcataccactgaactccagcctgggcgacagagtaagacttgacctcaaaataattataataataacgacaatttcttaagagatagatgatataaaaagatataattagagaaaccctccccccaaaaaaaggcaaaaaacagccattgaggcaagggaagatggagtaacattgtagagttttttttttttgagttttctctttgcttgtttgctttttttccttttttctactcagtgttaagttttcatcagtttaaaataactagttataagctgttactagcaacccttataataaccacaaagcaaagacctatcatagatacacaagaaataaaaaaacaagaaattaaaacatattaccagggaaaatcacttacaaaggaagacagaaaggaagtaagaaaggaagagaggaccaacaaaacaaccagaaaaaatgaacagaatggcagcagtaagttcttacctatcaataataacattgaatgtcaatgtactaagttctacaaatcaaaagacatagagtggctgaacaaatttttaaaagacgcaactatatgctgcctacaagaaactctcttcacctataaagacacacatagactgaaaatgcagggatggaaaaagacattccatgcaaatgaaacacccccaaaaagagcaggaatagctatatgtatttcagataaaatagatttttaagtcaaaacctgtgaaaagagacaaagacggtcattatatgatgataaaggggtcaattcaacaagaggttataataattgtaaacattaatgtacccagtgctggaacacccagatagataaagcaaatactattaggattaaagagagagagagagagagttcccaatacaataacagctggggactttgacactccactttcagcattgcatagaaaatctagacagacaatcatcaacaacaacaacaaaaacccttatcagacttaatctgcatgatagaccaaatggacctaatagacatttacagaacagttaattcaacagctgcagaatacacattattctcctcagcacatgaaatattttcagagacagaccatatgttatgccacaaatcttaacaaagttttaaaaattcaaataatagcaagtaatttttctgatcacaatggaatacaactaaaaatcaataacaagtagaactttggaaactggagatactggctgggcactcacacctataatcccagcactttgggagtgtgaggtgggtgcatcacttgaggtcaggagtttgagaccatcctggccaacatggtgaaacctcgtctctactaaaaatacaaaaattagctggacatggtgacatgtgcctgtaatcccagctactcaggaggctgaggcaggaaaatcgcttgaacctgggaggcagaggttgcagtgacccaagattgacccactgcactccagcctgggcaccagagggagactccatctcaaaaaaaaaaaaaaaaaaaaaaaagaaagaaagaaagaaagaaaagaaagtatagaaacacatgaaaatttgacaacatgcctctgaacaaccactgggtcaatgaagaaattaagaagaaaatttaaaaatttattgaaagaaatggaaatgaaaacacaacagaatgaaacctatggtatacaacaaaagcagtgctaagataaaagtttactagaataaatgcttacatcaaaaaagtagaaaaacttcaattaaacaacctaacaatgcatcttaaaaagctagaaaagcatggccgggtgtggtggctcatgcctgtcattccaaaactttgggaggccaaggcgggtggattacttgagctgaggagtttgagaccagcctgggcaacatggtgaaactccatctctacaaaaaatagccaagcatggtggtgcacacctgtagtctcagctacttgggaggctgaggtgggaggattgctggagcctgggaggcggaggttgcagtgagcggagattgtgccactgcactccaggctgggtgacagagtgaaaccctgtcaaagaactagaaaagtaagagcaaaccaaacccaaaattagaagaaaagaaataataaagatcaagcagaaataaataaaattgagacaaataatatacaagataaaaaagttggagttttgaaaagaaaaacaaaatctacaaacttttagccagattaagaaaaaaaggagagaagaaccaaataaataaaatcagagagaaacaggagacattacaaataaaccgcagaaattcaacgatcactagaggcataagctctatgccaataaattgagaagcatataaaaaatggataaattcttagacacatacaacctacaaagattgaaccatgaagaaatccacaactcaaatagacccgtaacaagtaacaagattgaagcctataataaaaaaagtctcctgtcaaaggaaagcccaggatctgataacttcactgctgaattctaccaaacatttaaagacaatctaataccagtcctattcaaactattccaaaaaatcaaagaggagggaatgctttcagattcattctaagaggccaatattaccctgataacaaaaccagaaaaagacacaacaaaaaggctgacccagtggttcgcacttgtaattccagcactttgggaggcttaggcaggaggattacttttggtcaggagtttgagaccagcctaggcaacatagcaagaccctgtctctacaaaaaaaaaaaaaaaatttagctggctgtggtgacatatgtctatagttcgagatactcaggggtctgagacagggaaaactgcttatgtccagaagtttgatatttttgaggttacagtgagctatgatcatgccactgtactctagcctgggtgacaaagcaagactcttgtcttaaagaaaatcaaaatggtaaattttaggtatattttaccataataaaaataaaggaagttagttggactacaaaaaaataaatttccttcaatacagaatatgggaggagttcacagtgttgagataatgggaagcaaaataccatgaagtaagaggttgataatagtgcccaagtcaagataaatactcacaacatattgccaataagaaaaggcattgcaaatctcccactgacatagaaggaaatgacctaatatgatgaccttttaccagtgatatggtttggccctgtgtccccatccaaatctcttgttgaattgtaacccctaatgttggaagagggatgtggtgggaggtcatcggatcatgggggtggatttcccccttgctgttctcgtgatagtgagttctcacgagatctggttgtttgaaagtgtgtagcacttccctcttcgctttctctctcccgtcaccatgtgaagatgtgcttgcttccccttcaccttcggccatgattgtaaatttcctgagccctccccagccatgcctcctgtacagcctgtggaactgagtcaattaaacatttttaaataaactgtccagtctcaggtagttttttttgttttttgttttgttttgttttttttgagacagggtctctctctgttgcccaggctggagtgcagtggcgcaatctcggctcactgcaacctccgcctcctaggttcaagtgattctcattcctcagcctccggagtagctaggactacaggcacataccaccacatccagctaattttttgtattttagtagagacagggtttcaccatgctgcccaggctggtctcgaactcctgaactcagacaatccgcctgccttggcctcccaaaatggtaggattacaggcgtgagccactgcacccagcctcaggtagttctttacagcaatgtgagaacagactaatacaaccagcaagagaaaaacctaaagtaaaacagcaaaaagtgcaaccaacatttatacataaggattatatacaatgtgtaacaatagtaaagtgttaaattctaaaagatggctttagaattgcggatagacttttgtttgtttcatttcagatcatgaccttgagctgcatgacagtcttttttatttttgaaattttctgtagagatgggatcttgctacgttgcccaggctggtcttgaactcctgggctcaagtgatcctctccccttggcctctcaaagtgctgggattacaggcataaaccatgccacccagccccacttcttctaatgaggtagctgtcatttacattctcatttaatagagcaatgtgctgtctcattcagcagagcttttcacgggaggtctgatgagcaagaagaacaggcttgtgagagcaaataactaagaccataagcagaggcctgaggtggagctttcagcacagactgaacaactcaggccctctcagacaggccacctgcacatgagtatctaagaggggaccagaagacccctgtgagggcacccaccctggagcagcattcagggagagctggaagggctttatggggctaaagaattgatgggcaattggagtgggttgtgggaaagtattaaattatgtttgcgtgagccttgccatcaggaacatgttttatctttagctgatggcgacactgctagaagtaaataagctcttctcatgaaccaaaattcccagtggcactatggagtcctggttaagttgacaggtctctggctgagggaacacagaatccactttcagcagctgtgttaagagacagttaaccatgagtccattatagcattactttgctcaggaaccaatcacagaaaaggccatatgtggacatagtgagaagatggccagcagataatgtcaaggagagaggcctcaggagaaaccaaacctgctgacaccttgatcttggacttccaacctctagaaatgtaaagaaataaatttctgttgtttaagccacccagtctgtggtattttgttatggcaatcttagctaactaatataaacattatttctctcttccatttatataggctttgttttttttcttttcttttttttttttttttgagacggaatcttgccctgtcacacaggctggagtgcagtgatgcaatctcggctcactgcaacctccgcctcctgggatcaagcaattctctgcctcagcctcccgagtagctgggattacaggcactcgccaccacgcctggctaatttttttgtatttttagtggagacggggtttcaccatgttggccaggctggtcttgaactcctgatcttgtgatccacctgcctaggcctcccaaagtgctgggattacaggtgtgagccactgtgcccggcctacaggttttctttattatctctaaggaatgttttgtagttttcagtatacaagcactatacatctttggtcaaatttatctctgagtattccatattttaggatactattgcaatagggtttttgtttgtttgtttgtttgtttttgagatggagtctcgctctgttgtcaggctggagtgcagtggtgcgatcctggctcagtgcaacctccacctcccgggttcaagcaattcctgccttagcctcccgagtagctgggactacaggcgtgcgccaccatgcctggctaatttttgtatttttagtagagacaggatttcaccatgttggccaggatggttttgatctcttgacctcatgatctgcccgcctcggcctcccaaagtgctggaattatagacgtgagccactgtgcccagcctacaataggtttttaatttcagtttctgacacttattaaaaatgaacttctatatcttcagatttataaaaaagatgcaaatacagctgatatactcacacgcagtttacctgatcactaacatcttacattattatagtttattgatctcattttgtttgtgcagatattgtttacctgattttgtgtgttctttgtagctcactgaacatctttaagatgattactttgaattctgtcagacaactaatagatctccatcgtttctgtttttttcttttttcttttttttgacacatggtcttaatgtgtcacccaggctggagtgcagcggcataatcatggctcattgcagctcgacctgccaggctcaggttatccacctgcctcggtctcccaagtaagtagcggggactacaggcacatgctaccacatctagctaattgtattttattatttattatttattttattattttttctagagacagggtctctctatgttgcccaggctggtcttgaactcctgggctcaagtgatcctccctcctcagtctcccaaagtgctgggattagaggtgttgagccactttgcctggtgatctccatttctttagggttagtttctagagatttatttgttcctttgatagggccatgtttccctgtttcatggtatgccttgtgatttttttttttttttgagacagagttttgctcttgtccccaaagctggagtgcaatggtgcgatcttggctcactgcacccttcgcctcctgggttcaagagattctcttgcctcagtctcccgagtagctgggattatggcgccctccaccacgtccagctaatttttgtatttttagtacagatggggtttcaccatgttggccaggctggtctcgaactcctgacctcaggtgatctgcccgcctcggcctcccaaagtgttgggattataggcatgaaccaccacacccagccgttttttttttttaaagacagggtctgggctggggtacagtggcttgatcacggctcactgcagcctcaaactcctgggcgcaggcaattctcctgcttcagcctccccagtagctgggataacaggcatgcaccaccacagctggctaattttttaaattatttgtaaagatgaggtctctctgtgttgcccaggctggtcttgaactcctggattcaagtgatcctcctgccttggtctcccaaagtgctgggattacaggcatgagccattgtgtccggccacctgctaatcttttgttgagatttgggcatctgaaaaaacagccatctctcttagcctttatagactggctttgtaaaaaggaacagcattacaaattagtttagctggagatcttggggacctcttgaatcttttctagcgatgtatcttctctgggtttgtctgtgcaatttcctgaagaggtttgcccctgtgtctttttaaggaactcataatttcttgctccccttggtatctgtttatgatactagttcctgcagtgctgtaacaaggctataggtctcacatttgttctcagcagcccctagtcatccaaagtatgacactgttcctgtcagtgctctgagtcacatgaacagaaatcagtcctttggtcagccccactataagccagaacatgggacatacattccactctactctttccctcttgagaaggaaggtgcaagtgggaggtatctccagattgtgctgcactgtgcttggtactgggagaacctatggtatgcaaatgtaatggactttctcacctgcttcaaatcagctcttcttgcttctacgttcacctggggtactgcaacttttaaactgatttctgaaaaattctcacaaaggcagtttggtccgtatattgttaagtcagtgtctctatgggagaatgagggcctggggcttatttatttttttattttttgagatggaatcttgctctgtcgcccaggctggagtgcagtggtgcgaccttgactcactgcaacctctgcctgccgggttcaagcaattctcctgcctcagcctcctgagtagctgggattacaggcatgtgccaccacgcccggctaatttttgtatttttagtagagatggggtttcaccatgttggccaggctagtctcaaacttctgacctcatgatccaccacctcagcctctcaaagtgctgggattacaggtgtgagccaccacgcccagcagggcttactattaatattttgccatcttgctgatgtcactcaccactgttttttgatcactttactttctgttactacaagatgtttcagattcatatcgtacattcccagctccagctctagaagcagccatttttttcccagggaaacctagttcccttcatgggagaatggttttaggaaccacgacctcagtggggttgctgcagcttggtagagtacactaccaataactccctgagaaagagtacatgggagataatttttttttgagacctaactcatgtctgaaaatgtctttattctaccttcatacttgtttgataatttggttgggtacaatatagttagaaaactttccccaaagaattggggagattctcttcttactgtgttgctgagaaatcaaatccttactaaattgttctgtgctcccagaggttgaaaagaaaaatccttactaactgctaatcttttgtatatcccttttgcttttttctttctagaaacttagtcttttctttatgttctgaaatttctgttatgtgccttggaagtgagtctattttcatgcattgtgctagacatttgaagatatcttttttttttttgaggcggagtcacgctctgtcacccaggctggagtgcagtggcacgacctcagctcactgcaagctccgcctcccaggttcacgccagtctcctgccccagcctcccgagtagctgggactacgggcgcctgccaccacgcccggctaaatgttttgtatttttagtagagacaaggtttcaccatgttagccaggatggtcttgatctcctgtcctcgtgatccgtccacctcggcctcccaaagtgctgggattacaggcatgagccaccgtgttcggccaaagatatctttcaatctggctgtaggttctgcaaaatttgtttacattaattataattttctgaccttatttttcttctttctggaattcctacaatttggatactggaactcctggactctaacttatgtataatatctcttttctcccaccttaaatatttattgttaatctatctagtgtctggaaaatttcacactattttccaatgattttttttcttttctattaagtcttatattaacaggaacatttttttctcctcttgagattttcatgttttgtagcatcgttattttacagatgtagtatcttataactctaaggatattaacacatttggcagggggaattttcttctcactgcattgcttgattcctcaaagttgttttggtactctcttttggttttggattagaggctttcactagatctctcgtaattctagatggaagtctcatgaataagagttgggggctaaaacactgacctgagtatggacttctcaacttcaaagttaattgttcagagtgagcctttttcccagccaatacttggtgtcaatcttttatattcttctttggtatagtggacagtatacataaagccacttaatcttgtttccagtacagtactctgtataaaggaatttggccttgcccttggatgttatgctacataggaatgcctctgtttacctggggatcttgaatcatactgaatagccttgacagtatgatttatggctggggtgggacaaatctatacagtcttatggtggggggggtgtacaacacatcagaaataccaacaatgtgatttagggtggaggttttgggtcatgcacgagcagctgacctagagactgcgattaaccacatggacaatcaatcatggatatgtaaagcagcctcagtaaacactctgggttccaaggcttgggtgagcttccctggctggcaatactctgtgcatactgtcacacactgatgccagtagagtaatgcttgctgacttcagagagacaggacaagagctgtgtttggtacttctcccgggctctgccctctcctcttcctttggctgattttgatctttaacatttccctgtcattaactgtaaccacgaatacaatagctttcattgagttctgagtctttctagcaaattatctaagctgagggttggttttaggaatcctccaggcttacaagtactcttgtcttccattcactccgacttctaccaaccagtcactttttaccttccagatgccaactgtggggggaataaagttgcttagcaacgtggaaatgggagaagctataaggcttcccagtgttcacgcaatcgtccctatttctgtgcctcttctacctttcatcccagaggttaactggtgctgtgaattctgaaatgtaagtaagtttatcagttcctccattgatttagaattggggtttcctgggtctaccaagttagttaacaccgtctatctgctttccaattccccaagttctggttgtttcctctattttctccaacttgtgggtttttgtgtgaatgcatctgttgtagtagccatagggatgtatcattcagatctcccttcaaaagaatctgacatgaggagtgtagttggtactttcagatccatcaaggcatttgtgcgaaggccacgctccccttggtctcctcccagaaactgacttgaggaagtcagagaaacaaagccaggctatttctgcccaattctgaactctactaaaaggaatccttgcttgggaactctccattggcctgaccaagacttcatcttagagttgcactgcagtctaagtttttgctaatcaatcttcattttctctttttacaggtgtcagacccacactgcagtctgaaggctctctcgacctacgcttgctccatctcccgtttatcctccatttatgtttcctctaataaattcttgcacatctaactttgtcatgtcatctgcttctctgaggactcaaattatcacctgggattttggaaagaagttttattagatgtctagtccactgtcttaataagaaaccaccatgaagtttttatgttcttcaaagtttacacatttcaagtttcatttatctatgggagaatgaattactttcaacacatttatatctgagtttgtttattgttctgatttactgaaacttaaaatattccatcaaattatccaggaaaatccaggtggcagaaatatataatatgtccatttcatcaagaggtctcaaataaattttaaaaggccagaaaatgatatatatactatgccatttaaatcacttctatcttctgtacttaagaactcaagtatagaaataaactgtgggctgaagtaacattgtaacctgctcccaacatgactgcataggtgtctaaggttaagtgtgaagattactgtgaggtctcaagttacttgactaatcaatcccatttgaatttcaatccaagcagcatattttacacacacctgaaggaaatatcttcagtgtgttcatgtgtgtgtctatgtgcatgtatgtgtaggggataggtgtaattagggaagggctgaccgaacaacattgataagtacatgctagaagtctgctgttgttggtaacacagaaacatacacagtcttcatattcaaagtcttcacggggatgtcttctgtaatttctagaatggaaagaaaaagttgaaaaaaaatcagtattttacctattgggggtgaatatttaaaaaaatgttaactgcttgtgtagtaaggaatttggccttatcctaagagttctgccttttgtcccagctcctgaggtgaacctctaaatccttggaatttcctggtaggaatctttgtttctcatggtgggtatgttcaccaaacctgacagttgttgctaatgagacaattcagggtagtgctggccaggacagaaagaccaagtatatgatttaggatggggactttgggtcacatggtatatcagttgagaaagacagcaatcatgcctacagaatgaaacctcaacagaaactggacaccaaggctcgagtgagcttccctggttggtaatatagtctctgtgttgtcagatgtaagggatgagaggaagaaacattatccatgactccagggtctctctctctctctcactctcgctggttctaacgtgtatcctttccctaccctaattcaaaccatgagtgtaataccttttagtgagtctgagtcctcctagcaggttactgaacctgagggtggtttaggaaaatccctggaacttgcagttggtgccagcagtgatgggggtcttgtgtggatctttccctgagtagaatcctcactccttgcaggtggagttagatatcgggcagactcctggagccttctggaggactatgccatcacttcacagtttggctaactctgggtactgccaagatggttatttttcctcatacacagatacttcctatgtctacaaaaaaagcctagaggctgtgccaactcagtatcccagatatgtggtttcaaaatatgattctctataatttgaagaacagctattttctacgtctggagaagtaaaagtacataataagcctaggacatgttgctacgtgagaaagcaagaatttaccaaagacaaaggatcatgttaaagaatacaggatccaatatggccaatgacgaaaactctgagcatccaaaaatataacccaaatgcaattgattgaaatatactgaatatacaactcaaaaacaaaaaaaaagaaaatttaaagttatctgcctactgtggagcattttgcttctagtcagatctgaatttaaagcaaacagatgagcttcctttaaaaatagctcttgtcctacctagcagcaatcctagatgtgagaatactctcaaagctacttccttaatagataattacaggacctggagatgatgtttagagtttagtggagcaagcaagaagacatctaagggtttctaaaatggtcaacattttgtggctcttctaatttaccaagttattgatactttatgaaagacaattctgagagaaaaggcataatgaaaacgaagctatagatactagattggaaagatactgaattagaaaaagttccaactttgtggtaatcttagataaatcactaaacatttaaaagttctcacccactaaacttttgcctaactaacgtcacagagtaaagagaatacagaaaggcagcacaggttaagaatggttctgtgaattgcaggtagtattataaatacataattcatacagacatggttctacccctgaccaggttcaatcatgccactgcatttgcttgcaagaacaagtgagagataaatgtcatcttcagctccactgcacaacagtacttggtgaccaaaggatttgagggacaagaagagttaagaattatctctaaagttttatataagcttatcaaaatagaaagctacattattagatgatctttactaccataccacaatgaaagagccaagtgtgttcgagggagagtgaaaaaagcctttgatagagtgaaagactcatggacagaattagcaagacagggaaggcccagagcaggaaggatcttgtgtggaagggaagattctgaggcataagagaataaggagctttgggggctctaagcaagggaacaaaatcaaggcaggaatgttcatgaagatagctctggtgaagagtacagactgcagactggtgacttagatggatgatgaggcccaatgatgagatgagagggaaaacgacaaaggagagtcactgaaaataaacccagggagggaaggaggaacccaagaagaaatagagctttagtatttaacatcatgacagaaaatttaaaagtacgatatgcaactaaatttaaaaaaaaaagctgcacaggaagaaaacgggagaattacacagaggccaaaaataatgactcccatggggtctggtggcttaatgcttttggcactaaagagctaggaaagcagggaaagaaaagcctccggtatatacaaaccgggaagtccaacaaatctctgctgaagaaactggaacttcaaataagaaacccatagcaaaagggttaatttgagtaagttccttcaccacaagagaaaaagtgaagagaatgtaatcggttaataatggccttccaaagatatgcccaggttctaaattcccaggagctgtgaatgttcactttatttggaaaaagaggaaacagaagagaaggaggcaatgtgaccacggagtcagagactgaagtgatgtggccacaagtcaagggatgcctggcgccaccataagctagaagaagtatataaggaattctcccacagagccttcagagagactgtggcctttctgacaccctaatttcagtgtctggcctccagagctgtgagatgacttgagccatcccatttgtggaaatttgttgcagcagccacagaaaccaatacagagaaaatcacctcacttagctttgttttggagtagggatagacagatcctgtctccatcacaactcctggcctttgtgtatgactgggaatgccatagattttttttctgagatggagtttaactcttgtcgcccaggctggagtgcagtgatgcaatctcagcacactgcaacctctgcctcccaggttcaagagattctcctgcctcagcctcccaagtagctgggattacaggcatgtgccaccatgtccagctaattttagtagagatggggtttcaccatattggccatgctggtcttgaactctgcccacctcagcctcccaaagtgctgggattacacgagtgagccaccacgcagacccagtcacagctttcttaacattctccctatggtccaaaatgattgagtttaaagtgtgtctgggttgtcagtgtctccaaggaactagacgtatgcttcttaaaactgggcttcaacagaaacataacagaacaagcagagcagacgggcaatgtaaacagaaagacggaaactcaaagaatagaatggtctgggtgtggtggctcacccccgtaatcccagcactttgggaggcccaagtgggtggatcacctgaggtcaggagtttgagaccagcctggccaacatggtgaaaccctgtctctactaaaattacaaaaattgggggaggagccaagatggccaaataggaacagctccggtctacaactcccagggtgagcgatgcagaagacagtgatttctgaatttccatctgaggtaccgggttcatctcactagggagtgccagacagtgggcgcaggtcagtgggtgcacgcaccgtgcgcgagccgaagcagggcgaggcattgcctcacttgggaagtgcaaggggtcagggagttccctttccgagtcaaagaaaggggtgacggacggcacctggaaaattgggtcactcccacccgaatactgcgcttttccgatgggcttaaaaaacggcgcaccacgagattataccccgcacctagctcggagggtcctacgcccacggagtctcgctgattgctagcatagcagtctgagatcaaactgcaaggcggcagcaaggctgggggaggggcgcccgccattgcccaggcttgcttaggtaaacaaagcagccgggaagctcgaattgggtggagcccaccacagctcaaggaggcctgcatgcctctgtaggctccacctctgggggcagggcacagacaaacaaaaagacagcagtaacctctgcagacttaaatgtccctgtctgacagctttgaagagagcagtggttctcccagcatgcagctggagatctgagaacgggcagactgcctcctcaagtgggtccctgacccctgacccccgagcagcctatctgggaggcaccccccagcaggggcacactgatacctcacacggcagggtattccaacagacttgcagttgagggtcctgtctgtcagaaggaaaactaacaaacagaaaggacatccacaccaaaaacccatctgtacgtcaccatcatcaaagaccaaaagtagataaaaccacaaagatggggaaaaaacagaacagaaaaactggaaactctaaaaagcagagtgcctctcctcctccaaaggaacacagttcctcaccagcaacggaacaaagctggatggagaatgactttgacgagctgagagaagagggcttcagacgatcaaattactctgagctatgggaggacatacaaaccaaaggcaaagaagttgaaaactttgaaaaaaatttagaagaatgtataactagaataaccaatacagagaagtgcttaaaggagctgatggagctgaaaaccaaggctcgagaactacgtgaagaatgcagaagcctcaggagccgatgcgatcaactggaagaaagaatatcagcgatggaagatgaaatgaatgaaatgaagcgagaagggaagtttagagaaaaaagaataaaacgaaatgagtaaagcctccaagaaatatgggactatgtgaaaagaccaaatctacgtctgactggtgtacctgaaagtgatggggagaatggaaccaagttggaaaacactctgcaggatattatccaggagaacttcccctatctagcgaggcaggccaacgttcagattcaggaaatacagagaacgccacaaagatactcctcgagaagagcaactccaagacacataattgtcagattcaccaaagttgaaatgaaggaaaaaatgttaagggcagccagagagaaaggtcgggttacccacaaagggaagcccatcagactaacagcagatctctcggcagaaaccctacaagccagaagagagtgggggccaatattcaacattcttaaagaaaagaattttcaacccagaatttcatatccagccaaactaagcttcataagagaaggagaaataaaatactttacagacaagcaaatgctgagagattttgtcaccaccaggcctgccctaaaagagctcctgaaggaagcgctaaacatggaaaggaacaaccggtaccagctgctgcaaaatcatgccaaaatgtaaagaccatcgagactaggaagaaactacatcaactaacgagcaaaataaacagctaacatcataatgacaggatcaaattcacacataacaatattaactttaaatgtaaatggactaaatgctccaattaaaagacacagactggcaaattggataaagagtcaagacccatcagtgtgctgtattcaggaaacccatctcatgtgcagagacacacataggctcaaaataaaaggatggaggaagatctaccaagcaaatggaaaacaaaaaaaggcaggggttgcaatcctagtctcggataaaacagactttaaaccaacaaagatcaaaagagacaaagaaggccattacataatggtaaagggatcaattcaacaagaagagctaactatcctaaatatatatgcacccaatacaggagcacccagattcataaagcaagtcctgagtgacctacaaagagacttagactcccacacattaataatgggagactttaacaccccactgtcaacattagacagatcaacgagacagaaagtcaacaaggatacccaggaattgaactcagctctgcaccaagcggacctagtagacatctacagaactctccaccccaaattaacagaatatacatttttttcagcaccacaccacacctattccaaaattgaccacatacttggaagtaaagctctcctcagcaaatgtaaaagaacagaaattataacaaactgtctctcagaccacagtgcaatcaaactagaactcaggattaagaatctcactcaaaaccgctcaactacatggaaactgaacaacctgctcctgaatgactaatgggtacataacaaaatgaaggcagaaataaagatgttctttgaaaccaatgagaacaaagacacaacataccagaatctctgagacgcattcaaagcagtgtgtagagggaaatttatagcactaaatgcccacaagagaaagcaggaaagatccaaaattgacaccctaacatcacaattaaaagaactagaaaagcaagagcaaacacattcaaaagctagcagaaggcaagaaataactaaaatcagagcagaactgaaggaaatagagacacaaaaaacccttcaaaaaattaatgaatccaggagctggttttttgaaaggatcaacaaaattgacagaccactagcaagactaataaagaaaaaaagagagcagaatcaaatagacgcaatacaaaatgataaaggggatatcaccaccgatcccacagaaatacaaactaccatcagagaatactacaaacacctctacgcaaataaactagaaaatctagaagaaatggataaattcctcgacacatacattctcccaagactaaaccaggaagaagttgaatctctgaatagaccaataacagactctgaaattgtggcaataatcaatagcttaccaaccaaaaagagtccaggaccagatggattcacagccgaattctaccagaggtacaaggaggaactggtaccattccttctgaaactattccaatcaacagaaaaagagggaatcctccctaactccttttatgaggccagcatcattctgataccaaagccaggcagagacacaaccaaaaaagagaattttagaccaatatccttgatgaacattgatgcaaaaatcctcaataaaatactggcaaaacgaatccagcagcacattaaaaagcttatccaccatgatcaagtgggcttcatccctgggatgcaaggctggttcaatatacgcaaatcagtaaatgtaatccagcatataaacagagccaaagacaaaaaccacatgattatctcaatagatgcagaaaaagcctttgacaaaattcaacaacccttcatgctaaaaactctcaataaattaggtattgatgggacatatttcaaaataataagagctatctatgacaaacccacagccaatatcatactgaatgggcaaaaactggaagcattcccttggaaaactggcacaagacagggatgccctctctcaccactcctattcaacatagtgttggaagttctggccagggcaattaggcaggagaaggaaataaagggtattcaattaggaaaagaggaagtcaaattgtccctgtttgcagatgacatgattgtatatctagaaaaccccattgtctcagcccaaaatctccttaagctgataagcaacttcagcaaagtctcaggatacaaaatcaatgtacaaaaatcacaagcattcttatacaccaataacagacaaacagccaaatcatgagtgaactcccattcacaattgcttcaaagagaataaaatacctaggaatccaacttacaagggatgtgaaggacctcttcaaggagaactacaaaccactgctcaaggaaataaaagaggatacaaacaaatggaagaacattccatgctcatgggtaggaagaatcaatatcgtgaaaatggtcatactgcccaaggtaatttatagattcaatgccatccccatcaagctaccaatgcctttcttcacagaattggaaaaaactactttaaagttcatatggaaccaaaaaggagcccgcaacgccaagtcaatcctaagccaaaagaacaaggctggaggcatcacactacctgacttcaaactatactacaaggctacagtaaccaaaacagcatggtactggtaccaaaatagagatatagatcaatggaacagaacagagcccctcagaaataacgccacgtatctacaactatctgatctttgacaaacctgagaaaaacaagcaatggggaaaggattccctatttaataaatggtgctgggaaaactggctagccgtatgtagaaagctgaaactggatcccttccttacaccttatacaaaaatcaagatggattaaagacttaaacattagacctaaaaccataaaaaccctagaagaaaacctaggcattaccattcaggacataggcatgggcaaggacttcatgtctaaaacaccaaaagcaatggcaacaaaagacaaaattgacaaatgggatctaattaaactaaagagcttctgcacagcaaaagaaactaccatcagagtgaacaggcaacctacagaatgggagaaaattttcgcaacctactcatctgacaaagggctaatatccagaatctacaatgaactcaaacaaatttacaagaaaaaacaaacaaccccatcaaaaagtgggcaaaggacatgaacagacacttctcaaaagaagacatgtatgcagccaaaaaacacatgaaaaaatgctcatcatcactggccatcagagaaatgcaaatcaaaaccacaatgagataccatctcacaccagttagaatggcaatcattcaaaagtcaggaaacaacaggtgctggagaggatgtggagaaataggaacacttttacactgttggtgggactgtaaactagttcaaccattgtggaagtcagtgtggcgattcctcagggatctagaactggaaataccatttgacctagccatcccattactgggtacatacccaaaggactataaatcatgctgctataaagacacatgcacacgtatgtttattgcggcattattcacaatagcaaagacttggaaccaacccaaatgtccaacaatgatagactggattaagaaaatgtggcacatatacaacatggaatactatgcagccataaaaaatgatgagttcatgtcctttgtagggacatggatgaaattggaaatcatcattctcagtaaactatcgcaagaacaaaaaaccaaacactgcatattctcactcataggtgggaaatgaacaatgagatcacatggacacaggaaggggaatatcacactctggggactgttgtggggtggggggagggggagggatagcattgggagatatacctaatgctagatgacgagttagtgggtgcagcgcaccagcatggcacatgtatacatatgtaactaacctgcacaatgtgcacatgtaccctaaaacttaaagtataataataataaaaataataatcataaaaaaataataaaataaaattacaaaaattatctgcacatggtggcacatgcctgtaattccagctactcgggaggctgaggcaggagaatcgcttgaacccaggaggtggaggttgcaacgagctgggatatcgtgccactgcactccagcctgggcaacaagagtgaaactctgtctcaaaacaaacaaacaaacaaacaaacaaacaaaaaacacgaatagaatgaaaatggtagaaattaggcagggtgtggtggttcttgcttgtaatcccaatgctttgggaggccaaggtgggaggatcacttgaaggcaggagttcaagaccagccttgaccttatagcaagaccctgtccctacaaaaaaattttaaaattagctgggcatggtggcgcgtgcctgtagtcctagctagggaggctgaggtgggaggatcgctggatcccaggagtttgaggctgcagtgagctgtgattgagccactgcactgcagcctgcgtgacagaacaagaccaagtctcaaaaacaaaacaaaacaaaacaaaaaaaccaaaacactgtaacagaaataaacactgccttataccaaaaaatgtacacctagggaaatcataaactgcagaaagtaaaagacaaagggaaaatcttcaaggaagcagagaaaagcagcaccttacctgcagaggaacaagggtaagataaaaaagccaaaattatccagaatgtagtatataaggacaaaaggagggaaaataggaaaagagaataagaggtaggatagagtgagaaagtccatctaaaatatgtctaaacaaggtgtcagaaggagagaataccagagagaatgaataagaggtaagttggacaagataatgtctggcaattttccacaagtgccgaaagacacaaatactgacacagaaagcccaataaatcccaggctatcaggtgttacaaataaaaggatgggatggtaaaagtcttgaattgagatgtcaagaatgggtataaatagaaaaaaacagatcccacaaagggaagctgtctggggaagtgattgcagtggcagcaatattaaagtgaacatgtctgatgtgtagcaggattacagaacgaaactcagagggtagggtgaggatgtcaacagagaagttgacagagcagccacagaagctgaaatctcagaagtgaatagtgctaagtgggagaacgggaggaggagaaaataagctgcctgacaccagcaagtaagtgcaggtcgccatccttaatttctattttctagataatagaatgtggaatatgtcaactgatgatctagctcttcacagtgttacgtgtctcaaggaaaaaatgcaggtaagcatgttttataaactgtaaagggaggtataatgtcagctgtaaggctgtaatgtcaggctattttacaaccctgtgataattttgacttttgggggaaagaacaattttagggtcagcaaatatgctgatttacctagaagcatgtatttttaataacataccaatgtagtttttagatttagcaaaaagtaattatacttttaattgctattaaaaaattatattattgaccgggcatcacggctcacgcctgtaatcccagcactttgggaggccgaggtgggcggatcacctgaggtcaggagtttgagaccagcctggccaacatggtgaaaccccgtctctactaaaatccaaaaatgagccagccatggtggcaggcgcccgtagtcccagctactcggaagtctgaggcaggagaatccttgttcctgggttgaagccccaggcctgaacccaggaggcggaggttgcagtaagccaagatcgtgccactgcactccagcctgggagacaaagtgagactcagtctcaaaaaaaaaaaaaaaaaaaaaaaaagaaaagaaaattatattatggtaaatttctggggaaagaataacaaaacaggataacaatagtactatcttacatgtatatgctacaaatggttaatggcatcaaaatctactttcaacaaaaataaaaaacttacggtccacaatctccttaccctgcgtttgggtctcattcagaaacagctttagcttcctgctccgaaggccaaacaccttggctgcttcatacagaagaccttggtgggtgagtccattctgcccaagtgggttttcaagcaggagagtgcccactgtccccattaaacactctgtggaagacagaacaaactggattaaatctcgagagttcaccctctagctccaaaagaggtggccactgcggacagctctaacaggcagtgctgaggccagcagtgcgtccaggagcgtgagtgtgaccgctgaagatgcagtccatgcagaaacagctctcaacatttcatagaggtgaaggggaaggggaaaaagaaaaaaaaaaaacttatataaaagcccagcagcttggggagcagatactcagtacacagtgaagtgaggagcccgaagacttcagtacaaatgtgcacaatgaggatcctaaaatatcaggaaaaaaatcactatcaatctagtctgttgattaaggcatggaggtatagaagttttcagaacatttttcctcagaaaagaaagtaaaatttgagattaaaatgttttggcactcaaacaatttagttgtaatttttacctaaccaattttttcatttcctaaccatgccagatggatgagggtctctataacacaccaaaagaaaagcctgtggttgctccccaaagttgcgtgagagcccacactttaaagcaatactttgaagccgactagaaatacacacatatttgaatattaaagacaacttcaatgcccagcaccccacagtctgcctgctgtggggaggcacataccttgtggctttgcattcaggagctgtaggttgatatactgacaaagaagagtactagaactgttgatcagagagggagccgatcctgcagtcacacaaagtgtttttccactaagactcagtaagtcagtttggttttgtatttctaaaaataacaacaacaattctttcagggttaacgaacaaattcaaaactgaagtcattcaatttttcctatttaactatcatgtatctttttacgataatgctttccacttaatttctgtttatcaagagacattgccttttctataaaaccagcctttaatgacatgtaatggtaggaaatctcaatgttgcaaaacaaacatcataatattcataatctgaaatatagggctaattgttttctctattttagtattttctctgtataatacagctcctcttaaaatttcctcctatatcagaatctcaagcttcaccatgaaaaacttacattaaaaagtgctaattacagtcagaagatgttatttgactcaggagcagatgtgaaaaaaagcatgatacacagaacatatgcagtgtaatttcatttagagaacattaaacgttgcttggggatgcatgcgcaggcagatgactggtaatggttgtgatataggacaggcccacagggcagcctccaaatattgagtggaaatggtaggtatgagactaggctggggcactggctcagggaacaaggaaactgctgcaccagtggctagatgctcatgctcagcctaggcccacatggtctcttctctcaaccacaggtgtggccttgtaggaagtcttccaggactggctggcagagaaagaaaacattttagggcttgctgtgtagggctttactgcacaatacgctgtatcatccaaagtagacaattacagtcttaacggccctgttctgactctgggtagccctgaagaatagtgatgggtggaaatcctcccaatgggcacagcttctttcagtgcagccggctggtcattttgctcagcagaaatagctaggagtagatctacactgattcatggacactggccaatagctggactaaacgagaacagccagggactcaaagaacagaattagaaaactggtgacaaggaagttagggcaagaggtatgtggacagatctctacaaatgggcagactatgaatgaggatctaaaaatgggtgaggctgggcacagtggctcacacctgtaatcctatcactctgggaggcagaaaggggaggactgcttgaggccaggagactgagcctgggcaatacagcaagacctcctctctacaaaaaagaaaagaattagccaggcatggtggcatgtgtctgtactcctagttactttggaggctgaggtgggaggattgcttgagcccagaagtttgaggttacactgaactatgattgagccactgcactccagcctgagtgatcgagtgagaccctgtctcaaaaaataaaaaataaaaaataaataataataatcagtggacatgttctattctgccgccagccactcctgcccttgcccaatggattgatgaacaaaggggccacccagactgggaggaagaataaccacgggctccacaacattacttccactccctaaggctgattttgctacagctgctactgcgtatcccacctaccaacagcgggaaccattacttgagctttcgatacagtgttattgccaggaaagacaagccagactcctgatggcagcttggttgtactgcactgtttccattatgggaaaaggcagtgctttggtcttactggaacacacactccttttggacaaggatttgccactgtcacctataatgcttctggcaaacccaccatccatggaggtagagaatgtcttatttaccaacacagcattccacatagcatcgcttgaccagagaactcatttttcagcaaatgaagtgtggcattatgtattaatatatattagccaattcttatttttccactctcttatttccttaccatataacatgaaatattttaacgggttaaccttatacctcagtgaagttaaagaacagcaaaagagggatgtatggctcagctagaagagaaatcaacatcacccaaagaaggataaggtaactttctatctcgttttgggtaatgaagttagcatctttgaagcagtacaagaaagagttaaaagtgtgattttttttttttttttaatctactagggtctttatttggaagttacatatgatttaaagagccatgtatagatgtcaagatcacaatggggtgaactatggtggtttcatcctgtgtcaatgcagctaagctaaaactatttcccaggttctctgtctgacctggttctgggtaatggcttgatcacagacaaatctacacaggatttagaaggtagaagtttagtaacagtcattatgctaaacaggctaacatggggcccgtgcccttggctttctcaggttgctgtgaatctgccaacttgttgggttaagtgggacagtgagcagcccacgctcctgcctctgctcttccaacttccaggccaggaatgtgtgcaactctctggaaaagtgtaccagcagtttcttctgcaaggcacctgtcagtgtgggatgaggtcagatagatgtgcactctagcctgtttttgctcgtttctacttctcatcctaccgtgactttaggcagagatccagctttccactgacttatccaccaccttggtggaacctggttagagatttttctcagacctctaacttgctaccttcttgtagaattttacttggtttctcccacattgcttttgcttctcctatccaacctttaatggatacaatagcaaacagttttccagtggttccaacaattcataatccagcagtgaatgagagttcccattatgcaatatccctgacaacatttgagtctgccagattcttctagtttttgccaatctggtggcagttaatagtacctcactgtggtactatcttgcaagttcctgattaccattaagatgcaccagttgttccttagttggccatttgcatttcttcttttaagttatttaaaagtttctgaaaatgagcattcagattcataaaatgagtattagttttctgaggctgccatagtaaagtcccataaactgcagggggctagggaataaaaataaaagaaatgtactgtctcaaagttctggaggtcagaagtccaaaattaaagtgttggcagatgtgctccctctgaaacctgtaggcgaattcttttttgcctcttcctagcttctggaggctcccggcaatcttggttgtttcttggcttgcagctgtgtgtaactccaatctctgcctttgtcaccacatggcattttctccgtgtgtttctatgtcttcacatggccaccttctttttttttttttttttattgatcattcttgggtgtttctcgcagagggggatttggcagggtcacaggacaatagtggagggaaggtcagcagataaacaagtgaacaaaggtctctggttttcctaggcagaggaccctgcggccttccgcagtgtttgtgtccctgggtacttgagattagggagtggtgatgactcttaacgagcatgctgccttcaagcatctgtttaacaaagcacatcttgcaccgcccttaatccattcaaccctgagtggacacagcacatgtttcagagagcacagggttgggggtaaggtcacagatcaacaggatcccaaggcagaagaatttttcttagtacagaacaaaatgaaaagtctcccatgtctacctctttctacacagacacggcaaccatccgatttctcaatcttttccccacctttcccccctttctattccacaaaaccgccattgtcatcatggcccgttctcaatgagctgttgggtacacctcccagacggggtggtggccgggcagaggtgctcctcacttcccagtaggggcggccgggcagaggcgcccctcacctcccggacagggcggctggccgggcggggggctgacccccccacctccctcccggacggggcggctggccaggcagagaggctcctcacttcccagtaggggcagccgggcagaggcgcccctcacctcccggacggggcggctggccaggcggaggggctcctcacttctcagacggggcggctgccgggcggaggggctcctcacttctcagacggggcggttgccaggcagagggtctcctcacttctcagacggggcggccgggcagagacgctcctcacatcctggacgaggcagcagggcagaggcgctccccacatctcagacgatgggcggccgggcagagacgctcctcacttcctagatgggatggcggccgggaagaggcgctcctcacttcctagatgggatggcggccgggcagagacgctcctcactttccagactgggcagccaggcagaggggctcctcacatcccagacgattggcagccaggcagagatgctcctcacttcccagacggggtggcggccgggcagaggctgcaatctcggcactttgggaggccaaggcaggcggctgggagatggaggttgtagcgagctgagatcacgccactgcactccagcctgggcaccattgagcactgagtgaacgagactccgtctgcaatcccggcacctcaggaggccaaggctggcggatcactggcggttaggagctggagaccagcccgatggccaccttcttataatgacaacagtcatactggattaggggcccacgctactccagtatgacctcatcctaactagttacatctgcgataatcctatttccacaggtcacatttagagatacaaggggttaggacataatcttttttttttcagaggtcacaattcaatacgtaacagcgggagaatgcatctataattctttaaaaatttttcaggtttgctttattgagaatccagacttagtgagatccaggcattgtgtttaataaagttaaaactcacggttgggtgtggtagctcacacctggaatctcggcactttgggaggccaaggcagggggactgcttaaggccctgggttcaagaccagactgggcaatatactgacttggtctctccaaaaaaattaaataaaattagccaagcatggtggtggcatgcctgtagtcccagttacttgggaggtcaaggcaggaggattacttgagcccaggaggccgagggtgcagtgagccatgactgcatcactgtactccagcatgggtgacagagtgagaccctgtctcaaaaacaaaaacaacctcacaacagaggactctgaagcctgaagtccaccagctagctaacaggtgagagggaaagattagatccattaagcccagggttttcagtcacatgacacaatgaggaggcatgaatagacactgcaggcaggcactgctgaagagttgggccctgactcaagagagttaggaaaaatgcaaaagttgtatagtacaactgacagcaaattaagaccttcaccaatccatcttgagtcaaaggacgtaggctcctctcactttccacatacctgtttcatcatggaagacagccagctctgtatttttcacaccaaaaatgctagtgacaacactcttcagctttaaaaggtccaacctattgtcaccttttggattttccaggagcaatactccacctaaaaagccacaaaaataacacctcaatcagacaaataaaactaaaaagaaaatgttacatttggaggaaaagggatacaaaggggttcaagccctaatatttttccttttcccccaactatacactatatatatgtgtatatatagcttattatatacatataaaagcataccaaggatggatatatatacatatatatacatatatagtgtatatgcaatatatacactacacacacacacacacacacacacacacacatctccatccttggcatgtgttttggcaatccttggtagctatggtccaggcatagaactctaccaggcaatctgttcttgtctttttctagatttaaacctttgtattcatgattcttatttatgattgtcatttttcattttgtgccatatgtatattcccacaggtcacgatggttaaaaatactatctgacccctgatgttgatttattctgcaccttagattcatgtacggatatttactttattaatatatttgaacattttgagttaattgtagagccaaatgcacgtagtgagataccacaggccccttacccagtttcccctaatggtgacattttacaaaactacagtgtataccacaaccagcatattgacactgatgcaatccactgatcctattcagattgcctcagttttacttttactcactggggcatgtgtacacgtgggtatgtttagttctatgcaattttatcactcgtgtaaaatcctgtacccatcaccatcattaagatacagagtagttctgccaccatgagaatcctcgtgttgccttttaatatccatacccaattccctcccaggcccattccctccttaatccctggcaaacagtctccatttctataatcttatcatttaaaacatgttatgtgaatgcaatcatacagtatggaaccttttgggactttttttatttggcaacaatttcttttcttttctttttttttttgagatggagtttagctttgtcgctcaggctagaatgcagtagtgcgatttcggctcaccgcaacctctgcctcctggattcaagagattctcctgtttcaacctcccaagtagctgggattacaagcacccacaaccacgcctggctaatttttgtattttttcagtagagacggggtttcaccatgttggccaggctggtctcaaactcctgacctcaggtgatctgcctgcctcggcttcccaaagtgctgggattacaggcatgagcaactgtgcctggcctcagttggcatcaatttctaaggattaaaataagttactgtgctgatagttgttcctttttattactgtgtaatgttctatgatatgtaccccagtttgcttagccatttatctgctgaagaatatctgggtcatctatagtttggtgctattatgaatataagtactatatacattcatgtggtggtgaacatagttttcagttctctgggataaacacctaggagtgcaactgcgagtcattatagaaagcacatatttagttttctgatactgccgaactattttccagagtgatcataccattctatattctcaccagcaatgtatgagatacagcatttggtgctgtcactacttgcaattttagtcattgtgatagctgtgtattaagacctcaatgtgatttcaacttgaattttcctaacggctaatgacgttaaatgttgtcatggacatttctgtcatttgtatattccctttggtaaatgtctgttcatatctctaccccattttctaactggatttttctttactgttgagatttaaaagatctttacgtattctagatatgtcttttgtcaaatatgttgttttataaagattttctcccagtctgtagcttgtctttcatccttttataggatgttcaaagcaaaacctaaattttcatttagttcaatatatcacttttcccttttaaggacagtgttttgtgtcaaggctttaaaactctttgtttaatgtttaaatgaaaaatcttaagacttttccaaaaatactagtagagcactttggccacctaagtaagtaaccttaatttattccatctgctgggaatatacttttgatccagctattgtttcataaactagtgtgttttatattatagtacctagcacatggctacagttttcaaatgaaagctaagaaatctgcttatctgtatgcttatacatgcctgtgcatgtaggtatgttacgtatatgtgttatttttttcttttttttttttttttgagacggagttttgctcttgttgcccaggctggagtgcaatggcatgatcttggctcacagcaacctccacttcccgggttcaagtgattctcctacttcagcctctcgagtagctgggattacagacatgtgccaccatgcccagctaattttgtatttgttttttttttttttttagtagagatggagtttctccatgttagtcaggctggtcttgaactcctgacctcaggtgatctgcctgcatcggcctccaaaagggctaggattacaggcgtgagccaccgcacccagccatgagatgtttttctacctccagatggtatggtcaaaaattaattcataaaagatttctatttaattgatttaaagaaaaataagcatttcacataaattaagtattctctcagcaatatagaaaccaacacacatgcttttcaagttcatgtgacttgggtaagaatatataatgcagatatacaacttttaaatcctaccaggatttattatcaaataagtttatgttacctccactacatatttataattatacaactatgagttcaacctatgaacaatgtgcaagtgggtgccagtatccattacttcacgtttttcgagtgcagcaaaaaaacaaaaaatctcatctattaaactttttaggattcttgtttttgtgaagactgccgaacatgcacatgctgtaaaagtagctaacagagaaataacttaatgatagctagctttgtttgtgttatgtctactcaaaaatagctccccactggtaatttacagcctaggggttttgttaatttaaatgatgaatattcattggatatgtagatattttccaaataaaatactgaagcattaatagtggaacataaattatactacaaggaagcatatgtttctacaaatttgattcatagatttgccaatctatagaatgctgatgtgacagttataactagaataagagaaatgattctgtatgtgaggaaaagacatggttttggtaaggtgaagctatgaagtatgaaggatgtgtgttcgttaagagaaaaagactaacttttgccttatagtagaatgacttgtttcacagtaagaggaagaatttaatccaaaacagaagggtatgagaaagttgtagtaggtttgtggaagaggaatcttggaaaaggaattttatgtgtggtcaacctgggtaagttctgaatgaatttatttataaattatcaaattaataagccttaataataccagcactttgggaggctgaggtaggaggattgcttgagtccaggagttcaagaccagactgggcagtgtagtgagacactgtctctacagaaaagaaaacagagaaacagagtcctctctattaaaactgctcaggtctttttataactttgtgactttctatatttgcctttgatatttttaattatcactctggttaaatgagtgactgtagcttcagtgacctgcaatcctattaatcaagtgttttaagcctttgatattttttactagcttcccaaaatcaaactctaaacttaagtctttctgacctcaagctaactttgggagctttcagaggccccctgaaatatctcaagagaattttctttcattatgaagagaaacagtaaacaagttagacttatttgactacgttagatctgcatgggaagcgctgtcaaataagaaatgttgtttaaccttctttaacttgtacaaataatgtgttccagaaattgtgtgaaattcttagaaatctgatagcctggtctaatgttatcagtcataattctagttaccttaaaatgctgtataccacagaaataactaaacttccttgtcaattgcaacattagtataatgaactctcattagatatttaaccatggccatttaaagtcttgtcatccaacgatagttaattgttttactctggcactttcctgaaaactattgtaagcaacagtgaatctaaagtgtttcatctttgaggagatgcaatggaaaggactctgacaagtacaggtttctgatgttaagatcacaccattggactgggtaagaattatcataactcttgtgaagtaattaactaattcatgatgctgtcacaatggcaatgacattttaacctgagttttggaggacacactcaaaccacagcaggatagaagatacatttttactatattgaatcttctaatccatacacgtctctccacttacttagattttgtctgatttttttcatcactattttgaagttttcagtatacaagtcccaacatgttttattaggtttacatctgaatatttttttggagacaaggtctcactgtgtggcccaggctggagtatagtggcatgatcatggctcactgcagcctccatctcccaggctcaagcaatcctccaacctcagcctcccaagtagctgggactaaaggcgaacaccaccacacttgcctagttttttatttcttgtagagacggggtctcactttgttgccgaggctggtctcgaactcccaggctaaagtaatcctcctgcctaagcctcccaaaatgctgggaatacatgcgtgaaccaccacgcctgacctagcatctttttttaagtgactgtaaatgataccacatttttaatttcattgcccacttgttcattgctagtatagattgctattatgaaataaaattcatttttgtatgtttatcttacatcctgtgactcaaaagtttttttcttttttataagcaatatgatttctattcaattactttggaaacccaattaatgcttgaatccaaagggtatagaaaaaggccaaacatttaaaaataacagatttagcgatgatttgtatggttttttccctcataatatgaatgctttcagcaggacagtaaattgcaaaacatatcaaatcatattaaggcagacgaccaagctgtggctgcatttaaagctattactaagaaaataatcttggagttgagagctcttctttccaggtgtctggtcaactgacccaggaatggccagtcctggagttggtagatgggaaaataggccctacctgtcttatcactgctcatgctgctggccctctgtacaagaacactgttcttgtttacattactgatgcacaccactgaccatccgattccttctacagggtaacctgagacagccaggatgttggcagtgatggaccagctcaatgccatacaacatcactgaagttgcaaagcagttcagggaaccatgtactgtctgagacatcatcacaggtctaaataaacacacaaccatcatgggagcagctggcatgggaagatcaatatggtgatcccaggccacatcttaaaaccaggcaatatgagctttttttttttttttgagatggagttcgttcttgttgcccaaactacagtacaatggcgcgatctcggctcactgcaacctccgcttcccaggttcaagtgattctcctgcctcagcctcctgagtagctgggagtacaggtgaccgccatcacacctaattctttatattttttcgacagggtttcaccatgttggccgggctggtcttgaactcctgacctcaggtgatctgcctgccttagctcccaaagtgggattacaggcgtgagccaccaagcctggcttattttttcaggtgtttgtatgtatgttccttatgattttctatagagtcagctttattcctttctttatctgcatgacttttatttcctcgtcatgccgtggtccactggctagaacttccagtacaatgtcgaatatgagttgtgattgccttgttcctgattttaggtagaaagaattcaggctttccccattaggtataatggtagctgtaggatttttgcaaaatgctcattatccagtccacaaaggtctcatctcttcctatttttgtgaggattttcatcatgaatgggtgttgaatttgatcaaatgctttttatgaatcaactgctatactcatgtaatcttttagtctgacaatacgataattacattgattttttttttttttttttttttgagatggagtctccctctgtcgcccaggctggagcacagtggtgcgatcttggctcactgcaacctctgcctcccaggttcaagcaattctcctgcctcaataatcctactctcctgagtagctgggattacaggcacgcgccaccatgcccggctaatttttgtatttttagtagagacagggtttcaccatgttggtcaggctggtcttgaactcctgaccttgtgatccacccgcctcagcctcccaaagtgctgggattacaggcgtgacccacctcgcctggactagattgatttttaaatattgaatcagccttgcatccctggaataaatcccacttggtgatggtgcataattctttgtatacatagctgaattctatttaataatttattgggaagaattttacatttatattcatgtggaatatctgttttctatcttttttttttcttttttgagacagagtctcgctgttgtcggcctgggctggagtgcaatggcacgatctcagctcactgcaacctctgcctcccaggttacagcaattctcctgcctcagcctcccgagtaggctgagattacaggcgcccgccaccaggcttggctaatttttgtatttttagtagagatggtgtttcaccatgttggccaggctggtctccaactcctgacctcaggtgacccacccgccttggcctcccaaagtgctgagattacaggcataagccaccgtgcccagcctatcttttttgttaatactgtctttatctggttttggtagcaggttaataaccacataaaatgagtgaaatgttccttcctcttctattttctggaagagtctgtgtacaactggtgttaattctggtaagaattctccagtgaaactgggcctggagattagttcagagattttaaattacaaattcatctccttaataattatagggccattaaaattatctgtttgatattgtgtgagttgtagtagtttgtgttttttagaaacagggttcacttcaggccaggaacagtggctcaaacctgtaatcccagcattttgggaggccaaagaaggccagaccacttgaggccaggagtttgagaccagactggccaacagggtgaaaccccgtctctacaaaaaaatacaaaaattcatcaggcgtggtgtggcacacctggaatcccagctactcgggaggctgaggcatgagaatcacttgaacccaggaggtggaggttgcagtgagctgagttggcatcactgcactgtccagcctgggcgacaagcatccaagttgtcaaacttacatatggagatttattcatagtatttgcgtttttgattttggcaatctgtatcaataattctttttattcctgatatgcaactgtgtcttctttttctttattagtctcactagaggtttattaattttgctgaatttttgggtaagaaccagatttctgtatcattaattttctctatcgtttttgttttcaattgcactgatctcttatttttatgtttttccttcttcttactttgcatttattctgcctttttttcctatctagtttcttgagtttagaccttaggttatgacttgaaaccatctttctttcagtttttagtgcaacagatttccgtctcaggactgctttagccacattccacatattttgatgtcgtattttcctttacactcagttctatgtttctttccctcttgagacttcttccctaatcatggataatttaaaagcatgttgtttatttttaagagtgtggagattttcattattatattactaattaatagtttgattctactgtggtcagagagcacactctggtttcaactgtattaattggttgaggtttgttttatggcccaggttataatgtatctcagcaaagttctgtgagagctcaaaaataatttatattctgctatttttggctgaggtgttctaactggtctattgattactgaaaaaggtactttgaagtctccaactatagttgtagatttgtctatttctcctttaatgtctgtatctttttatttcatgtattttgtaactcttttgttagacgcatataaatttaggatcactgttttctttgtgtactgacacttctatcattatttaatgcccctggtaattttctttgctctgaagtctgtttcatctaatacaaacatgaccattcctgcttcttttgattaatgtttgcatagtatatatttttctacccttttactttcaactcacctgtatcattatattagaagtttgttatagacagcatatacttggctaatgtgtttttaacaatatgccaatctttcatttgttctgcttgtttttttgagacagagtctcgctctgtcacccagtatagagtataggagcgtgatcttggctcactgcaacctccgcctcccgggttcaagcgattctcctgtctcagcctcctgagtagctgggactataggcgcccgccaccaagcctggctaatttttgtatttttagtagaggtggggtttcattatgttggccaggctggtcttgaactcttgacctcaggtgatccgcctgccttggccttccagtgttgggattacaggcgtgagccactgtgcctggcatatttgttctgattttctctcctagcttcttgtgggttactgatatagtttggatatttgtctcctccaactctcatgttgaaatgtgatcctcaatgtgggaaagtggggcttagtgggaggtgtttgggtcactggtgccgatccctcatgaatggcttggtacccttgttgcagtaatgagtgagttctcactctgttcgttcatgcgatagctggttatttaaaagagcctggcttctatcttgctccctctcttcatcatgtgatacacttgctcccacttcatcttctgtaaagcagagtaaaagcttcttgaggccctcaacagaagcagatgcttgtgccgtgcttctcatacagcctgcagagctgtgagccaaataaaccttctttataaactagccagcctcaggtattcctttatagcaatgaaaaatggactaatacagttacttaaaacatattttagagttccattttttatttttctagggttttatatgtatcctgtggtatagtcttttcttagtggtaactccaagtagtacctaacataaacataacttcctaaggtccactggtgtcaatattttaccggtttgtgacaaatgtagaaacctcgctcctttgtaattgtcttaactattatttcttgttcagtaaatccttaatgttgctggtaggttcttggaaactgtgacttcaagcagaatgatgtactatataataaaccaactttaccacaggagttaagttcccatggcacacagtacatcacttcacttaaagttgcaggacccaagaactcactgatgatgttgaggccttagtgtatatacacagagaaccacatcgaacaatgatatagtgcttgctggacccatgagagtaatgaaagtctattgaattaccctccattttgattttccatttttcttttttccttcctgatgtttctggattccctctttcattatttcctttctgtggtaagaacatcctttagctactcttttaggactggtctgctgggaacggattcttttagttttctttcacttgagaatgtctttattttcccatcatcctgaagggtatttctgattgatatggaattcttggtagacaatacttatctttcagcacttgaaaaatgctgccttttcattttctggcctctgtagttcctgatgaaaaatccaatatcatttgttcttcccctgtaagttaggtgttatatctttttcactgcacacaagactttttttgtctttggttttcaaaagtttgattatgatatatgtagatgtggattcttttgggtttatcctgtttgggtttcacgcataccttaactgacactacagaggagttgctcgtggtgtgtggcctcactgctgccatgcatttgtaaatgggagggatgccttgttactgcccagaagggatggaaatctaggctttccatgtggcctccactgatgccaccgggcagaggggctcattactgccccccactaggatgaaagtcccagcttcctactttgtcttctctgatacccctgtgacaggggaggggtcttcagcttggcaagggtgaagtccaggctccccacttggcctttgctaatgtgggtggtggtggggccatagttttttctatggtgtctggctagagtagagcagttactgtttcaaaattttctgtcttgctaggctgcccatctcttgatcctttgtcaagggagcagaatttttgttgaggctttctttggtctgtacttgacatttccaggttgccagcttcttcagttccaactttgggtatacgaggcagaaaagaaaaccctgaacttactacttttaggtcacttggttacaaggtccttaggtggtctgctttcttccttacatctttgagagtcttcttatgcttgtttttacatgtaatatccagggtgtttagatgtatttagcaggaggaatagggaaaactgtatctgcttcatgcttccacaagcataagtccaatcatttactttagtggattcatttttcttttctttttttttttggtgagacagtcttgctttgtcacccaggctggagtgcaatggtgcaatctcagctcactgcaacctccacctcccgggttcaagaaattctcatgcctcagcctcctgagtagctgggattataggtacctgccaccatgcctggctaattttggtatttttagtagagacagggtttcaccatgtttatcaggtcttgaactcctgacctcaagtaatccaccagcctccgccttccaaagtgctgggattacaggtgtgagctaccatgcctggccctttttttttttttaattgaggcaggatcttattatgttggcaaggttagtcttgaactcttggcctcaagcaatcctctcaccttggcttccaaaagtggtagatttcaggaatgatccactgcatctcgcctagtgaattcattttgatgacaagaagaaaaagttatctattaaacatgattaaataattattccaattctcttaaaaacatccataagtttttttggttgttttttcacatccataagtataactaaaaaaaagtcacacaaatcatggaatttactcttaccttgttcactgccatttgcacaaatgttaagattgacatatgcacaagcaggaccaggaagggaagatcctctggtgagtgtaatttccagttcagatcccttcaactgagcacatgagaacgtatgactgagtaactgtggcacctgactgcaatgtgccacaccatcgtgtaacacagtgacttctcagtaacaacaagagctgtacacaattgataacatattcaatctcattactcaaagtatcaaaagctacaatttatatcccatttttcttctcttcttatcctggtttcttaaaaatatatgctcacttaaaaaaagtcaaataattacacaatatgcaaaatacaaaatgaaactacactgcaactcgcctcactgaaaaaataaacagccatcatcagcccctccttgtcttgtcctacttgtctcatagaatgagaccggagcaaatgattaagcaagtgactgaggtatattttaaatgatcaactttttttttttgagacagggtcttgctctgtcgcccaggatcgagtgcagtgatgcaatctcggctcactgcaacctccacctcctgtgttcaagcgattcttctgcctcagcctcccgagtagctgggattacaggcgtgtaccaccatgcccagctaattttcgtatttttagtagagatggggtttcaccagcccaggctggtctcgcactcttgacctcaagcgatctgctcgccttggcctcccaaagtgctgggattacaggtgtgagccactgtgcccagtctaaatgatctacttctaagttataagccaatatcttccctaccttaatatcatactttcataagtatatctaaaattcctagatgtaacaacagaaatgctattgtaatctttctttttttgtactgtacttttatggagaacccactaccagaagagttaaatgtttttcaagccaattgctatttacttttaatgataattaccagaatccacacactgccttttctagttttagaaaaaacaggccattttatttccgggcaaagctcatgtaccctcctggctaccttcctcaagagaactgttgtgaaaacagttccatcttccctccctgctccatcttttctgagcttccactctctgactctacccactactgtccagagcaatacttcaagacagagtgctgtgccgatctctactgtgggacagaatatcaacacgtgagtacacaaagtcaaacctaatctgaaaccctttagtagtagttcagtggaactcaggactcacctgtgttttttcttgaataaggactttatccgatggagaaactggatatggtttcaagggagcctttatggtggtaaatatgaactctgtgtggctttcaataacactattcagatatgttccttcagactttgctttatagtacactgtgatttcatcagttggaaccagattgcactgaaaacacacacagaaaaatttaaaagggaagtacattctattaatcagaactgaaggaaggtactgttgaacaagggctacagatcccatgctgaatcatcacagaagggcagtcacccttccctccctgctgggtgatccgtaagactaactgcactcagtacatgattaactttgtgtctttttcaccactctttgggggatagggcatgtttcttttcctagaacaatcagtacctcatgaatgttgaaaccaagaaattacttagaacccacttacaaagctctgaactgattcagaggtcacaagcacccactcatctgctggaacagcctcctcagaccttgaaccgtctgggaagaaagatgtatgttagctgtcactgccctctacagggcaagaaattcctgattctctcactagcaggggctttgcagcccctctgcgctccaggatgagctccctgcatattcctcagctctctaataaggaaaaactacccaactctgtccaaatccgggaatctcccctaagctagaagcctgtctatgctgactgcacctctgcccttctgcaaagacactatcagctctgattaccttctgctccagtcacaggggatattctgtagaagcccaacggagctaaaaaaaaggatgggaaaaggcacaggctggctgaaagctacgacttgggagtgaacacgtggggagaggaagaggagtgacttttctgcagaatacattccaaatggactatggattagtgattgttatgcattgatcactatggtttatattacctgcctctcctatcttctccaaacaaccaaaacaaacaaaaagccaaaacagtagcttattcttaactgacaaactaacctttttgcgaagtttctgtatgcgattgatgacttcccgagccattccttcatctaccattgactggtcaggagtgacatctaagaggaccaaagcctgtgggaatgaacagtgcacaccatgacaatcaaataaggagaaacacttcttcccaactcagcaaaatgttatttaaatctggagagtctataatgcagcactattttttcacacaaatgagcaaaagcaataaaattaatctagtttatcattcaggtacttcttcataatcagctagtcctctgtctctggagaaaggtgtgcaggtttttgtttcttgtttttttgtagggtgctgctcacaggagatgccctgggaccacctcttatcagagtccctcacatgactctgctttttggccatctaagaagtaatatcaactcttctaataagtaagatcaataatcatgaagcccttggagcagcacagcttttcaggccacaacaagtggatcaacggcctcagcgcagtcaactccaagtgactttcctataccatgacccctgtgatcttcaggtttgtcagaacgactcaagacaaattctacaatggaccacaaaactttctgtgacttaaactgccatatttttgctaaggttaatgtttctatctcatctattctgaaggttgctgattatgatgtagcaataatgacactatcgcttctgttacacagcatgttgcagagtaaaatatactctacaaaagacttgtacattaggcatcatctcatttacctttgagtaaacagagaagttaagaaatgactcacttcataaaggcatcagaggtagtgaaatgcatgataaactcaaaattccagtcagtgcagggccactacaacatgtaagccatgtcaagaaactcagaagcatcacatgacacttttgtaaggtggacaacttttcaggcccctaacatctgctgtaatgaggaagaactgcccactgtcagtgtttagaaacctcctccctgccttctttcccagctacgatacctccgactccttgccactgtcttcccacgtagagttctgtacacatctaacttaagcgcctgggtaaaggactgaggaggtcgaccttcctttcatggaggtgctgctctaccttcccctgcacatggtatgctaagcacagagggacccctgcaatatccccaaacccacatgcgagatcttacaactatgctgactggggatgtctggtcaggactgcaaagagatagtctcttctccaatatggcaaaaaatattgatcctggaatctaaaacagtttgtatattctcttgaaaagagtgttccctgaccacttttcaccctacacctatttttggataggagccctctgtgtacttatttctaccagataacttatcaggtagaatactaagaactggcttaatttcaggtgtccttgactgactcattccttgaagggttcatttttgtgcaaccccacacttgggacaatgactgacatgtagaaatcacaaaatgcttacttatgtattcactaaacaaatgcatatgttaagggcataataatatattagtttaataaagccaatctaaaccaagtaactggtttattttaccctgagacaagctgtcaacattatcaggaaaggcacaggcaaatactttctcctcttatgctctcatctcttggtaaagaaatgttctaggaaacagaaaaatacctgagcatctgagtgtgcttcaaattgcgcagtcccacctgtggcctgatcaaaggtgtacatgaggcggatgtcttcatcgtgcaattcatggccttccacaacaatggtccctatggagaagcagctacactgttaatcagcttcccctcctcttcaagctgccccactacccgtgtattatgccccttcttgattaaaatttcacaataacaaagccacagaggcttcaagagatcatttccctctgactcatgtcatggttgtagccaagacatgacaaactttctttagattacactatgctaccttgaagacagttaagtcatcaccagtatctactgttttatataaactctcaggtccaaagacatgacaaagctaagggaaggcaccaagaggcaacaaatgctcaccataaacacagagcagcaggatgtcatgaagaaaatacagtctttaaagagaaagtgaacttaggtccactatttgctggttgtatgacatggtgttctgctacctgctgagcaaggtgtggtgaggctaaaatgagacgggcagtgtgtagtactgagcatcatgcctgttcaggggaggcagaaatgtgaacagctgctgatgttaacacccccgctgatagggaggcccactgttgtcactgatgatgaccttcttgggctctgagcacccgggtgtcatttttatgtttactttgtctctgtgttctgaagatgatcttgttttccatcagtgcagaacagtacgctcagaaactaggctttcaatttcaaataaggtttagcccaggaattttttttttttttttgagacagagtcttgctttgtcacccaggctgcagtgcagtggcaggatctcggctcactgcaagctctgcctcctgggttcacgccattccccggcctcagtctcctgagtagctggaactacaggcgcctgccaccacacctggctaattttgtgtgtgtgtgtgtgtttttagcagagacggggtttcaccgtgttagccaggacagtctcaatctcctgatttcgtgatctgcccgcctcggcctcccaaagtgctgggattacaggcatgagtcaccacccccagccatctcaggaatttttgatgctttggctatctggcgaacaatttagatttgtggcttgaaggctcgtaacactttgttattttaatattttgagttgattagtaattagtaataacttgaggtttagctgctgatgtcttatgttttattaattctatctaaatatttggagaatcttagggacagttcccccatctgatttatgaatcctcaaatctctcttctcaagacatctcctagcttatgattttcaacttcagaggaagccgtaacaataaacagcttgtgccccaggatagttacaggatgtcagacagccacactcagaccatgtatgattctaatcatggcagagctgcaaatttctgggcaccctgaaatgctctgtataggggtagcaagatggggctgatttccctttcctaatcccatcatttggttaggtacccccacatgtttttatgttaccctacaccttccctttataacacttatcaaaaccataattattttcccaaatcttcaatgtcagcaagcaccatgaaagtaaggacaaaatcaccctaggctccagggatcctcccacctcagcctccagagtaactgggatggcaggcacataccaccacatctggctaagtgtggtagtatgtgcctgtagtgatctcaagtgatctatccaactgggcctcccaaaatgctgggattacagatgtgagccgctgggattacagatgtgagcctctgtgcccagctattttctttctaaactgtaagaattatttataataaacatttttatcaacaggaaaaaaagttttacttaagaaaaggatggaccggtgcagtggcacacacctgtaatcccagcaatttgggggaccgaaggcgggtggatcacctgaggtcaggagttagagaccagcctggccaacatggtgaaaccctgtttctaccaaaaatacaaaaattagccaggcatggtactacgtgcctgtaatcccagctacttgggaggctgaggcaggagaatcacttgaacctgggaggcagaggttgcagtgagccaagatcgcgccactgtgctccaggatggatgacagagcgagattctgtcaagaaaagagaagagagaagagagaaaagagaagagagtaaggaaaggaaaggaaaggacaggacacgacgggacacgacaggacaggaaaggaaaggatgtgatattaaaagtcaaacagtagcctaaaaagtatccctcagactcaggacataaatggtgcccttgtctgtgtagacacctaccagtcttctggaactgctccagctcctcactgctcaactgcttgatggacgtcatcactgccttaaaggctcccttcagacgcttccccaggaccatgtgatctggttctgcccttagccgaatgccatacttgtttttatctgtagacagtgtaacttttcgaacattgagttcctacagttaatgcacaagaggaaacaaaaatgagaaatgaaaacatatgttcacacaaaaatgtaggtccacagcagcattattcctaactgccagaaagcaagaacacttcaagtgtccatcaactgtgaatggataaacaaaatgcagcatacacatgcaatagagtatttggcaatatgaaggactgaagcactcatatgtgctacaacataaattaatgtgaaacattatgctaggtgaaacacgccagacataaagattacaaattgtatgattccacttatatgaaatgtccagagaaggcaaatccagagatagcaaataggttcgtggatgccaggaaatggtcagatattgaggggaaaatggtttgtgaatgttaatgaatactggctttctttctgggacgaggaaaatgttctaaaactatggtgatagttgtaccattctataaatatgcttaaaaaccagtgatttgtatggtaagaagaaaatgcttgttatgaagatctatcaagacagttgagcataacagaaaaaggactccagacccagaaatataaacctcatccctcagaggtaacctttgtgcaagcaattgcagagtaccacaaggttaactattaactaagcagaagatcagttaaacagaacacttcatgcttcagtcatgctactgaggattactgatgcggcagggatggtgatggcacagtagcggatgggaaaatgagaacagcttgaagcaaataatacggaatgtttagttttgccattatatttagctacattaattaatctcattttaagtgaagtagttaatttcaaaatttttcagctgggtgtggtggcgcaaacttgtaatcttagcacttcgggagatcgaggtgggaggatcacttgagctcaggagttagagaccagcccgggcaacatggcaaaaccccatctctacaaaagcctgtactactatgcctaatctccgccacttgggaggctgaggtgggaggattgcccgagcccaggagatggaggctgtagtgagccaagatcacatcactgcactccagcctgggtgacagagcgagaccctgtcacaaaaaaaaaaaaaaaaaaaaaaaaaatttctattttatgcatagccacaggtactaatgtcagaatttaaaatctaacttttggtttctaatatttctctgcaactttcaagcaactgaaaaccaaatatagaaattaacattttctataataatgattttaaatatcacctgtgaaaagaataaacaatgaaattttaaaaaatatttgttttctatcatcacaaagaagatgaggtaaaacatatgcgtttttaaaacatcatggaataaagatgttttaaaatatcatggaataaaaatgtttaggaagacaactgacactataaactttgaccccaaaactccacttctggaatctatccaatatccatacactgatatatgcatatatgtacacacaaagcttttgtttgtaatcagaaacctaaatgtcaaacaacgggacagtaattaaataaattatgaagcagccaggaagtgagactccagggagaaatggggtggagagaggctccctatgctattgcttcgactttttacatgcgagggtacttgtcacttgcataatttggaggaacaaagtttctttggtagttatcaaaaagtacttcagaaggccaggcacagtggctcatgcctgtaatcccagcactttgggaggccaaggcgggcagatcacttgaggtcaggagtttgagaccaacctggccaacatgatgaaaccccattctctactaaaaatacaaaagttagctgggcatggtggcgggtgcctgtaatcccagctactcgggaggctgagacaggagaatcgcttgaacccaggaggtggaggttgtggtaaggcactactgcactctagcctggatgacagagtgagagactctgtcgaaagaaaagaaagaaaagtaaagtaagggaaaaggaaaaggaaaggacaggacagaaaagaacagaacttcagggaagtgaatgaagatgatagatgataggtaaagaaattcattgatcttgaaatatttttaaaagaattacaacaaatttatgttgattccaagcacagtgtaaaatatggattattacatttgttatgactatactaataaaaataaattatagagtcaatatgtactttgaggattattcatcaaaataatgttctaagtctatctgtaccaaaaacagacaaatcatctaccttacctcaatgatatacttctccaaagacttgatatctttaagagcttctggatcttgatggataaccacaatttctttcaaaggatactaggaggaaaagggaggggaaagttcactcagcagccagtcctctaaaactgcagaaaaatggaatattaaatgtttatttgaatctcaagctctagtcaggctggactagtactaagtcattcacaccctcactgcagaaaaggaaaaaggccattggtggaagctctctatattaaaaaagcattccaaacacttaattaatttaggtctgtgccatgtaaaatagaagtaaaatttcaaacctttatgggaatagtttttcggtctctgatcactcttccaagttcaatcacagactgcatctgagatactgcactctctgttttcttgtcaatcaattcttctctgagtggtagaggtaggaatatgaaagagtttagatttaagaggagaaaattgaaggcactaggcatgcataagcgaggaagagggtcaggctagagaagtgtggctaggccctcctggtgaagcactggggaagggcagcgcagtgcctaccactcagcacccggcatctccccaaggagcccccatggggcatgcccacaccccacctgccacagctctacaaaggggttccacaccaagcatccttgctaccgtgtaccaaagtgggccccatcctgcagcctgaggagttcatgtcagctggggcgggaggcaaggcacagatggagctggagcagggaaatccctcctcttccccacatgcttgagcaactctcccctccttggcacaggtgaggcttatttctatttgagtcctaccgaacacggggcagcatgaggtagtgaatgctgagtgtgtccttgtcctgaacagaaacagggtcaatcagcacctttagattctggtacatcaattcagtgagaaaaggtgtgtagggagcctgtatgaagacacaggacatcatgtcagttatatgcagtcatcaacaactgatctcatttatactgagaaacaactaaacatgttagagaatgacacagtaataggcaccaaaatgagcatgaggttacaaaacatgccctgtgaatgagaaatggcctcatatccctgaagcatagctgcaggactgtagatagaaaaacccaaagcacctctagaattctgaaggatgtctaaaatagaaacaggagcacctaatgatgtatcagccaagtcaatatgcacagaagactgactgtcccacacctcagaaacctcatctgtaaactggggaaaataccccctgcttcacaggatggaggtgatgagatcaggcatggagagcaccaggcacagcaccttgtacaaagcagattttccttcggttaaggaataaataggagccttataacatatggagtaaaggaaacaggataaaaagaattaaagttggagccgttccacttttatattatttaactaatatctgaactgataagaacatatatcaaacaattacttgcacgttttcctctcaatgctaagttaaagtattttttgtgatatatatatatttactcagacaggtattagctgaagaacctcccccattactcacaattatggcaatccacattaagatgaggtatgtcttactttgaactgtagatcctcattctagagccaagggccctgacatatattgtactgccagagactgtaagaaagaatctagtatttcttagtccttacttaacatgtataagctaacaagatttctgataaggaactagagctataaggtgttataaaacttctatatctatttttggcagaataatacagaatggatataaatggaggatgctgcagcaagtaggtgctgaaggcagcccataggccaaagggtactagaaagaagccaatcatcttaccataagtctgcaaagagaaagcagaacactaaacaaggtttctagggccatgacacaatcctccatcccattttcaccctaatgagtaaaaaggaaacataaacattaaactgttaaataagtgtttatcattaaaaaaataagtttattaaaaagaggcaatcttcaaagaacatgcagcatacagacaagacatgagacagagaaaggagaaagggccacgaccacaggccatccacggtcagtgccaccagggtggcccttcagggcagtgcaggaggcctggccaggatgtgcacctgctgtcccactgactatccccacctgaggcgagctgacagggaagtagagcctaactgtaggacccgaaggctgaaggtagaatggatctacccacaacagacaaaaacagttgctaaccaaaaactttaaagtacctttaaataagatttatgttaaaaaagtatataatgtgtattaaaaaaaataccaattcattgaaattttttcattatctttgtttttcctacaatcataattaatttatccagagacaactactgtaagcatcttagcatatgtccttctagatacgtgtgtgtgagatacatctgcacaaaaatgaaattacagttgtgttgcaggcttttattattaatgccttttaagacatgactggccaggcacggtggttcacacctgtaacaccactgctttgagaggctgaggccagtggatcacctgaggtcaggagtttgagaccagcctggccaacgtggtgaaaccctgtctctgccaaaaatacaaaaattggccaggcgtggtggtgcacacttgtaatcccagctactggggaggttgagggagaactgcttgaacctgggaggcaaaggttgtagtgagccaagatcatgccactgcactccagcctgggtgacaagagtgaaactccttctcaaaaaaaaaaaaaaaaaaaaaaaaaaaaaaaaagacatgactaatgggtagtgggagccttcattgggcctgcagtaaagagacctcgctctctctattaagcatcattgttatttatgtacctggcttaagtcctgagaccaggacctatgctctgctcatcctaaacccccaacagctacagaggagttctgtccacagtaaataatatctgactcccttgtggtagaaggaagtacccctctcaatattaatgccatatctaccagtatttttataaaatatttgcatgattttattttgaattttaagaggtctgctcagtgtagtcctgtttgtgccttgacattctccctccaatatgacatgtacataattgtgttgtgaaaataatgcaaaatgacttttagaacttatagatccctatccctcaaatgacaaatatagttaaaatgcaatgtaaaaggaaaagaaaaacaaagcttcaaaaacggagagcaactgaaaatgttcctctcccttctggctattctcatatttcttctactttcaaacttcatacactttttgcttttcccaacagcagtctgcacttacctttaatcttctgcggttcattctaacataccaattggtcagaatatctacaaacttgaccaggcgaggcaccacagtataaagcctataagctaaaagtaagacaagtcaatcaggcagcaagtgggttaccaggcatctggggtggggagagggttggatacaacaaagaaggggcagctccttccatccaagtgcctccacttactaaggagaaaagaaccaaaatgaatcaatcacataatgactgtttgttgaggatgtgctacatggcagtcagagtgtttaggggtgcacacaaaaaaatcaccatgtgagccacatgcgaattcccattggtcagtgagaaaagccaaaaactccagtatgtgtggatcaaagtccaagactgcccactacacaactgtaggaagtgccatttacacggagctgtgcaatttgacagcatcaacaatgcccaacttctttccattgtattacactgtacttcaactaaaagacaaaaagcacaattcagatgctaagaggcacagcataggccagtgattctcaaacaaaagcaattttatcccatgggaaacatttgtcaacgtttggagaaacattttgcttgtcacaacttggagggtagcacggtgctactggaatctaatgggtagacccagagatgctgctcagttataaagcacagcacagccccaccacagaggatgacctggcccaaactgcccatagtgctgcagttaagaaactctggcacaggctatgaataaaatagaactggccttctaaacattaaaacagtcgagtaaaaacagcatcagaggtagtgaaggtcttgaggaattaggaggatttgaagagttccctgagaaactcagagatcaagtaggaaagaaagggtgtttagccaattgtctgaggcaaggcttattttaaggattctcattcacctcccatttaattaatactctttgttacataaaaacaaacacaaaaaacaaaaagaataagaccgatacttagaaacaaatacaatttataataatgaaaagagtccagggactgttaatgaggcttctggtctaagctaagagacgagaagttgcaaccggcagagctgctctctgctgcttttcacaaagaccagaactcagatgtcagtgggctgagccccaggccagagtcgttagctggtcacactttcttagacatgtgatttcagtaactgagacctgtctaaatgatttctagggttcacggcactttttaccttccaggaagctcaggttttctatgttctggtttcaactctgagggagtaaatgaacccaaatagaactccacatacaatggataaacatacaacacacaggggcagcagcagcagccactacccaggccaccaccaccctgtgaggcaggtcctctcatacccacagtgctcctgagggagtggaggacatgaagctgacaggccggcagaaccgggacttaaacacggcccacaaaacgtggctgccgatctccagtttccaggcagaccaggctccagccagaatgcgcatctccagacccagcttcacaggaggtcatggcagctggtgcccaaatattgaagggggtccgggcaacaatccccacgtttcccacccacttgtatcactcaggagggaaaagcagacacaggtgtgagcatgtctggggagtgtgctgggctcccagtgctgccctcgccagggcagcactcagcctcacactcacttccatcttcatctgtgtctatctgagcaacagctggactgtcgtgatccttctacatgtttaacaaggtggacaaatcctgtagcagtccttctgtgctaaatggggcagcagcgcctactccagggagcagcatgtgcccgtatctaggctaatggtgaatcccaggtctgtggcggccgctgctcctgcccaacagcagcaggaaccgcagagccctgtgagggtggatttgccttgccctcttttgccctcactgtgacccagggcctctgtccacccactttaactgactgtctgaggtgtcccagatttctcacctggacctacagttgtgattatctcaaaccttaaggaagccaacataatgtactttttgaatctctgtaaaattacccaacgaactcactgttgttagttaatagaaataacagcaaaatgtccatttcattattgctcttctgacttttctaatttttctggaaaagaaggggactatttagtaatgaaaatagaactaaaaataagttataaatgcattaataacaagtattatttattgagtacctatcatctgccagctactttatgtaaatcgtctctacttaagccttacaaacactactgggcattctgcagataaagaaactgaaggtcaagataggctgaataagagtggcatctgatggcacaatggggtgatttcagtcaacaataatttcttgtacatttaaaaacaagaaaaagggtataaccgagatgtttgcaacacaaagatatgataaatgcttgaggtgatggatatcccatttaccctgatatgactattacacactgtatgcctatataaaaatatctcctgtaccccataaatatatacatctactatgtacccataaaaaaaaaaaaggaaattgacggtcagacttcaggcaactctctggattgggaacaagtggtagagttgggctctgaacccatggctatccagctctaaagctcttctgtggagcattgagaccacgaggacaccccctaaagacagaattccccagggctttttttttttttttaagatggagtttcgctcttattgcccaggcagtggtgcaatctcaacttactgcagcctccgcctcccaggttcaagcaattctcctgcctcagtctcctgaatagctgggattacaggcgcccgcctccatggccagctaactttttttttttttttaaatatatttttagtagagacagggtttcgccatgttggccaggctggtctcgaactcctgacctaaggtgacctgcctgccttggtctcccaaaatgctggggattacaggcgtgagccaccacaccaggccagaagtccccagggtcttgaaacaaagatatcacgacaattaacaagccttaacaaaactatatgagaggtaaaaggaaacaattatttaattttctgtatctctcaatatttccactattaaatatcaaaagggcagttacaaagagaatagtccttattcctgggaggacagaccaagagagactcacctgccatttcagtctcaaagaagccaatgagagactgcatgaaggacaggatccaccggtctgtaatgttggggctttctctaaccgtgttctcattgtagagaaattctatttcttcctcctaggaaggaacaattaatgaaacactggcacacttgggaagaaagttactatgaggaaataaacttcttaaatcacttaaacaaaaacaaaaagaaaaaatcccagaccctactggcaatgtgaatttctgattttcagcaatattttcaagataagcaccaacgtggcacattaagtcctcaattaatttattatgtttttgagtaaactgaagagagtttaggaaaacattacttctctgcaccaaagagtaattatgaattgaaagatattctaaaatcttgtcagaaaagtgtagggtttagttactttaaacctcaggaaggaaggacagtagaactgtctaggattgaatgattgtccacaaactgaaaatgagtactgggaaataatttccatgctaaggctgttcattttacccagaaagttctatcccactctttttgctttgcaaaatcctccttgatcttaagtccttgctctacaaacagaactcatgtcctgctttgtttctctggcagcaccacaaccaggctagcggggcagtgataatgtgactcttcctctgtgtttaaggccctgatcatggagtctgtgtcttgctggtatattcagatgggccctggctgtggggagctttgaccccgcctgtattcctgagtcccacaccagtggagacctgcagagtgcacctgcccaaggactgtttgccctacttggcagagaaccacatgcaggacaggtggcaggctgcagagaggaggaatgctgggagcctggggaagatgactgcccttctcaattcctggggaaaggctactctgagagcctcaggtgaacatgatgtgtcctcattagcagaacaaccagagcccaaggggagcagaagtaattgacctgcctgctggagtgggataacaagagttcatttttccaaccagctttttcatctgctcaagcaggaataatatctcattttcattcaacagttatttacttacaagcaattttacttgtaaggtgctggagatcagatgtgcagtatcggaactctgaccccaaatcaggtcttgaaagcccatacaggaacatgttcaatgaaggtgatggacgctgacaatggtcagttgtggggcatggaaggtggctctagagcaagggcttctcaggtgagaaagtaactcctgggcgtggaggtaactgccattgaagtacacttccacatacatcacaactattatatgtgaccctaacaacccactgaaaactccatcgagaactgctgtcactctcagattagcccaaatgccaccccactgaggggccttctctgaccacccatctcaagtggccagccctagcttgcctgtgactccgccttcactgggtgctctctctaaaagttgctgactctttactgtatctcccaattcccactccattggttccataaggggaggggtgtctcactcaacatggtgttcctggtaccaagaactggctgacgaagctgggtgccgtggctcatgcctgtaatcccagcacttttgggaggccaagaagggcggatcacctgaggtctggagttcaagatcagcctgaccaacatgatgaaaccaagtctccactaaaaatataaaacaattagccaggcatggtggtgggtgcctgtaatcccagctactggggaggctgaggcagtgcctcaacccaggaggcagaggttacagtgagccgagatcgtgctattgcaatccagtctgggtgacaagactgagactccacctcaaaaacaaaaacaacaactggcgactaaacaactatatgacataactcttttgcaggctagggcccatggtcttggcatagcccggaccctagataccttccgcacctgcatgtatggcctccccatggctctaagttaccccagcatcaggcagcagagaacagcagccctaaagtctcacacagagctccacctcacagcttggtgaagggagcgctgtggagacacggcaggtacatgtgcagccccctacagcccataccttctggagcctcagaacgttctggattaagaagcgataggcattgtaccatgggagcagtacatccttaaggacgtcccgcacaccctcttctttaaagcggaggttttctgctctcaccacaggggagttaatcagatataatctggaagagggagaaaaattagacagaaaaggtacttagacagtaaaccaattattactactcgacatattgagagagcaagatgaaaatcagtcctattttctacaaaagggggtaattatgaatactctttgagtggtcaatttaaaactcacaaaactcactctcactttctataagagacttagcaaattataaaagacgtatataatctgacaccaaaatatggcactgtatagcacagaaatgcatcttatgccactctcactgcaggaccaatggggtacaccagcactaagagaaaggctggcctggtcctcgtcaagagccactgtgtccttcccacggacacgacctgcatctgctgcttgcagagagagggactcacaaggaagagccttcacagagcagagtcttgacatctggtgggcagaggttagggatgctgctaaacatcctacaaagaactaccaccacaaagaattacacagcccaaatgggcagcagtgccaagggtgagtctaagagacagtggagaattgggggagagccccactaatggctcctggtcaacagaggtactgtgtgaaggtgctgagtcacaggcctgggcactggtctcatgcctaggacacagggatgctgaacaagatctctaggtccctttcaacttgaacactgtgtggtttcatgattacagctacctcaagcagtggctcaaatttctccaaaagcttttcaatatgagtttttttatcacctctagcatagatatatctcacatggctctgtaagtacaaaattaaaacaaatgatgaaagagaattctaataccaacaagacagggaacctagaaaggaagtaaggcagaggcaatcagcatctagcctggggaggacttggacagctcaacaacacccaacacaggtcctcttcctcaaacagacctctaggtttaaaaatgcctttattatttagaaaactattttgggggtttaaaatcaacaaccataccaacataacatccaaataacagagatatgttgctaaaaacctaactataaaccaaatctaagaatactgattaatagtataggagatgcttacataaaaaaacaatagatacacacaaggcaaagcactggtttgtacctgagggcatcagcaccatacttctggatgatggaaactggatctggataattctttttccgtttgctcattttttggccatcacttgtaaaacaaaagggagatgccaattaagtaagtcaatatcacagatgatcttgttttaaggatacaaatcatttgcaaacaggaatatacaaaatgaaatgggaaggagtaacttagatagaagttagtgctaataggccgggcgcggtggctcactcctgtaatcccagcactttgggaggctgaggcaggcagatcacctgaggtcaggagttcaagaccagcctggccaaaatggtgaaacctgtttctactaaaaatacaaaaattagctgggcgtgggggcgcacacttgtaatccccactactggggaggctgaggcaggagaattgcctgaacctgagaggcagagattgaagtgagccaagatcgcgccactacactctagcctgggcagcagagcaagactctgtctcaaaaaagaaacaaacagtgttaaggtacaatggtaagatattttgttaatatttgcaaacttctttttgaatatcatactaagtccatgaggaagcttcagggtagactgaagaagaaagatgtgtcagaatatatcccaaagaaatgaaaacttacattatcataaaaacctattatcaattgttcacaacagctttattcacaattgccaaatgttagaagcaacccagatgtccttcaagaggtggatgatcaaacaaaccatggcatacccataatacagaatgctatttatccatggaaaggaaggaactattggtaggtgcagtcatctaaaatctcaatggaattatgtggatttaaaaaaagccagctgggtgcggtggctcatgcctgtaatactagcactttgggaggccgaggcaggtggatcgcctgagctcaggagctcgagaccagcctgtcaacatggtgaaaccctgtctctaccaaaaatacaaaatattagctgggtgtggtggttcatgcctgtggtcccagctactcgggaggctgagatgggagaatcgcttgagcccaggaggtggaggctgcagtgagccgagatcacgccactacactccagcctgggtgatagagtgagactctgtctcaaaaaaaagaaaaaaaaagccaattcccccaagttagttactgtataattctatttatataacattctggaaacgacaaaattacagagatggagaaaaaaccagtggttgccagggattggggatgacagtgggaaggcaggaggggaaggcaatgcaggaagggagcctttgatgttgaattcattcagtaacctgactgtgctgctggatacaggatcctacacacgatagccgtatacaggtaaatgcgtataagcaaataagtatatgtaaaactagagaaatctgaatacgattagtgggctatatcaatatcctggttgtgatatatactgtagttttgcaaaatgtgaccactgggggaaactgggcaaagaatttaagggatctctattatttttcacaattgcatgcaaatctacaatgatctcaatacaatttccccctttttttttttgagatggagcctcactctattacccaggctggagtgcagtggcatgatcttggctcactccaacctctgcctcccaggttcaagcgattcttgtgcctcagcctcccaggtagctggggttacaggtgtgtgccactgcacccactaattttgtatttttagtagagacgggggttttatcaagttggccaggctggtctccaactcctgacctcaggagatccgcccaccatggcctcccaaatggctgggattacaagcatgagccatagcacccagccctcaataaaattttcaattaaaaaaaaaaaaaaagtagtacacatactacagaggcagactgcctgggttcaaaatttgcatttaccactcatttgctgtgtgtcctttggcaagtcactttttcctgtccctcagattcctcaaaggtcacaaagggattataggacccatctcaaatggttctggggattaaatgagttaaaatgtgaaaatgcacacagtggggcctggcaaaaaataaggatgcacaaaatgttaggtgacatcctcttcctcctcacacagcatataaagtaggatttctgtgtgggtactcagcacaaattctattttaaaatatttcattttaaaattttcatttatgtttatttttattcttaatgactagaggtaataaagtaaaggaaaaatgagacttccttataatagcaaaatgtgggaaataatgcccattgggaggaagtttcagatgaggggaagaatgggatctggtggcagagtacctcggtcaagcccagtgtggctgtcactagctttgatcctgggcacctgtggtctctagaacccacagcttcctcgtgtgttaaaaaaaggacaacaaaatctacatgaaaggactgatgtacagattaaataagatctataagcaaaagtatttcataaagtgctaagtttagtaaatgctattttattactagtaatatcactagtagcattatgttactagcagtagcacaatctgaaagtcctccccttcctcctcctccatcaggcttagctgtcacacactccttcttgagaaacagtggagacaaagctccacctgtcactacaacaaagttgaccgctctcacgcactccttcttaagaaacagtggagacaaagttccacccgtcactacaacaaagttgacctaccttgccaggacaagcccattcacaattacgttcttgaaaggcggttgtccaaagagggccgtggccagcaccagcagggtataaaacctgaaaaaaaaccccaaacagttcaataaaaatagaaatgaagtccaagcataagaaagaaactgtatttattcattgaatttctatttttgataagtcacacttcttgagaatcacttaaagcaatgattcttaatcctggttactggagaccaatcaaattactgtctaagatttgaaagaagcattgaaataaacgtctggaatgatttactgaccatttctctgttaccagagctcccaggaagtctgtgtggagagccacatggcagcactgggtggcctctcaggaccacccagaagcacctagctgaagatgaaggatgggttttgaatttggcacaagatcatatggaaaagacaatttgatgacaaaagatgcaaaatgcactctcacccaaaagtgataaggcagactagaaaatgcttttattctgtaaaatgttatgtacctcatttatgtgctacctagcttgtttcccaaatgaactcatatccctgaccactgtcctgggggtgatgctttcctgcctctcttacctagtcctgcactctgagaacatcaagggacatgagctgaggagaccagaccccatagttaacataaacactgatccagatatccctcccacttctaaaggagagttgggaggagccctggtgcccaggagaggtagcccaggcctcaggaatggagaaggaggcaggcaccaaggacacgggatccacatgaggactgttaccagctaacagactttgctactcctcaaaggaacaagctcattggtaaggcatctacccctttctaaaaacagaatttgtgctgggtagctgttcctatagacaaaaaggactggaatctgaagacagcacattccagaacatgaagacttgaattcaatgattacccaaagctgtcaaagagagaaaatgacaccaacaattcctttaacacacccctgcagaaacattactgtgaatgtataattaaaacctgggctgggcgcaatggctcacgcctgtaatcccagcactttgggaggctgagacgggtgggtcacttgaggtcaggagttcgagaccagcctggccaacatggtgaaacccagtctctactaaaactacaaaaattagctgggcatggtggtgcatgcctgtagacccagctacttaggagggtgaggcagaagaattgcttgaacccaggaggcgaagggtgcagtgagccgagatcacacccctgcactccagcctgggcagcagagtgcaagattctgtctcaaaaaaaaaaaaaaaagtaaataaagcctgggccagcaaagccaatccatggaaagaaagtaattcaccttcttccaattaaggaactgttttacataaggcaccagataaaaatcaatgcccaaatcctctctcatatgtatattttttaaaaatctggatttttttagaatgttgatttataaggctagcctcaatatctgagcacattaccaactatccctcaaatttctagcacccaaactactgtcttttatgcaaatactcaaacatttgagtaaatgatctgacgtaagctaagaacacataactttttttatcattttaacatccagtgtaacacatatattccaaaatgccagtgagatcattgaaattgtaaaactacagccctattgtagtgggagagtcctactcaaaaggcactttaatgtccgtgcttggtggtggaggggagagggcaggaatgtagcctgtcttatttgccacaatctctccatcacccagtagataaatggcagtgacttagtaaaatactccctaaataaaataaaatcaataaaacacgtgatgaaagaacaaggaggcataccatcctctggtttggtcgatgccctcggcaatgaaatctgcaggaaaagcatcctcaaactccctcttgttttcaaacgggtaatgaacctgagcatagggcatgctgccactctcaaaccaacagtcaaacacttcagagatgcggtgcaaggatcccttcccacagcgtgaaggaatggtcaggtggtcaacactaacaaacagaaaagtagtcatttctattaactgtaagcataacagaacttgcagtttaattgctaataggaaacacaaaaccctgacaagatattatacacatttgcaaacagaaatatcagcaattctcaaaggctttcagagagcaccatgaatcctccatctgaaaggttatgcaccattcacctcacatttcacaaggacagaggccacaatactgcaatatgacatgagtcatcagcaaagtaattcagcaagctagtcacttccatgtgtggctctgtaatctgctagagaccaggtcttaataggagaatcgtaaaactgaagtgaatcgaacatttagaaactgacctctctctgtggagatctgagatctttgctcctgacagttcttcaagttccgccactgacccaatgcataccacctgtcaaaaacaaagttcaatagcaggagctccttagagccaaacagagcatactgagttaatttatatagcatgcatgtttactttgagagactgatgattttctttttcctttttttttgagatagggtctcactaccattgcccaggctggagtgcagtggcacaatcacagctcactgcagcctcagcttcctgggctcaggtgatcctctcacctaagcctcccaagtacctggggctacaggcaggcaccacctcacccagctaattttttgtatttttagtaaagacagggtttcgccatgctgcccaggctggtctcaaactcttggactcgagctatcagccaccctcagcctcccaaagtgctgcgattacaggcgtgagccacccagcctgagactgatgatttaaaggcacattaacacaccaatctgggccgaaggatagtatttgctaatgtggcttctctctcatgaaagacacagcctactcttagtctctgaagaggccagggttgccactgctcctctgtttccaccccagtatcagagggagtccctacctagagagaatcttaaacattcatagccatactctcaatggatattaagggtttattatgtgcaaattgtcaaagtaactggcataagtgaaacatcttagattatttctctaaggcattttagtttcctcctggcacctgaatctggctcattaatctagaatcttcccaagaaaaagctagagctaaattatagtcatacagtgcttaatggtgggaatacattctgagaaatgcattgttagggtgatttccttaggcaaacatcacagacctagatgggatggcctaaaacacagctaggctatatggtggagcctattacttctaagctacaaacctgtacagcatgtggctgtactgaattctgcaggcaactgtaacacaatggtaaatgctctagttttcatatggtttgtccccagcaaatctcaagttgaaatttaatccccagtgtggcagtattgacagatggagcccgatgggaggcatctgggtcacagggtggatccctcgtgaagagaccaatgctctccttctgcagtgagttagttctctctctattagctcctgtgagagctgactgttgaaaagagcctgcccccaccccaccgcccgtttcttctcttgccatgtgatttctgcatactctggctcctgtccagccttccatcataagtggatgtagcctgaggtcctccccacatgcagatgtctagtcttcaactttccagtcatgcagaatcataagccaaataaactacttttctttataaattatccagcctcaggtattcctttgtagctacactaaacagactaaaacaggaagtatttgagtttctaaacattacaaaacacagaaaaggcacagtaaccatatggtatcataatcttgtgggaccactgtcgtatatgcggtctgtcattgactgaatgacattatgtggtgcatgactatattatgcttggacccgattaaagcaatcagacaaagccacaggatgctaggattatatccaggtaaagagctgagagatggggctagctggggcactcagaatggagggatcatctgacaagggccacaccagtaggaactgctgtgcgttctcacccagggagcttctgatcctagtgaacactggtggcctctttctctgcccttcctgttcagtcctgaaaagtcttctgattcagctacttcactgttgcctttcaggtccctatgggagattcaccaaggtccccagggtgctgccgctcatcactgcaacaatgctgtcagctttggacagaaggccaaacacacagatctatctgtatagtaagtcctcgcctgatgtcattgagaggtcccagtagctggaactaagtggcgtgcaccaccatgcctgtctaatttaacaaacatttttgtagagatggaacctcattatgttgcctaggctggtctcaaatatctggtctcaagcgatcctcctgccttggcctccctaagtgctgcgattacatgtgggagccatcacacccggcctaaagtcagttatcaagaacctctgtatgacattaagtgaggacatagtatatccacatacatctatatatctacacacatcctcttattcatttgattttagaagttaaaggtctgtaatgctttggtaaatttcttttcaagttttcttttttcatcatctataaagtcagtttaaccataagctaatagtataccttaatgtagggggaagaaaagacatcggggaaacacacaaaaaaaacatttaaagtgtgtatttccctgagaaaactgtatccttttatttttacagaggaaagttttataaattgtatttaattcaaggaaaaaaagttaaaaaccccagaaacagattatcttatgtcatgattctagaaaggaataaagaggaaaaaagatgaaataagaaaggggcaaagaaaaaaacaccctattcttttaaaccacattcagatttcatgaacaaaatgctttagcaaaaatcaacacaaggaaatactgccatgcctcacctcctcaaagtcatcgctgacccacagtgggatgggggtgccccagtatctgtttctggaaattgtccagtcacgtgcatctttcagccaatttccaaatcgtttttctcgtaccaactctgggaccctgcaataaacagatcacataaccaatcacataaaaatatggaaaaattcaacatgtaaataatacccacaggagcctttgtataacgctttgtggaccaaacactctggaaacgtggcgctcactgcaaagagaatgtcttctaaatggacagcatagcacacacaacagtttgtgctgccatcaatgacctacatccaatagattaccccacagcacacaggcctcccatgtcctcctcttcaactggagtacagctgccacatacctctaaccagtcaccttagctttagccagcctcatcccatacaactctagtcttcacattatcctcaccatagcagtttttctgaactcattaagcaaaggccaacaggccaggggattggtagctgctctagcagccctctctatagtcacctctctggtcatccttggtcttgaatttcaggctctggcaatgaggcaagttccctagaatccttctcacttaactggctttgcccatgcctgccctctgacacgcagcctgcctgccctctgacacgcagcttccctcccttctgcatccatcctcttgcatccctcccactcccagtactctttattccttgaggttcagctttgcagaaatccttttcaagcacaaggctgagtcagggtaggctaccagacctccccttcttctcttgggcactgcagttactgccctgtacttcaaagatcagtttatatgcctgcaccccctcgaggctatcttactaatattctatatctagtatcttacacattaggggaactaattagcttactagctctaaaaatgaaaagctgtcttttgagaaatcaggaccactctgctaagaaatattagaaagctacagtttataactatttcctttgctgccctgagattctccccattctcctaaactcagatacagttttctagagtctagttgggtccttgtgagaagttaagagtggtgattacttttcaaacttgtagtgaaaaacattcatctgaaatacacaggttcaagccttgtttcattttgtacccagaggctgaaatgatacttcttgggctatcacctgcaggacacatatcagctatggaaagcaaaggcttctgtgcttggagcttatccatacagccaagcacagggtacatcatccactgcaggaccaacaagagtaagtacaaatggcttttgcaggtatatctgaaaataatgtttactctgaaaatgactattattgaaggctagcaaactctggcagtacagccatatttttccaaggtcatttcattccctaaatcgaataaatggtggtttatcatttccaatgagtttaaaaagaaaaatactcccttacatactttatcacaagaaggatgttacttctgttctgtaacattatttgaattattttgtgctcctaaacacacagaagaaaagatagctattacaatacccaataaaagatgggttattaaaattataacttgggggaagtgtaaaccatacttactaaccacatgacaaaagacactatgaagaaacacatcttactgctcaccagtagcacaggtcattgttccttaggagctggtccaccatgttctccactcgcacaaaccagctgggcactgctttgtaaattagaggagtgtctgatctggggaagcagaaacacacacatagctgctcaggctgagactagtaggcactacggtaagactgacttttcatgtcttattgacagcatcatcacttacttggccttctgctaatattcatttttattatagataaaaacatctaagacttcaaaattggtcatatctttccacaatagtaagaaaggcaaaaactaatacaagaacaagagtagaaaaaaatagttctgctagtgacaattatctaagaaacaatgtcaacttcaacttcaacacagaagaggcaatgtggaaaccaaacacgatgcaactgaacatttcattttcacccatacttttacagcatggtcttatattaaaggttaaaatcatattaaatttttcaataaactctattacaaaattttagagatgcttctcatcctaaaaaaaatgtggccacaatacaaaacagatttgtacaggtctatttttctctcacagttccttaggaaagcaacatttttagccattcataaaactctcctagaccaggcgctgtggctcatgcctgtaatctcagcactttgggaggacaaggtgggaggattatttgagcccagtagtttgagaccagcctggacaacatggcgaaacctcatttctataagaaatgcaaaaatcagccgggtgtgatggcaccacctacatagttccagctactccagaagctgaggtgggaggattgcttaagccggggaggtggagggtgcagtgagctgtgattgcaccactgcattccagcctgggcgtcagagtgagaccctatctcaaaacaacaacaaaaaaacaaacaaaaaacccaactctcctaaaaatgaagtaagaaggtggcttcccaaaccaactctaaaggatacaagtgagatgaacaccacaaataagatggaatgggcacatatagtaagtgtaagcacagactggaagctctagctacaacacagtctttgtttcttctgacctccagcaaaaagggtagctgtgagtgaaggtggtggcaaccagaagtcggccttgttccttcaaagtcctgatgatacttttgtcagcatcctattaaaaaaaattaaaatttagccattaaaacatactataatacttaggaacaatatattactagaatctgataccttgttatgaataaaaggcacaaataacaaatattatttattatttttagtcactaactttaagtaattttcaagtacattccacaacatttaaggtcataaagtttttcgatctgaaatgacaaccccaaggtcacaaaggtgcttcatgaggcatgaactggagtttttctgatctttccccatgaaatttcagcatgcatcctctaaagatatgagaccctctgaacgtaactgataacatctgtctttacggatttcatgcgatgacaaaaccaaataaaaacaacttcctagaagaattacaatacaattataaatgatggtagagactaatcagaagtaacagtcacccttctatgctatatggattacagaccttcacatactgtcctgcgaaatctgtcacctccgttgtgaagcagcctgaagcatccacagggcaaacagggagtgagtctttccgaataatgttaaagtccatacagacccgatagtcctcctgagaaaaggcaaaagagagggaagaataaaacagtctatgtatgggtgtgagcatgaggtaatagattcccaagataattgttctatattgtaacatatacatttcatcaactttgtcctgtaaactgaaggtaactcaagaccattcggagaatcagaccctcacagttggacaggggttaggtcacccagtctagtcttctcaaatattatttcccagacctccatatgtagcagagtatccactaaatgagaagatagatgacatacatcaattttttaagtgaaaggaattaagaaagtaaagcaataaagaatggctactccataagcagagcagccacacaggaatgttttaaaactaaatcaaatttgatttataacagcagcacacacatctgaaaaaccaaaaatttcctattttacagataggaaagtcgaggtaccaagaagtaactcagctatgaagcagcaatgctaggattcaaaaccaaacagcctggctccagagtctatagtcttcatcactgtgttatgatgcctaaatataaaattaaagagattgccttatgttggtgaaaccacactctgggttgactccaagacaagctggaaagctgacatgcttccacctggatctgtgttcacctctccctgtgctgaggctgactggtgtggtgtcatgtgggtagacaggaaaagcccctaagtgcagcaatttgaaccactgagtgtggagcaagtaactttacccagtgcattaagctaagagcagcattcctgaatgcatccagaaccagtgatgttcaacaggatgacgcacaagtgcacagactctgcgaagatcaaacactacccttgcctggtgaagacaagtgcaacggaaggcctctcagaaaatgtttaccaaggccgggtgcagtggctcacgcctgtaaccccagcactttgggaggccaaggcggtcagatcacctgaggtcagaagtttgagaccagcctggccaacatggtgaaaccctgtctctactaaatttacaaaaaataagccaggcatggtggcaggtgcctataatcccagctacttggcaggctgaggcaggagaatcgcttgaacctgggaggcagaggttgccgtgagccaagattgcaccattgcactacagcctgggcaacagagggagactctgtctcaaacaaaacaaaacaaaaaaaaaaaaaaaaaaaaaaatttaccaaatggtgttaaaagctatagtttaaagaatgaatcttctataacattaacatgcacagcattgagaatagatatatgagatataactctagagttaatgacaaacacccacatttaaaaaagaaaacctcaggaggctgaggcaggagaatcgcttgaacccaggagacggagattgcagtgagccgagatcctgccactgcactccagcctgggtgacagagcgagactcccatctcaaaaaaaaaaaaaaaaacccctacactacaattcaaaaccaagaagttacctttttattatctactaagagtggggtaaccataccagttaattgaccctaaaatgattatgaacaatatttgactagttcctaaaactcttaagtagtattatcaagaatgcttccttccatcaaaatggaccaggtattaggtgattattaaggaattgctgactttattggatatttatactgaaaataaaagtccttatcagtcagagatgcagctagaattacttagacacgaaagacatgaggatgaggatttgcttttaaatcctccagccaaaataaaaaagtgtgctactgtacagaggaagaaaacgagagattgccaaaacattgagagttaatgcagctggatgatgtgaaaaaaagaatctattatcatattttcttctgtgtatgtttcaagatttccataataaaaattcaagtgatggttacactaaaagcccagattttactactatacaacatatcaatgtaaaaaaattgcacccgtaccctctacatctataaaagtaaaaaatcccagagattaagcatgaaagcaaaatggcagatgagggcagactactgccactgccttttagaacaaagtcacatttccaatccctctcactgacaaaacgatcaagcctagaggaatgtgtatgtaggtgctacaccatgctacaccatgctacagaggaggcaaaagaagtccagataggccaggcaacttacccaggaactgcccgttagtggcagtgccatgatttaaggtgagaggtggtttactgtaaagcatgtgcctttatgttattctgtttttattcatacacaaattacataaaaaggaatgtgtttttagaaaaattattctagtcaaaatataaaattaactgtagagtactgttttgaggggagaggtcagattcccccttctgaacatttaattaagaacacagcagaggtgatgggaatggtctgtatcttggtggctgaggcacctgcacgtctctagatgcctgtcaaaactcacggaactgcacaccaaaaagagtttactggatttggcccactctttccagaaatcagcttaggatgaaagggaattgcagatgcaaattttacaagccatcttgcaggcagtgagccagaaaagaggccaacctggtaacccaacatgatgagacacaggactccgcatctatgaaaagtggctaccgacatactcaaatacatttgccagacttatgctactcacagcaccgaagtaaggagcttggtggacaacccctgtgccttcttcttccttcacatagttgtcaacaagcacagtgaaagcgccattctctttacactggaaagaaaggacagcaggcttcagggatgaaacattactgtgttacaacgttaactttgtaacagtttttcctaagaacctgaaaatgcttttaaccggtaaaattattttcagaaatagaaaagaaagaataatgcaggctgggaagaaacatgctaattcaatacatttttcccataaataaaaagttaccacttataaacgaaataattatctggagaatggcagataaaaatttctaatttccttggttacaaacgtgtttttcattagttctccctcccccaactttttgtccctatgcagtttaggatacagtctcagaaagcatgctccctaaattgttcacttcctggtacattttcaatcactgcatatgttttgcttctctttctcctttcaactcagctcaagttattcagtcataaaggcaaatcttgaaaggaacaggtgggagccacgagtagtaagttctacttacaggtactccaccaccttaatactcaggggaaatgtgttcaatttcattttctttgcaacagcaatatcatcatgttaatacatataatgctaacagacctactctactttcatctttttacatttctttccacaaacccttgtttctgccaaactggccctttgatgtccttcctttttgcattggtaaaaagtactttcacaagtgattttcacatttaactcctataattctgtgaacaagctattagtagtcccatgtcttaaaaatattctggctgtatttgcatttcacagatgagcaagctcagaacaaagattaaacttagtcttatccaaatcacacaaccagcaatgatgaagccaggacatggaacaggtcttctggttgcaaatacaatgttattttcaattacatcacagcactcggtttctttggaacttaaaactaaacttgaaaaataaccataaaattttaattgttgtaacctaaatcaccttgaaacattttagaagttatagtatgataggtgctaaaacttcgatagtttaaacagaaagacagaatacatgggtccttagaattacatgtatacttagttacatgttctatacttagaagcagtatagacaaagtcactgcatcttgtctctcagggtctactttgggcctacccaggccatggctgggctgcttccacccaggtcagtagataccaaccaccaggagcagcagtgctgctccataggcagtgtccgctgactcagcttccctcgatatttcacaacaggtatatttcagtgaacatcagatgattccgtcctgggtcaaacgatttatagtacttgcctaaagtcaccgaaggtttcaggtagtttaagaagcttatttaatgagtaggtgttattcaacttaatacctaccaagtgcatattccagacagacctctacttaacctaaagttcctgtctagtgtatccatgtgcattctttcagggggttgagtttttgggttctcaataggttttgtgattcagaaaggtgagagtcactgatccagtggaagagatttcagataataaaaaaaatacaacataaaacaaagtatgttaagctatatgataggagaatggaatgaagtaatgacatttttccaagggagaaaccaaagatgcatttcagaaaactttcagaggacatctgagttcagacctgaagggtgagttaactcagcagatatcaacataagaaaaaaataaagacttttaagacagtaggaaaacttaattaaagaaaggcagggaagcaggaaagggaagagccagtttgactgaataaaggatatgtctaaagtaatgtgggaggatgtggtcaggaagcagctctgccacataccgactggggagggcacgtcctaattgctggtaaataactaacgcctgtagggaggaatgggatgagggcagaacatatggaaatccactgggcagcaacgtgggaggaggaagaaggctatcaagtaggcaacgagaaatgtgggaaaacactcaagaggcacaaaagtgaaaaggcaggtaacagacacaccatggatagggcccaaaccacagaggtctccttaatcaaccagactctccccacacggaacagaaacaactgagggttcagcgaacatttttttctgggatgggacgtaagtgatatgtccagttgattattatttccacataaggccaggtctgctcattatctcatttcaagacctttaaataaggacggagaaattcctctttgacactattctttcggtgagagagtgtgggagtggggacagcagggtttgcaactgtagctgtggattctccactgtcagaaaataaaaccacataaaacaactttatgactctgaagaaactaaggtgctaaatgtatgagctctgtcgtggtgcctagatttaaaacacctgcctcattaacctccttgaaataaaattgtgtttacctttccacatgatgttttactgtgattactatcttaactttgtcaaaacaaacaaacaaacaaaaacctcaataaataccctgggtgatatgtagactacatgcaataaaaatatacacctaaaaatccaatcaaatgtaaaatgattcctcatacaatttgagaaaaatattcaaataaaaaatcccagcttggccaggcacggtggctcacaaggtcaggagttcaaaaccagcctggccaagatggtgaaaccccatctctactaaaaagtacaaaaattacagcatgcctgtaatcccagctgctcgggaggctgaggcaggagaattgcttgaacctggggggcagaggttgcagtcagccaagatcgcgctattgcacgatatttgcactccatctcaaaaacaacaacaacaaaaaatcccagccaggtgcagtggctcatgcttgcaattccaggagttcaagaccagcctgggcagcatagcgagattctgtctctacaaaaaactaaaaacttagcccggtgtggtgctgtgtgccagtagtcccagctactcgggatggggcaggggaatcacttgagcccaagaggtcgaggttgcagtgagctgtgattgtgccactgcactccagcctgggggacagaggaaaccctgtttttaaaaaaaaaaaaaaaaatcctctaagacaagaaagctacacaaacaatttaattttgttggtactaaagcagactttctggattcaggtacactcataaaagtaatgtcaattccacttctcacaacaccccagctatcaaataatcagattgtggagagcgcccacagtagcggtccctaagcttaccttcaggaaatagtcaaacaggggcctgtacttcttgcctttaagataggcaccaggaaatctagaaaaggagaaaggcaaactcacaattagattaaaatcaaatatgaggctgcagccacatcaagctaccactcccctctggtttactggcttcttagccctagccattcatgctgtaatgtgtgactgcaaagtacttagtatagtattagtacttaaaactaaatttgaataatgcaagcttttggataacaaagtttatttctttttaaaactaaagacacacatacagacacatgcacacaaacacagagcaactatttgaatattcacctttcaaggatctcatagtcactctccaatttatagagggctgacaatctggcttccattaaaatgagtaatcgtcctctggcaacatctacgagaaaaaggaaaaacatggacttgggttatattctgaacttggctgattccaaagacatgcatcaagcatacttttgtcctgaggagctcctgtaccatgtgcctctactgtacccagtactcacagagaaatactgcaaagaacactatggtatactgcttcccaaacatgaaaatgacaaaaacatcaaatgcacttaggcagttggtagttattatttatcgctcagatatccattttaagtaaatctttattttttccttcataaggtaaacatgtcaatgtttaaaaataacattgacaaagtagctcacaaattaagtgccacatatcaccccctctcagacattctcatttgggtgtctatggatccggatatttttctatgtatatacaaacaaacatataggtaaatgtgtaagttctttttatttttctaattgaggtaatattctatctgattttgtagcttttcacttaatatactgtcaacatacttccatgtattagcacatacagacttttctcatccttttaaagagctctatgggacgctattttatagaggtacgaattatttctaacaagttgacagacacttaaattgctttcaaattttcactactatgaacactggcatgatgaatgtccttgatgcatctgtgtacccttattgtaagtgtttctggaggatacctggggcatcctaggaaaagaaaagctggagcaaatgtatgaacagttaaaactttgatactgaaaatctaggccaatttaaactctcatcataagctatgatattacacatctgagatttactagagcctatgtcatatatttagttcactataagaaaaatgagtatctatgggtcattgtaaaagcctttccaatttattgaaaaactgctatgaataaggctgccactccctagctctgacctcacaggaacttcattgtaagtggggaccacagtttctgataaagctcagatacaaagtctgccaagcacaagagttatacacaggtagatgggtgatgtgttttgagatctcagtcaggtggctgctgagattgtcaagctcaccacagaatggctagtgacccaccagtgacatagggaaattgtgcagatgggactgtccttgctccagagaagcagctgcagacacctgagccaggcctctttgtggccaacagctttccagtaggtcaactcttagtcctatttgctcccaggaaagaacaaataaaaaactccctccgtaccttttttctggcacccaatctttccccattcctttctcaatatttttcccttgccaacacaagctattgttcaatcaagttgactgttttaatacaactatttttaaaaatcatggtaaccattcttacacagaattaaatacatctacaatgttgtgtaatcattaccattatcaataccctaaaccttttcattttcctatactgaaactctgtactcattaaacaataactcccccttccctcccagcctctgtcaaccaccattctactagtctttgctctctgaagttcacttctcgatacctcatataaatagaatcatgtagtatctgtcttttggtgactggctcattttaattagcataatgtcctccaggttcattcaaggcatagcctgtatcagaatttcctttcttttttaggctgaataatattccactgtacgtaaataccctatttggtttattcatttatccaatgatagacacttgggttgcttctatcttttgactactgtgaataatgctcctatgaacacgggtgtacaagtaactgttcaagactgctttcaattctttggggaaaacactcagaagtgaaattgctgggccatagtgtcatctcattcagctttttgaagaaatgtcactgccttccacagcagctgtgccatagcttttttcatggcaatgagtttttctctttttcttttaccgccacaaaactaccaaacctgaaggtatatttgttcacaaagtaccaatcttctttttaaatctcggaaaggccctcgttgagactggtaactctctaccaggggacatttgaaaggcaaaaagttctcaagttctggtatcaattgctagtaacgacgtgatgccacatcgctgaatcttagattcttcatctgtcacaggggcatggtgtggaaaaatgtactataaactggaaattataagaaaattttatgttctactttttatatctctgtactattttaattgttttgttagttttcaattagaaatgaaaacaaatgtttaaagttatttttctaattaagtcagattgttttcaaataattctattcttcatgcaaaaagaaaggtaagctttcatattttccaaaatataaaattatcttatccatattaatcataagtaaccagcctcccacttacctttaattttcacatattgcatttctggattaacacacacagcaaggttactaggtagagtccagggagtggttgtccaagcaactaaagatacagtttcatcttcttccaaagggaaagttacaaatactgaaggatcttgaacatcctgaaataaattgaggtaaagtattgttttagaaatccacaataacagacacctaagaaaaaggaactactcctaaagaggaataaaataaatcttcagggtaaaccgaagaaaccacttaccagacttacaaacagaaaatagcaagaaattccaagtaaaaaaatttttaaatactttaaaaaatgttttaatcatcaccttagtagtctcaaaaataatgtcttttgacacctggtgacttttttttttttttttttagatggagtctcactgtgtcactaggctggagtgctgtggtacaatcttggctcactgcagcccctgcctcctgggttcaagtgattcttgtgcctcagcctcccgagtagctgggattataggtgcgtgtcaccacacgtggctaatttttgtatttttagtagagatggggttattccatgttggttaggctggtctcaaactcctgaccgcaggtgatcctcccacctcagcctcccaaagtgctgggattacaggcgtgagtcaccatgcctggcctctggtaactttttaaagtaatgtctaagtaggaacatatgatggaggtttcagtattatgattatctattttgtaagtccatcaagagttagatcaaaaagataactgttctggaatatggttatctttttgcccaaaataccaaaaagatcctactgaagcaacacatacttgaaattgtaacagacccatataaattcagctcattaaataagaacaagattgtctccaactttacggaaatgtttcaacacaaaaatatcaaggatttaaaaataaatagctctaaggtaggaaaaaaaaaatcaatccccaacaaaaaccaactgcaatttaaataaagtgacacgagagccattagtcacatgtaaaacatcagacaaacttgaaataagagacactactattggcctgtacctcctcaaatatgtcagtattatgaggcataaagagactaaagagctctttaagattaaagaaggctggagacataccactgcatgaagcacacaatgtaggtcttttttgtttttctttccttctttttttcttgttaactataaaggacactgctgggacaagcagaacccaataagatctacacatgaggtaatacagcatcaatgttaattttctaactccagttatttcaaacaatgttactgattttaggaaatatatagtttttagaggaaaagggccataattcctgcaacttactctcaaagggtactgtgccccactcccataaaaagagagaaggataaagcaaatgtggtaaaaggttaacatttagggaatctagttgaaggatataaagaactctccgcttttctgtgagtttgaaactacatcaaaattaatttttttcttttcttttttttttgagatggaatctcactctgtcacccaagctggagtgcagtgacgtgatctcagctcactgcaacccccacctcccaggttcaagcattctcctgcctcggtttcctgaatagctgggactacaggtgtgcaccaccatgcccagctaatttttgtaaaaaattaaaattttttagcacggtggctcatgcctataatcctggcactttgggaggccaaggcaggaggatcgcacaagctctggagtttgagaccagctggggcaatatggtgagatcccatctctacaaagataaaaaaattttctgggcatggtgatgcacatctgtggtctcagctgctcaggagggtgaggctggaggatcacttgaacccaggaggtcaaggctgcagtgagctgtgtttgcaccattgcattccagcctaggtgacagactgaaatcccttctctaaaaataaataaataaaagttttaagccaatacatatatatgtatacttacatatatacatacacacacatatatatatatatatatatattttttttttttgagacagagtctaactctgtcacccaggctggagtgcagtagcacactttcggctcactgcaacctcaacttcctgggctcatgtcattctcttacttcagcctgtggagtagttggaactaaaggttcacgccaccacgcccagctaatttttgtaattttagtagagatggggttttgtcatgttgcccaggtcggcctccaaaagtgcgaggatttcaggtgtgagccactgtgcttggtcaagtcaaaaaaattttaaaaacccttggttaacaatcaatatacagaccgcgtagaatagaggtcagcaaaccatggcccctgggccaaatctggctcatcacttgtttcatacagtgggtgagttaagaatggtgacaaaattgagaacactttgcctgaaaagcctaaaatatttaatttgcagaggaaagtttcccaacctcagtattagaactaaaaattaagtatactctgtgactcacctgggcgtggtggctcacgcctgtaaaaatacccgcactttgggaggctgaggcaggtggatcaactgaggtaaggagttcaagaccagcctggccaacatggcgaaaccctgtctctactaaaaatacaaaacttagctgggcatgctggcgggcacccgtaatcccagctactcgggaggctgaggcaggagaattgcttgaacctgggaggagggtgcaatgagccaagatcacaccactgtacttcagcctgggcatcagagtgagactccgtctcaaaaaaataaaaattaaaacaaagtatactctgactcgataattccactacttgttatataaccaactgaaacgtgtacaagacctaaaagacaacagtcaccatgtgtttaagtcttggtagatcctgatttaaaaaaataaataaataaaaataaaatataaccccttgggaaatgattaaaccattagaaatatgaactgatgatgttcaggaattacataatttgagaatattaaaataaaaactattaaaggtggctaggtgcagtggctgacacctgtaatcccagcactttgggaggccaaggcgggtggactgcttgagcccaagagttcaagaccagcccaggcaacatggtgaaaccactcctatagaaacacataaattagccaggtatggtggtatgttcctgtagtcccagctactcagggggctgaaaggggagatcacttgagcccgggaggtcaaggctgtggttagccgagatcgtgccactgcactctagcctgggtgacatagcgagatcctatctcaaaaacaacaacaacaacaaaaaggtaactgctgatgactttttaaggtgtgacaacgaatgctaacatggcaatgtttaaagaagataaagattatttatgaaagatctatactggattatttcttgatgaaataatatgatatctggaatttgtttcagaattggaaggaaagtgggaaagaatatgtgtatgaatgaggcaagattagccagtcattggtgctgggggccttaatgggcctacagaaattaattataccattctgtttacttttgcatgtccctgaaactgtccacattcaagtgttttaaaaaacaaccaaacaggccgggcgcaatggctcacaactgtaattccaacactttgggaggccaaggtgggtggatcgcaaggtcaggagttcaagaccagcctggccaaaatggtgaaaccctgtctctactaaaaatgcgtggtggtgggcacctgtaaacccagctactccagaggctgaggcaaagaactgcttgaatcgggtaggtggaggttgcagggagccaagatcgcgccactgcactctagcctgggcgacagagcaagactctgactcaaacaaacaaacaaacaaaaaccaaatatagcaatatattaagatttgacaaaggtaagccttggaaaccttgtgtttaccatatcattctctacattgttaagtgcttaaaatattttactaaaaaaatacaaacatgagcacagagaggtggtaaggagataatagaaatcatcatacctgccttacaaggatttacaaagatcaatcaaacaggatatgtgaaagcattctataaataaaacgtgctttgaaaggcaaattttactaatgtaattttcaaacctaggccatgaaacaagaattccaaacaagtcaacatcctttaaaaacagagggtcagataaactctcaaaactgaaaacaactcagtatacacacgagaagagatggttcacatttcagaagacttactagtatataatatctgtctagatatggtataacaatacactctgtaaacatcaaacatgtctaaacacctcaatcatagcaacaacaacaactgattctatctcatcagaggaaaaataataccatttggcatctcaaattaatttttttccaaataccgttaacaaataaatgatatcatgaggtcccagataaggcataaaattactcaacccttaagaaacgatgactacaggaagtatgtcaaagctggacttgttaacccaacagagaggcacaaaaatatggtcaaaacaagcaaaacctatcacattaagacacatcataaatccaatgtggaaaaaaaatccctcatcttaacagagccttagtatactaactggcaatatttccagcactcagtaagaagtggtcaaagtggtggatgtcgtgggcaacattccacactgggtctacttgggaatacctactgtgatcataactactcagcttccacctacaaaactcaatgctgaataatgtctctacatttcacgtaccttataattctggtgtgactcgaagttggaaagtggagtgttacatgccgtagagaagggcatgactttcacacctctataaacaaggcctttatcatagagttgtttgaagacccacctggtaagagatggagtttcacaattacagaacaaaattctatttctgaaaatgcaaacatttatgccattttctttttagagtttctgtctgccaaataagtgaaaaaacaatgtctttcattgggagactggctggtaaattataacagatcaatatagtaagacatcaggcagacattaaaatgctaatatctactgatatcgaatgatatttaacacataatgttaagaaaagcaactggcaggctgggcgcagtggctcacgtctgtaatcgtagcactttgagagatcaaggtggatggatcacctaggtcagaagttcgagaccaccctggccaacaaggtgaaaccccatctctactaaaaagacaaaaattagccaagcatggtggcgggcgcctgtaatcccagctacttgggaggctgaagcaagagaatcgcttgaacctgagaggcggaggttgcagtgggccaagactgtgccactgccctccagcctgggcaactgagcgagactcagtctcaaaaaaataaaaataaaagttctacattcaaaaacaaacctgttcccaaagattttcagagaaataacgatggactcaaaaataaactgattcatgctagtgcatttttccaattatcaatacaacagaatagaatatttaccatatttacaattttaaataaacctaccagactgattccatgaattgtggatacagagttttatagtcattgtcaaagtcaatccatcggccaagtctgctaacagtagactttaaaatattaatattagaacagtattagacaatgatatttataattgtacatcaatgtgtgtttatttctgttgtcatcacaaatgaaaattttgggaaaacagaataatcaatggtacaagtaaatctatactgccaacaacatattatgtaaggttaagaaccagttttctcggcattcatcctacatgcacaaaatgttatttacaagtataaatattcacttataaaagtctaccaaaaccaccacttggcaaatatcacaggcataattattactggcaaaaaccatccatggatgttaaaattaataagtgaatgtatgacaaaaaaaagaatatttggaaagaatctccccacaagatacttattaattacaaaggaaaaactacaactttacaaagcagaaagctgacagcactttaaccaagtgaacaaagttatcaccatcaatgtgacatagccgcaacacatgccacctgatataatgcattgagaagggcatagcatcacttctgtggcattgtcaccaaaaatgcataacctaaattaaatcaggaaacctcacacattgagagacattatagaaaatagctgttctgcaatcttcaaaagtgagaaggccatgaaatacaaaggactaaataaatgttccatacttaagaagactaaaaagacatgacaaccaaatgcaatatgtgattggtcagaaataaaaattaatggggcaactgcttttgaaaattctattaatattatggttaccgaagatgttagcagctgggaaagatggatgaaggatataggggaacccatcatactactttttcaattgtttaataagtcaaattatttcaaaatgaaaagttaaaaaaattgaaaaaagtatttgagaaaaaaagaaaaggcctatatatcatgttatacttattagaatttttccctattggtgatcatgcaagaaagttagaccaattaagcacacagaagtcagaagagagatggttcagtttaagctaaccgtttaagtaatagggttgaaggtggaagctaacactttttctacaaaaaataaattaataaaaaaagcacaagggaccataaaccatttcaatgcccatttagtaactacatttgctgttcattctactgaaaaaaacccaacataccttccactcagcagaatatctcatcacaattgctcggcactgattgttatactctgtaatccccattttggccacatcctctggtcctctgattcccagtgtcttatcaatttcatattcctgaaaatttgtgataagactgttaccacgctgccctatgaaaacaactgcaactatgcaactctagaaaacaaaacaaatcaaactacaaatattatagaaatgaactagaaggtctgacagtcaacgttcatcatacttgaacatattatatgacaaaatctaatgcttataaaaaaaatcagaaaattataaagctggatactcaaacataccacaggtaagccatggcaatcccatccaaatcttctgtcaacatgaaacccactctggtgagcatatcttgtaactatatctttaattgtacccgcaagtatatgtccatagtgaggcagtccagttgcaaaaggaggaccatcatagaaggtaaatctaacaggtaataaaaatatatcaagccatttaaaaacagccaaaatttaaggcatttttctatagatagctcttgtcatagtggagtcttcaaggagaaaagcagcaagatcaggaaaccgacagacataattgatttgatatttactggtggtcctgccttcagaaaggctacaattgtggtagagctacagagacctccatttgattatccatttttcatttattagttccatgacataaggcaaattatttatcctgatcttgagttatctcatcagtaaaatagggcaataaacccctatctcatagtttttgaccagaggagacatataatgaaaacactgattaaaggactagtcttttaggtgaatgaggactaaaggcaggtagtactatagtagccttctatggggtacttaggtataagtgcctaaacgagggtggtgatgaaaataaaggtggaaagagggtgacacggaggatgacacataaattttactcagatgaccttttaaagaaacaaaatttaccccaataattgagaactcattcattcaatgtatatctactactgagtacccactacatagggagctgggggattctgggaatagaaagattaataaagagtatctgctttaggccgcgcgtgatggctcacacttgtaatcccagcactttgagaggccgaggtgggtggatcacttgaggtcaggagtccgagaccagcctgggcaacatggtgaaaccccgtctctactaaaacacaagaattagctggtgtgatggcgggcacctgtaatcccagctactcgggaggctgaggcaggagaatcacttgcatccgggaggcagaggtagcagtgagcagagattgcaccactgccctccagcctggatgacagtgcgagactccatctcaaaaaaaaaaaaaaaaaaaaagtatctgctttaatggaattcagtctaagaaatgactattcttaagggaacttaacctaaaaaattcacatactttggtttatgttttgattgctttaagcattcctgaaaacaattaaattcagtccaaaactccaagattttctcttcttcagcaggaaaatttatgttttctggaacttgttgaagcattttgttgctgcaaaagaaatcaaatttattactgtcaaaagagaaatctaggaataacagagtaccatattattaacatgggtgtacatgacactatccatacttttaaaaaattacagctttattgatgtacaatttacatagtgtaatgtaaaaagtgtacaattcagtggctttttagtatatttacaaggtagtataactagtaatacctaatttcaaaacgttttcaacctcccctccccaccaaaacaccccaaaaccattagcagtcactccccattctttcttctccatagccagtggcaacgatttatcttctttctgtccctgcagatttacctattctggacatttcatataaatgggaaaatttataggaatcatctatatgtggcctattgcatctggtttcctttctctagcatgttttcaaggctcatccatgatgtaatatgtattcatacttcattacttttgatagctgaatagtattccatttcatgaatatgccacattttgtttatccattcatcatttcttggatacctgtattgtttccactttttggttattacgaataacgctgctatgaacattcacatacaaaattttgtgtggatctatgttttcatttctcttgggtttgtagctagaagtagaatttctgggtcacatgataattctgtatttaactttttgagaaaatgccaaaatttttccaaagtgactgtactattttacattccctcagcagtgaatgaggattctaatttcttcagatcttacccaacacatcttattgtccatctttgaattacagtcattctaggagatgttaagtagtatcttgtggttttgatttgcatttccctaaggactaatgatgctgagcatctttccacatgcttattggccatttgcgtatccacgttggatagatatttatcctttgcctattttctaattgggctctttttgtggttgggttttaagggttatgtatacatcctggatacaaatcctttatcagatatatgatttataaaaaatttctcctgttctgtgggccgtctttttattttcttgatggcattttttgaagcacaaagatttttcattttaatgatgcccaatttgtcaatttttggttttgctgcttgagcttttggtgtcatcaataaaccattacctaaacaaggttatagatttttcgcttacatttaggccacaaataattttattttcgtatatggtgtgagggaggggtacatggctattatttaatattcagtaatggtagagacaatgtttccaaaagtaagcaggaaaatcttggaaattctatctagtggtgcaaaaaactcattaataatctgaagaaaaatatctcaaagtagttaagaattttcttacctacactcacatgacagaaatcagttctcttgaagtaacttcatcttctctttgaggaaaactggtaaaacttaaaaaatcttaaagctaaaaagatgagaatctcacattcaaatatagattccagttttccattttaccctttttattgcttattcatgatttttatgaaggatgagccctatacctttctggtttagtccctaatgagagaagtcttaaagtgtctttttaaatgttttgctaataacctcatgcagagatacttgatcaatctatgacttaagtatctagtgagccacccttgagacctttccttctcaaagtctatttatatttacttaacaattctaacaaggtgggtgacgagctttccaagtcagtatcagatcagaaggggataaaattgctaataagggaacaacagagaagataaaaaatcttaagtactcaagaaccacaacagaccagggtaatcaactctacaggaaaagacacctacatacctcaaacagttttgaaagcatcaaaagcatcatagtctaatcaagttattgattcaagttatcatttaaaaaaaagtctgtgacaagtagtatctttcattttcttttaccctcattaatttttcagatgtgtgagtgcctctgagtttaatttaagaaaaaacaggacaagaacagttgggctgtttaactaactgaaatagctatttctgatcacagtatgccattaaaaggtattaaacagaaggtttaaggcattttagatcttcaactcttattataacctctagcctttcaaggaccaaaataagtgtttgtgcatttactgatttatttaggttcattgtgtaccttatcagaggccaactgaaacttatgggattgttatctgaagactaacagacctttagataccaacacattctaatctcttcaaggctggtcctactatggcccacatctatgggagcttattagagatgcagacttaccagcctcacctcgcacctacgagtcagaacctgcattttaacaagatccctaggggatgagcattcacatcaaagtctgaacatcaccactcttgcactgttctaacaattattcaggaatatctatctgaatttttatttttgagaaaataagatttaagctttctgagaagaggatcattccttttttttttttttttttgagacagtggctcactctgtcacctaggctggagtgcagtggcacaatcatggctcactgcagccttgacctccctgggttcaggtgttcctcccagtttagcccgccaagtagctaggactacaggtgtgcaccaccacactcagctttttttttttttttttttggtggggagggggtggtttgtagagacagggttttgccatgttgccctggctggtcttcaactcctaggctaaagcgatcctcttgccctgggctcccaaagggctgggattacaggcatgagccactatgcctggccagctcattcagcttttactgtgttttttagggagtctctactttccccaaagattaagaatcactgcattattacgtcaagcataaacactcagtataacagcattgactattcaggaagaatcatgtaccagcgaccgggctatggcagctgctgaggagaagcagcctccatgcataaatcacaggattgctatggcccatcgaatccactggagagctgtccatgcacaacagcatccagcaaccacagggcagggacagagcaggttaaccttgcacaacaaccttgttgtgcagagggatgccatcccctttgcttccctcttattataatccaggcccttgactcttcgctgctccacaactccttcaggtcaccttaacctcaacttcccgttcagcaatttcgagaccaccctccctgatattaactacatattattcacattacttcatattattttgcctcaatatattttagaaacgcacactaaaaccatgttttgtttaaaatttcataattccttccagaattgcttcccttttaaactactgtattagtggttccaatattcttcccattacttaggcatgacatttttgagtcacccctgacactactcagaagatacacacaaccaattaatcatcaagtcatgtggatcctacctataagcctatttctgttcccccttttcattctcctctaaatccatttctgtttctccttttattctcaggtcttcataatctattaagtcaaatgtaacctgaaagtgggaccgtctcaaacgtttcctcaatttagttatatcctattaacatagactccacaggtatactcatgcaaatgtacaaaatgtgtatacaatgacattcaccgaataattgtttctccaggcaaataactgaaaacaatctaaatattcatggtgactgaagtaaattacggtacatcaataaaataagtatctcgcagccattgaaggtaataaattaagacatataaaaatacgtattgcctatacataaagtcacagctatatcaatttatactatgtatatcattttaaaaagattttactcatttcaaacactacctcattcaaaaaggcgaccataaattcctgaggctggaaacgaacgaacggcaagccccgaagaaacacgctcttttaaaaattaaatcttgtgctactgtttcggggttgtaacgcgtgcgtgaccctcgtctttgagggccggatcctgcagggaagagagggcgtacctgaggggcctcgcgtgcctggacagccccgcgggccagcaagcctaaaagcaactcatccggcgtccacgctgcaaccgggcgcacggaggtgatgcaacgcgctgaaaatgcgggatccagtgaaggagacaggctccgcaccggccaatcagtgcgcgctgcctgacacctgccaacaagccaggcgccgattggtcgcgccggacatgattgcgcccactggctcggatggtgcgacagtggtgcttgctggttttgcgcctccacgtggaaaacgaaccagcgctgagggcggcgctgtgcgtgctgcttgtatccgttgcagtagtgtagaccgaggtctcactcgggttgtgggcacctccgggtaggtgacggcccactgggaaggggcgccgaggtcggggctcatgttcttcatcttgtttgcttttgtcagtatttatctgactggacacttcgtacctaaattgataacgacaaacagcaacttccggagaggtggctttaataattatacttttgggccctgagccgccgaccccaaagccgcttctcctatcataaatggctacgtgaaacgataataacaaaagggaaggaagggtctgacaaccagatttaaaagttttattgtattttacttaaaatgtttccggtaatgaaaacattgcacaaacgatttttttttctttttttgagaagcggtctcattctgtcgcccaggctggagtgcagtggcacggtcatggctcactgcagcctcaacctccccggatcagatgatcctcgcacctcatccctggccaagtagctgggactacaggctagcgccaccacgcccggctaatttttgtattttctgtagcaacggggtcttgctatgttgcctaggctgctgtcaaactcgtgggctcaagcgatctgcttgccttagcctccttaactgttgggattacaggcatgagccactgcacccggcctgcatacttattatcattgctatgagtcggcttggtaccttactgatctgctggttaaaatctggagccttgcaaagggcagtaggcctcgggctttggccccagagcctctaaaggaaattctggatcttgccaaattgggagtagttccgtagctgcctattgtatccgttagagggatataaaaaatttatctggcctagaataggtagaatgcagtttcttattaagtttaggaacattttgatagtctgttcagcatatatttaactttacttaccgtcttggccctgtgtgaaggattaaagtggtttcatgtcctccatcatgggtaactcagtgttctgactatactcacataacgtacataatttaatagctgcaaatcttgttaattaactgaaagtatttggaatgtgtttgaagttttcacattcctcacgttgccaccttgttcagttcatttttgtcacctatccagagagcccagatagagccagacagagggctcctggacaaaggtgaggtaggccaagtctaattatttaaaaatttgattgagaaacatttatattaatagtactgttgtgttggaaataatgctcaaaatcctaaggaaattgaacattcaaacaaaggattttcagcaaagcaattttacttctgcgcagaggggtgcttctccttggccagtcaccatgagagcacaccagaacaaaggggcacgagaacctttatccctgacacaaaccctgcccctgtaccctttctccattggccggagttgggcctcacaatctaaaataaccacagttggctaaacattttaactttctttagataaggtgggcacgtaagagagaggggaaagggggaagggctgtctgtaatgagctagagagctagtcttctcttcggataaggaatacgagctggtactgataacgcctggtactgtggcctgtctaggcatgtaacaaaggcagaaaggaaagaggagaaaaagggaagaggggggcactgtgaattaaagaataaaggattgatcaggctatttgaagagaaacctcatcatgtcccacagttggaaggtatgggaagactaagtctagaaaaagttaagcaaatgaaaaaattccagcaaaaaagttaactgtagtcaaaatatattacttggactgaagaggtgaataattttttcaccttttcagaatatgtagtgtctggaagtgaaaaaccaagaaatcagagcataagcatgttaggtagaaacatggaggtaaatactagagaaattaaattgctgaaggtggtttcatctggggagcaggaactggggggtgggcaaggctacttgatgttacttatttgtctgcttgtgaaacatgtgccggatttaaattacggccacacattctgacactcctcccactaagaagtgaggatctgtgtcccctccctttcagtctggttgggctgtgtgtcagtttaaacctgtagaatacagtgaagtgactgagccggtttctgggccaggccttaagagacaggcagcatctgcttcctgcctctgagaacacttgctcctagagcttttttgctatgctgtaaggaagcccatgaacaggcactgagtgggccatcttagaaacagatcccgtagccctagctgaaccaccccagtgaaagcacacagcacagatcagcagtccctagtgagtgttgaccaaattgcagtatttgtgcataaaataaatgattgttactgagatgatttgctatgcagcaatagaaaataaggtacaaatgtgatctacatcaagagaaggtagaaagtgtgaattatttatcctgctgcttagttgtccacactctccttgaagtctgaagttttggaaacctaggaatccagaattactcttcaagttatttagttccttggacccttactaaaaaaacatagagcataagccctagggtcataatggttaacacaccagatgaaatcccaacagttaagagtttatattcagcataggtaaatcaataaatactaattttaggtacacacatcatggcttaatgatagtcccttggaactatataatactatttctttttttttttttttttaagatggagtctcactctgttacccaggctggagtgcagcaacatgatctcagcactgcaacctctgcctcctgggttcaagtgattctcctgtatcagcctccctagcagctgggattacaggtgtgagccaccacacccagctaatttttgcatttttagtagagatggggtttcaccatgttggccaggctggtcttgaaatcctgacctcctcatgatccgcccgccttggcctcccaaagtactgagattacaggtgtgcgccatcacgcccggcctatgtaatactatttcatacagagcccattttgataggagacgtatgtcttgaaatctaggcaggttggtttatttaatgtaatgttaaatctgtttccctatttgggctcagggtcctgactcctaattgtgactacctatctttcaggcacttggtatttttcataagcttttagtctaactagaattttgggattggtgtacatctagatgttgttccttaattcctagaggcaatgacaagataactgtatttggcttcctctcctggtcctcacagaactcttatatgatgttggtctgaaatgtcctatatttcagttaaccattcaccaaaacacaagtataaaactcaatgttgacttgtaatttatcagtttaaacaaaaatgacaaaatggaaggtgtatttgacataatcagaaataaaatttcaaatagcctataattcacacaaagcctaggctggaaaatacaagtgctttgactcatttatttaaaaaggcttcatataaaccttgcatgagaagatgtccattagttactcaggatagagggcaaagagattatatacaaaaagtattttcaaggactatcttgttcttcctttataagaagttgaatttaatttttgaagtaattacttaggaagaaatgcagaggagttccacagaaaaagatggcaaccagaatgatattccgtcagccagatttttaaaattccttcactctgaaatttcttctttgtcagctaaaactgttttctgggtcagtttccttaggtgagccttgttcacattcagtatcaaaaccagctgacatttattattttggtttcattttcctttttgcgtctttatgtttctttcgacaatcctaggaaaaaaaaaagacttggttagcaataaacaaattgtttttaagatgttcagtagatagaagtaaaacaggttattctcactgtcagggctgtggaaacctattttgaaagtgctcttttgaaatgaagaggggatattggcatttttggcattaactgtttataatgggaactataattcagtctttaaaaatctgatgctttcgtgttacttaataggcttggctggattctgagaccagtcactcaattgagccagtctgcagtctcctcacctataccattcatgagttcccttccaggactgtaattctagataggtaacatgtctattttaggaaataatatggagaaacaattactcaccatacgcaggttggttgttctggcctcccaagagttcctgctcatattacttcctactcctctccagaataagtcagaacctattaggggaaaaagaagaaagatgaggcagcaaactactactaaaattggtaatattctaagtgttggcattatcaaggtctcgaataccagttaagatcattcttttccctcagtttctacctattttcaaaaattagtattttttctttccaaatgaaaaatataatattgcttttactgtttatatatatcatttactattatgtaactttgtttatgctaggctttaagaaatgagctccccaacagcctgagttttcacatggaatttatggcactaaaacttaggggttttatatgtctaacatctaaggaagcccttggaacaaaacaaccctttgttgatgagaatgagcgggcaaagaaagtggtgagtggggagctctcagaccttgacagctttacaagttaacattcatcagtgtgaacaaatggggttaaaccacatgacattaccaacggtcaaaattcctggatgtgaattactgtagctgtattattacctgttctatgtatgtaatttgatgaaaaaaatggactgaccttgaagtcgttcatcattcttagagaaaaagaaaaatctagtggtctctttctcaagtaatgatgcttctctgaaaagaaagggacaaaggagagagaaaaataggtattggttggtttaatttcaatatttaagaagaaatatttacattcaaaacataaatacactatttcttaaatatatcttttttcatttccccctagaatccaggtgagcgagactcttaaatatatctgctttgtattttgtgcattttgccctgagttaaaacaaccctccctctaacattcttctatctgaagctttgataatgaagacttgtttaagtagaacctctatctttcctgtgttggttgctgatactctcactcccaccattgctaccccatttgccagtgcctcccatgggtaggcacccagtcaactgcaacatcctgtttccagaccagtgacttcactgtcaggccaccttcccttttctatgcacaaactatcttccccttagtgctatccaaatctcatggaaaaggaaacacactctccattataaaaaggctagagaacactctaaagaaactgagatgtccaggctcagtggcagggcgcctgtaatcctagcactttgggaggccaaggtgggcagattacttgaggtcaggagttcgaaaccagcctggccaacatggtgaaacctcgcctctactaaaaatacaaaaattagccaggtgtggttggcacgtgcctgtaatcccagctacttgggaggctgggacaggagaattgcttgaatctgggaggcggaggttgcagtgagctgagatcatgccattgcactacagcctgggcgacagagcaacactccgtctcaaaaaaaaaaaataaaataaaaaaagaagctaagacaatttagttgtcatgtgaagagaagctaaaatatttctaaagtatgtctaattcagattttacaaattatgaactatgcctgcaaagaaacaaattgtttacccaggactggagtttctgtgatctgtttcttcagtaacatcttcctcttctgaactgctgtcttgtaaacgagggtcttcctgccagacaatctttccaggtttcactgtttcaactctgtaggtctctatatcgttatgacaacaaaagatgatgggattgtaactccacagccaagtatttctgaacacattcatttgattacttttaccacgtagacatatctaaagttccaatatgttaatcattaatttaaaatagtatcaaaaaaataggtagtatcatctttttagatttttcaaatattttcagaagccactatcataattttggcattgctagaatgatctgataaggacagcagtaatataaaaaaggtttaaaaaataaaggtttataaatgagctatataatttttaaaaatgacacctaaaataaccatggcatctgtgcttgcatgagaagcctaaaatataataggatacagggaaatcaggtttccctcttgtctatttataaatgagaaaaggaatatatctttacattttcaatacccaaaactttttgctagaactgctggaaaaactactgctataagatcaggacaatcacctcacaagtcttcaaaatttcccaagtacttaaaaaacatctttcaagttgctgatgtctttaggactcgtttcaaggtcaatttctcacgttttgctctcaaagttagaaaaactatcgttactatttacatcatgccaactctactcaacagtttatatagacaagaaaatgaagtcttatttgcaatactttttgaacaactactagattgttatacttccttttaaagtaccacggagttggtattatctgctagtgaaccgagattgcaccactgcactccagcctgggtgacagagactctgtctccaaaaaaaaaaaaaaaattattttaatctaccaaacacatgtatgctattttaactgctgatctttaaagtagaatcattgtagttaggtatgtgtgtattcttctgtataggtattacctgcttttacagtgggaacttccagaaagctggaaccctgggtgaggaacaggtcaggtgttttttaacctgtggcccatgttggcctttagaggtaagcctcttgaaatgaaatgcaaaactgtatgtactagtgtttatacttctctctaggttctggcaaatcttcaaggataaactgtgcaataactggcatattgatgacatggcatatttgtgtaaaaccaaggttacctatatcttcttttatcttatatatagcactagttttccataagtcatagcatcttcagcttcatttaagatacaaagctctttatgtgatttactatacttcttcatgacgttttacttaacagaaaagatgctgtacattattctctggcttcccttcatatggcagctagtagagatttgcttccttaaatgcaaaaatagtttctttcacagcttcaggaacatcgtgtttatgctcctgtgacactaaatctcaaatcttctaggtagaagaaagagtcctttcttcagctaacatgaaatctgttacacttaatgcagattcaatcaattaagttcaaactgaataaaataaaaaagtatgggaaaaaagaaaagtaccttcctttatgtctttagtgtctgaatcaaaaaaagagaacgtgaacccgctgggctgctcagcgtcactggtcagagctgcagggtcctggatttcctcaggtttctctttaccacagtcctcattccagggtgtgccctcttccttttcactggtatattttgtagtttggaatatttctttcagatccatagcaatattataatacatttctttagacacctcaggtagtttctcagcttcctcccttttcttttttcgttttgctttactgaaatgacatatgtagacatgtgcatcacaaagaaacaagttttgggaaatttccagaaatcaagaaaagaaaaaatcttggacaactttaattctatcctatcaacaaccagaatataaaactctacttataaatagagaaataaaataagtaaaactctacatatagaactctactaatagaagcaaaatcttgatcaataagctttttttacacaaatctcaaacagctgcatgaatcatattctatcattctctgaactacatttcagaaattatgcctaaactatacacctaggtataagtaaggaaatcacttagcttcactaggcctcagttttctcataggcaaaatgaaaactgtaagccacatgacttctaagatactgggaattttaccagtaactggtaaaattgtaaatcagttgtagaaattaattataaatatgtatagtgtcttttgaaatgaaatttttatattaccataaatctgctctgtatttaggaatgaatatgcttttctctttgatctgggacaaaaagttacttggcagtttccaatactgaattttgagctaagaaaatattaaaatcctttttcctcgaagaccaggccaaagtttgtaatgtactacgtaaaataataagtgaacaggatatcctaaataaccattcttagtggtagagaccatatcaaagagagaaacttttagtatttcggtaaataaaccaacctcgttaggttttaagacagatatgcctcttaggaaaccaagctctataaaaaatggtaggcagttccaagtgattatcatttaaccaccatgtggtggctttaaaatttgtccaaaaactctttgttacttcttccttcaaggggtggaagttaattccctcatcccttgagtgtgagctggacttagtgactcttttaatggacagagtaagccaaatgggatgacatataacttctgagactaagatcacagcaaaagctagaaggaccttgaaaaaactgttagtagaaaccatatggtctttgagaaggttgcaggtaagggcttaagagaaaaataaggtaaatcctattggaaactggagaagagggaatccttgttacatggtggtagaaagtttagcaacactgtcaactgcattgtgtgtactgtggaaaatggaaaatgtacctaattagctgggtgatctagctaaggagatgtccagcgaagtgttaaaggtatattctggtttcatcctactgattacagtgaaataagagaggagagaatgaaactaaagggaggaatttttttttttaaagggagccaggaattcatggttttgaagactcctaatctccagaaggcaaatgacatgaaatttaagaaagggcttctaagcaaagatcaactctatgacagcctcagaaaaacatggtctaaagaaggggttggcaaactatagtccatgggccaagtccaggctactgcctacttatgtctgaactgcaagttaaggaattttttttatcatttgaaatgatagggggaaaaacaaacatcatttcatgaaaaaattatatgaaatgaaaatttcagtgtcctttaatagttttatcggcacacagccttgctcatttgtttacatattgtctatggctgcttttcttttacaaaggtagagtggagtcatcacagcagagatggtctggcctgcaaagtcttatctatttactatcttgcctgtcacagaaaaagttatagacctcggtctaaaaataaaacaaaattctttgttaagaccctaaaaagagataagaagcttccaactgttacccaggaacagtggtgcacacctgtatttccagctatgtgggaggctgaggtgggaggaccacttgagcccaggagttcaaggctacagtgagctatgattgtgccactgcagtccagccaggtgacagagcaagaccctgtctctaagattatacaaaaaagaaaataaacttcaattgttcaaacaatagggcttctatggaggttagaggcattatctctcagcagtttcagtagaagcccagggttaaaaaaacaacaaaaaaggcttatctcaaaatgatttgtgtgactttcatctaacagagtgaattccaagaagattcacagataacttatgaagattttaagagaattatattatcagaaataccactagactggactggtaggtacaggaacatttcaaaatgaacaggcttttggactcccaaatttctataagcaaaaagcaggttgaaaaaactactcagctgtaaacctgtgccagcacttatgaaaagagaaggatgatccagaaagccaagtcaacggtcaggaagaattattcctaggccctcagtcctaatcaaagaccttccaacatttgtctgtctagatttcagagttactatggacatgtgactcctttgtgcctgttttctttcattgaacagtacctatagtggttatccaatgcctgttccaccgctctatattggaggaagggtagataacttgcttttttagttcataggtcttatcaaacagaactgcactcaaggtactgtactcaaggaataacagagaagcctcatctgtacttagatctgatctgaatgatgacatcctggattttgagctgatgtaaagggatgagacttcttaggggtatagggagggggtaaacatatcctatttgttcaatacggattatctgaaataacacacatatatcctacattggagggaatattaatattctactttagtctaaaatgtgattctttttaaaagaataattttggaacaattttaggtttacagaaagtaacgaaaatagtagagttcctaaatagccttcactttgttttccctaatgtaattatgtgtgtatgtaactaggatataattgtcaaaattagaagattaacattggtagattaccactaactaaactcagacattgttttgatttcactagtttctccacaaattgtcctgttgtttcaagattcaattcaggataccacactgccttttgtgattttcgtggctattagcagttggaaaatgaaggatttaaaccaagctgctactggttgctccatatatttgccatgtttatccaactgactgcacatctataggaaacagaagctcctaccacactagatggttgaatggttgccccccaaaagctatgtccatgtcctaattcctgaaacctgtgaatgttaacattatttagataaggggtcttgcagagatattaagttaagggtcctaggatgaggagcccatccaggattatccaagtgggccctgaatgctatcacaagtgtccttataagaggcacaaagaggagagacagaaaagaagaggccatgtgaagatagaggcagaaatgggagtaatgtagtctcaagccaaggaacaccaaaggattggtggcagtcactagaaactaggagaggcataaaacagctttgtttccctgaacctctagaaggaacataacctgttcactatcttaatttgggacttctaggttccagaactgtaaagaaataatttttgtgattttaagtaactaagtttgtggtagctacagaagacacaagaaactagtacaaataaaaggcatcatttatacaaataaaaggtataaatgataggagtacatatcatttatagattcctctgttaaaaggtaagacctcctccaccacatcaataattcctttctaactctacctgcactacccctaccccaccaatcttaatacagtgggaccaatgagtaggatattggttcctacctacatttttaattgtctgaaatgagattaatttacatgatcctattgctaaaagaagtagctctacttacctttcttttggcttatcatctctttttctttcgtaagtggcatggtcttgcttcgttggatcataatgtatgatgtccctatgtaaaaaaaggaagggaggttggaagagataaaaacagaacactaatacaaaaagtaagtagcaaattataattcagcactaggaagattctaattttgcagcaagaagaagccatataacatcagataagataactaggatcttactagaaataacatatacatagatttttcttggagacagagtctcgctgtgttgcccaggctggagtgcaatggcgtgatcttggctcactgcaacctccgcctcccaagttcaagcgattctcctgcctcagcctcccaagtagctgggattacaggcatgtgccaccatgcccggctaatttttatatttttagtagagacggggtttcaccatgttggccaggctgctctccaactcctgatctcaggtgatccgcccaccttagcctcccaaagtgctaggatcacaggtgtgagccaccatgcccagccgaaaaaatattttaaactacctacttttgagatttcctggatttttttagcttttaaaatgattttaaacatactaaaatacatacagataaaatgatatactatctgggatttgcataaaacatttcattgtgtaaagtaggggttggataaaggtatagaagagaacactggtcacatgttggtgactgtaaaagctaggtgatggtgtacagggctttcattacctggtgtacaggtaatgatggtatacagggctttcattagtctctctaaatttcatgcctgaaaatttccataacagttacgtttatataaatacttttacagttactatttaaactgtttcccatttgtttcactaatgaaagcgatgctgctatgacatctaagtgtataaatacagaaataatttaagattagttccttgaagtgaatcactgggtcaaaggcaagtatatttttaagggtctgatacatattgccagctgcctccccaggccattaaaagagacctagttttaaattgagttcaagaagacatttatggcaaaggatgatatggtagaatgggatggaacataaaacatacttaaatttcttagcagctactgatcctctgtttgtagaattgcttaagttgatttgcaaaacactttgtacaacattcagggctttctttttttcttcagcaagctcttcttcctcagcagttttcttttcatttacctctttgaggaaaagggataattaatactctcttggaaaacacagcctgagaagtctcaatcatcaaatatttaccaagtacctaaacatgttcaaaatccattaagacaggaagaagaaactttaacctcatttcactaacctccataaccaaagaccctcagtcatagcaaactcagaaagtctgcgtgaccagacaatgaaaagtcctacttctgttcctaattatgaaagtctgaatttaatggctttcagtagcaagtctaaaacttttaaggtaaagatcgacaaatgtaatagagcaagatactaataactacagtgattatagactctttgatttttttaacattctaaacataatctaaattacgtaaatctaaaaatgataaagagtgaaaaatggtaatggtatatctgacaatataagatattagtggatagttgtttcagtctttgattcaataacaagtattatgggaaaaaaaccatatgccctacacatactaaggcatcatggacttttacaagctactatcctcaactactacaaacagacaaaatatcacagaataaagttaaacagctagtttggattacagaaatacaaaagtagtctaagcctgtatgactctttcaacttactgcaggatataaataaccaactaacagaaactagaataaaatgctaatttaagtactctacagggatgcccccaaagtttctaagggttcaaaggaagttgagatagtgtttaactgaatcaaaagatgctttataaactaggtaaagttatgaggtaggaaagatagagttgaatccctagaggtggtaggaaagcatgctaggtgttggaaacaaaacgaacacatatattgaaataataaagtacaaaaagtttacactgcattaggttgaaactgctaatttcaacaacttttgactatcaaaaacatcaatttaaattttaatctaataagcattagggaagtagattataatgctgaaaaaggctcaaggtgatataggctggctgtgctgcttacttgagacaaaacgttgtgcctcaaaatttgggaaggggtctggtgcagtggttccatgcctataatctcagcactttgggaagctgaggcaggaggatcacttgaggccaggagtttgagacccgcctaggcaacacagcgagaccctgtctctatgaaaatacaaaaattagctggacatggtggcacatgcctgtagtcctagctactagagagactgagtttgaggttacagtaagctatgactgtgccactgcactccagcctgaggaacacagtgagatcctgtctccaaaaaaataaaaataaaatgttgagaaggaaagaaaaaaacaacaacagagattctaagaatggacacgccatcaacgcagaaaggttaagaagagctggtttggacttgctgagttttaacacaaactcaggaaagcctgtggaaaatatccaacaggcgtttaagaccagttgggagctcagcagaacagcaaggaagaaagaagatccaaatttgaaaaatactcatgtgcaagtgaaggctaaagctatagggacttacagaaccctgggaagaacccatatttggaggcaaaagaaaaattaggaataaagagttaagaaaaccaggaagttatgatgcaattggaagcaaagtgaacatttcaagaagggatgatcaacagtgacatatgctctaggttagctgaagaggatgtcattggagacaatgccactgcacttggaggacaagttgtttacggctttgagggaacacacacccaaagagttgtaaagaaacagacaaaattggcagaagttaagaaaataacctatgtaccttctaaatgaaggttagtctccaggttctgttcattcttgtgttttcaacatggagttttgagtgagaaagtcaagtagaatacaatgctggaaagggctcaaggtgatggaggctggctgtgctgctgcttgcaggatagacaaacattgtgctttcaaaagttggaaaagggccagctacagtggctcatgcctgtaatctcagcactgaaacagaatttgggaggaccctagagaattcattttaaaactctctgaaccttggtttcctgaaacagtccaacactgttaataatcacctcaaagaattgagaagatcaaatcacagattgttttcagtaaaaagccaactgctactgaattagatgtaatttactttttcacttcaaatttagaactgaaagagagatggagtacaaacttgaaaactggcatggttagaggaatggcttttttgggaccacaagacctaactatgtctgtagaaaaaggaagaagctagaaggagaagaatgaaaatgcaagtgatgaaaggagtaataggaagtaggaatggtgaggattaaaatgcagattagattaattcaggaaggagaaaaaaaaagaagggcagagaagttctgagattaggagagggaattagggagctcattcaagccagcgacgtaagaggtaaggtgtttttaaaagggtaagaggagaaggtcctgtagaaaaagattggaagtactgctgtgaaaaatgctatagtaagtgaaaagaagtagaattaggatgcttctgatagcatcattactcttagatacattcaaacagggataaattcaagtagaatggcattcagtgatacacagctttaaaaaataatctgcaccaggtatgcacactggaggacgatgaacactgttccttttagaaagccaagagtgacttaactgtcttccatggcttcacccagaacctgctgatccactgccaggtaggaaactcaacttcttctcatgccaaggatgggatagaggaaaatggtacctttggtggatgttattttttcctttcctttctggcagctctaagtaattaaattttcctaaattactatgtacaaacaaacttagtattaactgtacatttgattataaactcctcaatccaatgtcttgggatggagagtttcttcatgtgttaaacaaaggaggtatactaggtgatttctcagtgtccccagatatgacatcaggactctggacaatgaagcatttaccttcctgttcctcttcactgtcagtttctagaaatcgagagtccatgcggaatctgtcatcggtgccaaagtgcgactgtaaatccatgagctacacagacagaaaacatacataattgatagccacattcccaagaaattgcttctgacgaagactgtcaatgtacacctccccacacactgaaattcactacattaagatgtttgcctacctccatctacttatgaaccaatcagagaggatcacagaagactcactctccaaataaacaccccgatgctataatgtaggttaaggtctgcctgcatttacccagatttaaggactatgtcaaaaaataaggacatgctgcaagtctaattattttcagtcttcactaaccttctgtccagctctgccctcaaactgaggtttaattttgaacctattactgtcatcttcagaatcagattcgtcatcatcactgctatcaaacagcttccctgatgttttacccatagactcctgtgaagaaacacaacatttattaatagcagaggcaaacaagcagtatttcccttcataacgtaatcttctccctcacattgaaagccagtaacccagactcatctaccaggaatgagtaaatggcaggtcaggtggaaattcctgactcagtgaaatctaactggcctctgggatcactaatccagaggctctccagtgaagcctggatttggggaggtagttattacatgcaagaacagtttttgtagcgtttcactaatattgatgtcatgctgcagatgttgtggagaatataggttcatatataaaaatctccaagacccctgtagtctcaatatgaggtgacctggcaagccctgggtctcattggggctctcaggagggttttatgttgagattgccagttgtttgtggtgtggatctgcagaagtagatgaatgtccacagagacatcctgaacttcttactttcacccattcctctcctggatggctctgctcctgagtcgatgtctcctctgtttcacattcactgtcagaaccgaagatgatgtgcgttggcttatcctctggatgaccatcctagggaggccatcgaaagcattgcatcttaaaaagatttatgatgaagactccaaaagcaattgcaacaaaatccaaaattgacaagtgggatctaattaaactaaagagcttctgcacagcaaaagaaaaacttatcaacaaagtaaacagacaacgtacagaatcggagaaaatatttgcaaactatgcatctgacaaaggtctaatacccagaatctataaggaacttaaacaaatcaacaagcaaaaaacaaacaaccctagtgaaaaatgggcaaaggacacagcagacacttctcaaaagacaaacacatggccaacaagcatacaaaaaaaatgctcaacatcactgatcattagaggaatgcaaatcaaaaccacaatgagataccatctcacaccagtcaaaatggctattactaaaaagtcaaaatataacagatgctggcaaggttgcagagaaagggaaatgcttatatactgctggtgggaatgtaaatgcattcacccacagtggaaagcagtttggcgatttctcaaagaacttaaaacaaaactatcatttgacctacaaccccattagtggatatttgcccaaaggaatataaatcattctaccataaagacacatgcacacatatgtttattggagtactattcataatagcaaagacacgaaatcaacctagatgcccatcaatggtggactggataaagaaaatgtggtacacatgccccatgaaatattatgcagtcataaaaaaagaatgcaatcatgtcccttacagccacattgatggtgctggaggctactatcctaaacaaattaatacaggaacagaaaaccaaatactgcatgctctcacttataagtgggagctaaatgttgagtacacatgggggagcaataggccaggtacagtggttgacacctgaaatcccagcactttgggaggccaaggcaggctgattgcttgagcttaggagttcaagaccagcctaggtgacatggtgaaaccccatctctacaaaaacacaaaaattagctgggcatggtggcacgtgactgtagtcccagctactcagcaggctgaggtgggagaattgcttgagcctgggagatggaggttgcagtgagctgagatcataccactgcaccccagggtgacagagtgagaccctgtaaaaaaaaaaaaaaaaaaaaaaaaaagaacaatcaacactggggtctacttgagggtggagggtggaaagagagtaaggattgaaaagccacctattgggccgggcacagtagctcacgcctgtaatcccaacactttgggaggccaagacaggcggatcacgtgaggtcaggaatttgagaccagcctggccaacatggtgaaaccccatctctaccacaaatataaaaattagctgggcgtggtggcaggtgcctgtaatcccagctactcaggaggctgaggcaggagaattgcttgaacccaggaggcggagattgcagtgagccgagatcacaccattgtactccagcctgggcaacaagagcaaaactccatctcaaaaaaaaaaaaaaaaaaaaagaaaagaaaaaccacctattgggtactatgctgattatctgggtgacaaaataatctgtacaccgaacctccaagacacacagcttacccatgtaacaaacctgcacatatacccccagaacctaaaataaaggaagaaaaaaaaaagcattgtcttaaaacaacccaatctcaaactgaacatgtctaaacctatcactcccttcccctgccaagtctacttcctgccctttttccttatctagtgaatgccatcaccatctgtttatttgcctaagacagaaacttacaattcctctttctatccctatccagttatcaccaagtcctatcaattaaactttttggtatcaattcagtcaatctattcccattgctgttgttacggttttgactttccacctccccaaaggctctccttggttacagacggagccgttcgatttgttttcatcatggtctgaaggatctctcccaaacagaggttgacaaactttttctgtaaaaggccagagtaaatatgttaggctttgcaggccacatatcgtctttgttctgtactcaaaaactatttttagcttgaaggctgtacataaataggtcatgggctggatggcctttgaggtgtagtttgtcaactcctgttccaaaatagacacaattaatcttctctcctttgcttaaaattcttcactctcttttcattttatgaacaaaatgaaaccactagcctcatttcttgccatctcatgctgtataagttttaattacactgattgaaaacattcacccttgtataaacggttcctttttcctagaatgaaagcctttccactccctttccaccctttcacctgggcctgaccaattcccacaaatcttttcctaccactcagctcagactacagaagctcccaactgacttagtgtgtctcctgcgtgctgccaaggcacaggggcacaaccccctcctggccctgtgtaactgaactgtgactgtcagcatgccacaccatgagccaaaaactgtatgaaaggcaagatcaccatcctcatactataaatctggcacttactataaaggtgtacttaacaattgttagaagaatgaacaaaagcccattacagtaaatcttggcaagacttggcaaggtataaatcacttgacaagtgatttttatgtaaattcagacacatttgaatacattacttaactataccaggtatagcttctaaatgaaagaaaattataaagaaattttcagataaaccagatgaaaaagctaactcaagaaccaaaacatgaaactggtgaacaccaagacaatcagctctatgggggcacacctaacttcatgggaaagaaaagctgaactttctgagttcttgttaaatccatacattgaaaatatactcaccaaatttgccagagcattatgcaccagcttcttctgcacttcttttgctttttgcctcgcttccaaggctgccaaacgcttctcattgtcttcagcatgcttatctttagcactcacatctgacgaattactaatagaaagtgagaaatcagttttgatttcccgagtgtccttggatgagacctttggtgatttcttgagagatgtgaggccgcttgaatcagaccgctcttcctgtgaagcttctgtctttgtggtactatggcagctgtctttgtcaaagcctatgttgtgagtctttgcactaagacttaaggacttcttaccttctaatggcctagaaataggattcttacttctcttttcagaactgctaggggacactgccttgcgatcctggctttcaaaagtggtctgtcttttttgaggctgaatatagtttgggccattcgccttctttgcatgttggcatggagtcacttcacctaatgagccattaacatatggggacccatcttccatggatatgatactgggatcctcatgtttcatggaattctgatctttattgttagaggcaacactgtctttcaaggattttttcattgactccttttcatatagacagcctactcccttgaaagcctgaaattttggctttaaattgttttcctttggtttctgtttgccacaggtgttctcctctccttctaacagggaagccacaatctccgcaggacgaatacactgtcggcctctgcggaggccagtgggagtcttggggctcttggagcctctgtcaaacttgcattgggtggtggtttctggtccatcactcttagtatcttcatttggaaccttcagatcactgccagccaattgttccaaatcagctaaagtgagattcacacgaaggcagtttttcatcatggcattatactcctcacctccttcagagtcagctaattctgatgcagaatcagcatcttcactgctactggagtgagagggagatttacgattaagagactttaatccatgactgagggctgactctacattgctttttcttttttgtagtttaatacagtgatcagaaagctcacagttttctctatttttgaaagaagttttcttcgtagatttttccatttgtgaaaattctgtactgtttttgaccttagcaacattttttttcatcgcaataatttcatctgtatctcctgagtcatactcacgatcatttctcataatatcatcatcactatcatggcaagagacacgatttttgatacctaaacctattaaagaatgcagtttgtgaacgcctgatttgaaatcatcccttacaacttcaaaaggatcactttcagattcatttattgagggttgtgtagttctctgtaagttttcctctttcgcaatcatcattctcaattcatcttcagaatcagtatcatcatcagaaatgctgtttctcttcttggcagtttccaagccagaagtcttaaaaggtagatttttaagtttctgagtatcagaaacaggtacaggagatgatttagaaggagtaatggaatcacaagttcttttttgtgcagcctgttgctgtgttaagggtggtctctctattaccctcctgggccttgtactcatggccagagacccagtggaactctcatccttctgcacttttattatcttcttgggagggccatgaaagtcagagaactctcctcgccgtttcttactcatagggtcattccctccttctaattcccaagtcaggctggatataggaatggtgtttgagaaatcctcccctatcttcttcaggttgtggcagtattttgagggatcatatttgatgatgttacgcaagtcaagaaacaaaactaaagcacttggttttaggaaaactcatcaatctttgatacaaaaaatattgcttaatctcaaataagtcatttcccccccctttcagtttcctgtaaaagaaaatgaggacttaactaggttacctttcagggtctaagaaactgagctttctatgacatttgctgagttaaagtctagtaccaccactattagttggcagaaattacttggagtgtatgtggatattatagcaaacctattcagattatattataggtacacaggtctcagggctattttctgtaaatcacagaaatccaaccatcgaactgatacagtaaagcaaagttctgggttcaggagaacccagaggacatggccacatgtgtgtcctttactctcaaattcttttggctatttctgttctctcagttcttactcatcctaactctgattctcctagctgaataacatccacttcacatgaactcactctctgcaacatttttaggtctttattagaaagctggcctgggcacggtggctcatgcctgtaatcccagcactttgggaggccgaggtgggccgattacatgagcccaggagttcgagaccagcctgggcaacatggtgagaacctgtcttaaaaataaaaattaaaaattaaaaaaaatctaataaatctttaccaggcctatgtcgacactatccgggaaagattctagttaacatcgatgtgttgtaatgatggctgtcatttgctgattccctaaagcatatgaataggcaagtattaaggtgctttaagctatcactcttttttgttttgagacagggtttcactgctacccaggctggagtgccacggcatgatcgtggctcaatacagcttcaaccttccaggctcaagtgatcctcccaactcagcctccccagtggcagggaccacaggcatgtgccaccgggcccagcctgatttttcttttattaatattttttgtagagttacagtctcactatgttgcctagactggtcgcaaacacctgggctcaagtgatcccccagtggcctcccaaagtgctgggattacaggtgtgagccactgcaccccaccttaagcgattactcttgaaagtcccttttttcaataactacttatatgtgccagttatatgtgaggtgtgccaaaaagtgtctattgtctctactgtccttcaatatcttcctctttgccatcagcagctgccattggtggaaagctggaaagtggaaaagaagaaatcagtactttcctgactttgagccacttgtagggagggcagaggtcacagctatgtccggtgcaactagggcctggattcaggtagtagtggtttcagtggcacagtagctgtgagctcagaggacacacgtttttgcttctctagtcccagtggggtagtggtttactgcagttgtcaatcagtggggaatctgacctttggcttttgctcctccagcacttgtttaactaactgcatatattataatccctctgtttcaaatacctgctactgttccccttactgactgacaccagggttacaagctaaagaatacatcaagacggtcaggtgcggtggctcatgcctgtaatcccagctctttgggaggccaaggtgggcagatcacaaggttaggagatcaagaccatcctggccaacatggtgaaaccccgtctctagtaaaaatacaaaaaaattagccaggtgtggtggcacacacctgtagtcccagctacttgggaggctgaggcaggggaattgcttgaacccaggaggcagaggctgcagtgagccaagattgtgccactgcactccagcctggggacagagcaagactccatctcaaaaaaaaaaaaaaaaaaaaaaaaagattaaaaaaaaagaatacattaagacacactgctcagaattccatgataccaggtcttcaaggtcttagacaatgtgacctcactgaataggcattagaatttgctcacactctgctccaaactatttctcaacccaccatcctcgtgcttgcccacatatttttatctactattcctactcccaagactacttcccatcacttcttattaattcaaaacctacctcaattctaaagccttctttaatgatggtctctgggtctctcacccctctttagctccttcagcaatggctttgaatccatgtatgacaatatgaataaattaataaaccaacctgcttctttggcactcatcatttgaattacttattgtataaaacctcaatccattttctcatgctctaattgtttcatacatgtaggtgagtaccaagaaactgggaacacgcaaacaaacacctaaagattcactgataagagacagtgaaatgctaaaggtattttacaagtatccgtcactgtggtaaataattatgttgagaggccaaaggatattttacgtttatgttgatttttaaggtgaagaacaggtaagactcttccaaatttgctcacaacccaattctaaaagaaaaaaaaagaatttatttactatatgtgacacaaatggaaaagatttaataacaatattaggtaaatacaacaaaaaaatcagtgggctatgattactgttgggtttagttttctgacaatgaaataagagttaccaaagagaaaaattgtgagaggaaagaaaaaaaaaggaagatttggagcagctatcaatcccaagtaaaccgtgtaagatggtttacaaaaaacactggctgctaatttgaacaggcaaacttgggacctgcctgtattccttgctacctatgtcccttgaaagtccacctctgcttgagttttgatttctttctctgtaaaatgatggagaactatgcttacctaagagttgtaaatgcaccttgaaaatcataaagtcctatctatgttaattgcctccaagaaaggggaaaagagtaactggttttagacatgacacccacaatcacgtgatctcaggcatcagtttccaagaccatgtaattggctcaggctacagaggagactcaccttatgccctggcacttctgtccctggcacagctttcatatggaaatccactcctcctgtcttttctaacaagttggcgttacctgttgttgattcttctttcttagcttttgctgcttctctctcttgggccaatctgaatcaaaaagaaaatacaaataaaagagtcaaaataatcagccacgtaaaatggttatttcactttaggtgtgcctaaatgagcactataaacagctttgtagtattaaaaaccaaaataaaacaaaaatgctttcttagtagcataatagcttacctacttatctgaacatacaatgtttttattatagaatactggaagacagaaccgttaagaaaacaaaacatattccttatccctcatcttgttaatattttgtttacttaacttcatctttgttctgtatgtaaatatacatattttataatgtaatccaaatatcataagcacagttgggtacacttcatttatcaacttatacgttctttgaaaacatcactatgattgctgtacaacatgcctttccatcaatctactgtagtttattgaccagtcccttaccaccagcaactgagctatacggttggacagcagtgacaagctgtgctgtcagggctgtcccaccagagcatgagggttcttttcttagcccatccactacactacagtcagtctcccaaatccctgacatgcacgcttatacctgtgctctgctccagtggatgtcccagttcccctttatggaagaccaagaccatggatcgcaagttctctcaattttcccctttcaatttatatacgtttggcattttatattatcttctctccattcactcttccccatgacgaaggtatctttcggagcccaatttgttaggtcttgattatccatatcctcctaatgaagagaatgccacctcttctgattcaaatcaccgccaccttcttcaggcctggacaactgcacagagcagtcctcactggcctctttgcctctggtctgtctcctttatgtcccagaataaccatcagacccatgcttctcaggcatatccacgcagatactccaagcagcagcactgtgtgctcaacctgctcagcatggggctctagtgcctgtacacagtaggctggcaactgctgctggaatgaaaggtatataaccaccctgttcacagtcctaggcttcagctgaagaacaaaatcaaattctcacctttttcataaggccagtcccccaaaacatgcctcaaagtaggttgcttgccactcgttttagaatatatctgttcttgttacatttcattggtctggaacaagcttatcaactctcctggtcattctacctgtatattcttttttttttttcctttttttttgtttgagacaagagtttcactcctgttgcccaggctggagtgcaatggcacaatgtaggctcactgcaacctccgcctcccaggttcaagtgattctcctgcctcagcctcccaagtagctgggattacaggagcccatgaccacaaccagctaatttttgtatttttagtagagacggggtttcaccactttagccaggctggtcttgaactcctgacctcaggtgatccacccgcctcggcctcccaaagtgctgggattacaggcgtgagccaccgtgcccggcctctatctgtatattcttaaattgtttcctattttgaaaactccccaacaataccttttcttcctgaaaatacctttaggattttaaaagctctaatggtttttataatacattgtcttgctcttaaatcacttgcataatcactcttatgcctgtcatacagtgatctcctatttcctttatattttggtatgacactagcattaacagtcaaaatcaacatatgcaatttagtagtctactaaaatttaaatgcagacaatgctaagattcagcaactccattttctgatataaactgagagaaacacctgcatatacataggatatgtgctccaggatcatctatgaccatgaaaaagtagaaacagtcatcagtgggaagggaccactacattgtggtataaccattttctgaaatactactaacaattgttataaagggagaagatctacattgccacaaaagggtgtgttaacaaagagaaaataagtacatatatgcttttatagctcattaacagagaaaataagtacatatatacttttatagcttattacatacatacgtaaatgcatgaaattatcctttttgttcgtctggggtgaaggggattcagagttgaaagggatttcagctctacttatatgtttgaatttgttaagaatataatactatattacttgataatttgaaataatatataaaaccacttacaatataaaaaaaatagggcttaaatccatgtggagcaaaacttacctgtgcagaaagctttcttttgctagttgaatttgtaatgttccacctttccattttgttttatttaaaacagacatacctataaagtaaagaattattacaagtacatggcaatgtaaaaatatatttcagcttgtgctttttctaattatttagtatcaagaaaagcaggcttgtttatcacaaagagatccaggggaagtggaagaaaagaaatgagacctggagagagggagcctaggctcttgtttcatcttgacaacttaccaaaagagtctttacactccctatctcacagtgttactagattggaatgaggcaaaatgtgtaaaaagtaaagcaaaatttatttgcaatttgtttgtaaacaaatgtcaggaacctctgaataactgatatttaatgtatattttattgttatttcctgtaactataaaacatatatttcctgtaactataaaacaatcatcttttcaggtgaatcagaggacactctggaatcctacagcaccttaattttatttatcacctcatactaattatcactgtagaacttgcagatgaattaactatgagtgactgaactgtttgaattactatgccgtagtaattgatttctctgagcatctgccgtcagcttccttaataataccattaacagaattttgtaggtggtagatactgtactaagtacaaatttatcttttctttttgagacagagtgtccttctgtcgcccaggctggagtgcagtggcactatcttggctcactgcaacctctgcctccctggtgattctcctgtctcagcctcccaagtagctgggattacaggtgtctgccaccacacccagctaattgtggtatttttagtaaagatggggtttcaccatgttggccaggctggtctcaaactcctgacctcaagtgatccacctgccttagcctcccaaagtattgcaaatgtatcatttaatttaattctcacagaaatattatgaggcaagcactatcttttgtcattcatcacataagcaaacttgggctgagaagtttaagtaacttgccacaggtcacaaagcctagttgatgtattcttaaccacaacttcacatttatcacatatattcctcaatgtaaaatagaataaagcaatcttttcgcaaatgaaattacaaaagactgattgccctcttcctctattagcgtgttccctttacttattttccgtgtcttttttcactttttggcctccaaataactagaatatgttactgtgtcagcggcagtatggattatctcccattcttcattgaaggccactgtttgcccttgactttactaaacttatcaacaagagatttcacaatttcaaggatacggtcttacaagggtgtattttaaagccccctcaagagtgtttagtgacaaggattagctgtcaaagaaatgatcagactgagggggaatgtggcatgatattcagtgggatatatgtaacaggcagtttctatgaaagtttggtcccttgtccaaaatatttgagaatagcagttttaagtaaacccaccagtaaagtgctaccatgtctgctgatgccaaatggaatggacctaaacctgctgagttatacgatactggaattctcttcatcactgctgtccctctggataacgtgaaaaatggctgtggaggtttagatttagaaccagttattccaagttacagagtcatacaaactggcaaacagtatagaaaatatatgatgatcttacattttttcaggtccgcttctgctacactgatgttgatatatgcaaaaactttctgtgggtttcctaaaaaacaaacaaacaaacaaacaaaacaatttatttaaattcttatccagagagcaatgtaaaaacggttgtttctaaattaaaaaaaaaaatagctcttgaaaacttattatttcaaagataaaccttgttttttattggctataaaaataagcataattatcaaaatattccaaaaaaaaaaagaagaaaatgtccagtagtcagataaggaaacattttgattgtatgctagtgatagtctacttaacgggacacttaatccatgttagaaaattctagttctcaaaactggaagttaatatgtttctgaaatcagatgttttagaatttggaattttttcttatttcagaaacaaattctggtcaagttccacatcacacattatacctccacaacatcacttaaaacttttggtgttcagagctaacatttatcttggggttgttttattttctagcacttaacctgagttatgtctgcctataactgcccagtgaaggaccataaattaccttggtcatctttccgtgtgatgatctccacatccgaaacttctccaaatctgctgaactgattttgtaggtctgcctcagaaatgtcctggctaaggccacccacataaaggcgcttcgtttctctgttcactttcatgaaggctgggcatatacttgggtgtgtttcagtgggaaaagtaattttctgtatacagagaagagttctttcccttagttcttctaaaatctaacaaaacaactacttcctctgaaccttctgtatcaaatccgtctcctggatctgtatttcacttcctattgtattacttccaaattttagtcttcgaggttttgcccaagccctacatccacatctttcatgaatgcactttggaacagcaaccccatacccatatagacacaggtacagacagagtttttttcctccaaatggccataatattacactctatccctcttaattttatgtattcatgtttttagatgtttttccttgactcactcatacattcatttactgtctttaacaaagtctgacagaaacaggatgtaacgcactaaaagataaaaagagctagcctacctcttcctaattgtctccacccccaacctacccaccccagccttcttcctcctagaagacccaaagaagtgaatagagaggctaggagctccttatagtcacaaaagaataaaacaaatggcacaatattatgtcacaataaaagtgctgcaaagtggggttcagacacaaagatcaagggatatagcgaatacagacttgtgtttttgctatgtgcctgcattgtacaaagtagtttgcatgtttcccatttttcaggagagcagaagaggttaagtcacttcctcaatgccataccgaaaattagtgaatccaggattataatgcaggtctaccttcagaacttggaattcttaacactatactatgaaggttgctgtatcacaggggactcaggaaaacttttccagaggtactagggcccatcatagtatctctcatttcgtttagcacccggcaggcgctcagctctcgcccttcccttccccaagagctgacagactctttccagaagagactcccaaccagcgtccaccacatggcgtgtattctgggcagaacttcggcctacctcttcccgatagtctccgcccccagcctacccacggcagccttctttctctgagaagacccaaagaagtgaagagagactaggaaacggccctgtgacttctcatgcccgaaacccactcctcaccacgtcgttcacctaaagccagcgccgctgcagcccctaacttctggtcacgtgtcccaacggagcatcctctcttccttcctactcgatttccaacccagcctcctaaggttccgttaccacaattcagttcccaagagcttttaatttccttttccgtcctcccaccttccctgacgcctccgtcacctccccctcaacgactgcaaaagagcctaaaccaaaatcccctagtttctattgaacactatcgctgtgtgtaccaattcctggactaggtcggcgtaagagaggaagtaggtgaaaaaaataaagaggcgctcccctccacgtgatcccagccctgcctctttagtgaggcacgcggccgggcggctccaaggctgccggctagggtgagcagcggagcgcttgggcttggagtagcaaagaacgcgctctccagagaaagtatagccactgcttagacagccagggaaacgtgtgcggggaagtggaggactcaggctctcgtgcgagagcggagttggacgtgcagggccgctggggtcacgcggagctctcccgcctcccctccgcgtgagctctgggatggtccgcgccgggagcgcgcgcgaggcttgaagcgcgggtgaagcgcgcaggtcggagtgacagctgcgctgccggcccggctgcggtcagcaacgcgccatggacgcagagctggcagaggtgcgcgccttgcaagctgagatcgcggccctgcggcgagcgtgtgaggacccaccggcgccctgggaagagaagtcccgagtccagtacgtgaccaccccaagtcccccagggcccgctggccagggttcccgggccaggcgggtgaatctccacagacatcctcggtctcctactcccagccctagaaagtgggcatgaactggcattgatcctgtcatgacgatggcctagagttgggagcagcgcgtacggcgcccagctgtaaacgcattgcagggtattaactcgtttaatcgcagtcgtctgtgtggatgactgacaaggaggaagtcttgactatatccctagctagataattccgcctccagtatgcagaagtatctctagttgggatttaataactccgtttggtttcatggcatttgttttggtaggtcagctaaccatctcaactgataatgactttgtgtttacgatgacataaaaattcctttgaaaaataacttcggtaaaaaactaagttgataaaagaaaagtagttaatatagactgcaggagaatttgacattcctctgaggtaggtgctactgttagccctgttttatagttgaagaaactgaggctcagagaagttaggtagcttgtccaaggttccagagaaaggaattgtcagagatggattgggacccaaaaattttactccaaagtctgggcacttttggtttattgaaggagagggagagaaaagctctgcaaccgtaattatgtattatcatctcaaacatagaagcctctcgaaaacataaactgtcttcaatttttgagtcaagagtaatttgacataggtgcagaaagaatgggatttttcctgagctaactggagaagaattggtagaaaatgggaaggaggagatctacagaaaatgtctgcgtgcggtcatgaaagtagaggaagctgtgactggttaaagggagaggaaaaaggtgtgctcctccacaaatgagagtaaatgtattaaagacccttgctatttgaggtgtgctccacagatgggacgctttagcattacctggcggtttgttagagcgacatcctgacctactgaatcagaatctgcattttaaaaaaatacactgccctaacagaggatttgtgtgcacacttggaagtttaagaaccagggaaaaatagtttctttactggccacaagatttcattagtccccatagtagtgtcaactgaaaaatcatgagatctgcaaatttagagagactatttcttaaaaagggttacagtctgcaaagtggccatcctgacaggctaggaagcatagtctcaggcaaagcagaaaggcccacactttggaggaggaggggttggggcagggatttatgctgtatgagtgggctaggtatacatattcaacaggttataggaggggctatgaatattcacgaagggagatgtgctcacctgtactgaataaaaatgcatattacatgcactccatattcattttgggaagctgacttaatatttaaatgcattacaattaggccctgtacgtcaaaagttgaaggagggaagcaaaggtacttaagtacacaggccttgtaaacctgttagaacaagtccatggttggtgatcttatcaaaagaaaatttttgaaatcattctcttgtcctatcaaagcctgtggaacaggggaatcagttagcatctggtggtggatgaactgcaattatttcaatattgcttatctggaggccagtgctagtgaaaaaaatattgtggcagttagaacatagttcattcttttaaaggtagggggtatgtgacttaacccttgcctggcatggccttaggtcttgtttataatttggtatcttattgccacagagtccgttctgcaactcttacgatctctattttaacattaatgctggtcagttgttgtgtctacatcccaaataggaaggggtataacgaggtgtgtctgacctcccatcctgtcatggttaagaactgagtttttaaggtttctttggggtccccttgaccaagagggagtcggttcaggtgattgtgggggtggggtaggattttatttttagttcttagtagattatttatataatctgggacttctcagtggttaaattggaaagtcagaagagtccagattgtgggagacattaaatgtcagtccagggtgtttggatttaaccgtgaggtttcttttcactatagtggaggaggaggattggaacctatgtaccaagctatttttttaagtgattataagtggttggatggattggaggtaggaaaattggagctaaattattcagctatatccatatgtccacactgtggagccaaattgcctgctttcaaatcctgtctctgctattggctgagtgatcttggttaagtgagctccccctttctgtgcttcagtttcctccgtggtaaaattatacccaagtttttgggttgctgtgaggactaattgagttaatatatgtagttcatttagaagagtacttgcctcataatagtaactaacactcattagtagaccattgacctttaaactcgtgtacagattgattttaaaggaaaaaaaattcttgcaagctcctaattctgacaaaaaatttttatgttatgaggacaaacttacaaataataaaaccacaaagtgaataaaattcaaacaaatccaaaatagctcaaactaacatcattagttgaaatacacaaatattttgctcaaactaaataactgctatgaataagaatatgcagattttctttttgtggcaaaatatacataagatttactattttaaccatttttgagcgttcagctcaatggcattaaacacatgcacattgttgtacagccatcaccactgtccatcttcagaactttttcatcacccctaaactgaaacaccatacctattaaacacgaactccctactagccactctgacaactgcaggttcttttttgagttctgcatatccagcctttaatgatgacttggttctcttaccactttgctctatcggaaataccttgaaattttccttcatagtttgctgtgacatttggtgttcacttgtcagaagctcatttatatttatggctttttttttttttttttttgagacggagtttcgctcttgtcgcccaggctggagtgtggtggcgcaacctcagctcactgcaacctccgccccctgggttcaagggagtctcctgcctcagcctcccgagtaactgggattacaggcacccgccaccatgcccagctaattttttgtatttttactagagatggggtttcgccatgttgggcagtctggtctcgaactcttgacctcaggtgatctgcccacctcggcatcccaaacttctgggattacgtgagccaccgtgcccggccgcacatcatttatatatgaagattgtctctgttcttttttctttttctttttcttttttgttttgttttttgagagagggtctcactctgttgcccatgctgaagtgcagtggcatgattatgactcactgcaaccttcacccacctcccatgctcaagcaatcgtcctgcctcagcgaccctccaccagccaagtagttgggactgaaggcatggcacctgccactatgcccagataattttgtgtgtgtgtgtgtgtgtgtattttttggtagacatggggttttaccatgttggcccgactggtcttgaactcctgggctgcctcaggattacaggagtgagtcgctgtgcccaatctgttcttttttccttgacttctatatttaatgtaatttgtaggggcatcagtctatgatggcaaatgcaaaagaagctgtggtagtttcatgatacagaatatacttatattaacattttaaattagcattaaaacaaaatttgagacaaattttacagactttattaagtcttggattctcagtgtgaagaatatagagttagattattctgtgtagagatggtataaggtcataagagcattggttaatgtagtagaattagaaatacaaaaggaagaatagttatgtgagggagcagaacggatggcagtaagtccagatgtcaggcaagtgaaggagtcaaggataacttccaaggtatagagcctgacataccaagggaaatattttattattaacaaatgtagggtaatttagaggaaaagcagattccaagagaaacgatttggtgagctatcaagctagatctaccttgcaggaagaagagatacatggttagaggtatattttaagagttactggcatagaggagctaaggctaatcatttagtgttcctgcagaatgaaagaatacatatttaggatagcagaagtaagagtgttagggttttcctctaatgttggagacaagaagctgaccctagatagcaaatgagaattgggataattatgcccaagaatccaaggaagagatgttttaagctggccggaaaagtcaacagtatagaatgtagcagagtgtttaaaggaaataatggatgacaaaaaaaaaataccatctaatacaattattagctaaaatttctttttttaaaaaagtttaagttttttttttcttttctttgtttttttttttttttgttgagacagagtcttactttgttgcccaggctggaatacagtggcgtgatcttggctcactgcaacctctgcctcccatactcaagcaattctcctgcctcagcctcctgggtagccaggattacaggcacccgccaccactcgaggctaattttttgtatttttagtagagaaggggtttcaccatattggccaggctggtctcgaactcctgacctcaagtgatccacctgccttggcctcccaaagtgctgggattgcaggcgtgagccactgcgccaggccaactaaaatttcattctttttctcaaggaaaatatatttatatgttctcaatgaagaatgtctggccatagtgatgtttaaagagatttgctatttctttttccgataaatctctttcttactataaaacgttctgtggtgtttacttttagaaattaaagttagctaattgattttattttttaatttctttctttttttatttttttgagagggagtctcgctctgtcgcccaggttggagtgcagtggcacaatctctgctcactgcaagctccgcctcccaggttcacaccattctcctgcctcagcctcccgagtagctgggactacaggcgcctgccaccacgcctggcaaattttttgtatatttagtagacatggggtttcactgtgttagccaggatggtcttgatctcctgaccgcgtgatccacccgccttggcttcccaaagtgctgggattacaggcgtgagccacggcgcctggcctattttttaatttcaagacatcttttaaaataatttgagagatatatcagacatttaggctggaatttcatgggtcagaacacacattgtaattttgcaaagtagtcctgttataatttatttgaaaggtgtttctaatatgtggaaatttggaagtataatttggttacatatgttttttgttgaaattaaagattgtgggctgggcatggtggatcacgcctgtaatccagcacgctgggagactgaggcgggaggattgcttgaagtcaggagtttaagaccagcctaggtaataaagccagaccttgtctctatgagaaggaaaaaaaaattagctaggcacagtggcatacctgtggtcccagctactcaggaggatcctttgagcctgggagttcaaggctgcagtgcactatgattacaccactgcactccaggctgggtgacagcgtaagaccctcatctcttaaaaaggaagaaagaaaaaaaaagtggtggtgttagtaaccacactggttttgagaaaattctttttaattttttaattttttttattttaatgggggaaggtgacttaattggaagagagtaagagggacaaaatgggaatgctttgaggaaaatggggttattagatgaaacacgtgttagtaattggagtgattatttttgatatttgccttttagaaaatcttttcaagccatacaccaattcaatttggaaggatggaagtcttcaaaagatctgaaaaatcagcttggacatttagaatcagaactttcatttctaagtacgcttactggcatcaatataagaaatcactccaagcagacagaagacctaacaagcactgagatgacagaaaagagtaagcattttttttaaatctagacatagtatggaagcttaccttattatgcataagaaattggttgtcataatattgaattaaaattctacaaggtaagtatttgaaagtatggttgtggtaaacttgtttactcacatatcttttgaacatcacggtgttcaaaaagctgcctgggccaggccccgtgatcatgcctataatcccagcttttgggaggccaaggcatgcagatcacctgaggtcaggagtttgagacaagcctggccaacatggtgcaactctgtctctactgaaaatacaaaaattagccggatgtgttggtgggcacctgtaatctaagctacttgggaagctgagccaggagaatcatttgaacccgggaggtggaagttgcagtgagctgagattgtgccattgcactccaccctgggggacagagcaagactccatttaaaacaaaaaaaaaaagggctgcctgagataaatattaaagaacagacacagtttcttttctttctttcttttttttttttaccttctccttcctgatggaaaagaacagacacagtttttatcattaagtaccttaatagtcaagtaaatagtaataagcgaataatgattataagaacaacagcaccattaatttatacatcttaggagttgttcagcactgacatgaaagctgccaagataaatattttagcagctggaccttttgctggaaggaaggtttctggtcccaatgactagattttattgccaaagatctgtgatgcactaagagataaagggaagctactgcagctgtgcaactggatgtcaagaactttggttggtcaagaataacattcccaaaagcagaaatcatttttggtgtgctttctgacttttccactgaaaattaccctcatgacaggggagagggtcttgggcagccactgcagggagactgaattacatgtagaaacagagtgatggaatttggagacttaaattacttgaaaggaagagatggaatgcagagagaatagagaatgaggataggccagttataagacttttactagcttaaaagccgcagcatgaagattaggcgtagagtcttgacaaagctaatgtggtttgaatgggagatttcagacagggacatcacaagagttgaaatgcttttttcctgtgagtaatatgtgctcattttagcaaacttggaaaaatatagaaattatgaagaagaaatatcattttaaagccagaaatctaagtagttataggagtttcttgaaattaattgcaagtaattcagcaagagtaatggtaccggaagagaaatatcttgttttttatttttttgttctttttcctttgttttttgtttgttttattttttcgagatggagttttgcactgtcacccgggctggagtgcagtggcgtaatcaaagagctttttgaagtcattattgttttccatagctattagttgggcagacacagtttctgtggtgtgttaatgaatgtagctgaagctaggtaatcaaatgatcttgatttccttcaaaataatcatgtgaagaatgtagactttattgcagctatgcttttatttctccaaacattttttagaactttcttttggaatttccttcagtgcctatgatgattcttttaaattctccattttgattctgtaagagtcggtttacaaactaagtaatggaatttggagtcgaaaattaagtgttactgcaaagtaatgagagtagggtttttttttttttttttgagacagagtcttcctctgtcgcccaggctggagtgcagtggtacaatctcagcttactgcagcctctgcctcctgggttcaagcaattctcctgcctcagcctcccgcgtagctgggactacaggcacgcagtgccatgcccagctaatttttgtatttttagtagtgacggggtttccctacattggctaggatgatcttgatctcctgacctcgtgatacgcctgcctcggtctcccaaagtgctgggattacaggtgtgagcccctgcgcctggccgagagtagtattttaatttataatttttattcttgtcttttgattagctttaaatgtatgttgttaaaaatatgtagatgggcttgatgtatggatggttttgaaggactaatcctcttctgctgtctgtgaactttgttaaaaatgcacccttactcattatttaaaaataaaaatcaggccaggtgcagtggctcacgcctgtaatgctagcactttgggaggcctatgtgggcaggtcacttgaggtcaggagtttaagaccagcctggctaacatggtaaaaccccatctctactaaaaatacaacaattagctaggcatggtggagtgttcctgtagtcccagctgctcgggaggctgaggcaggagaatggcttgaagctgggaggcggaggttgcagtgagctgagattgcaccactgcgcttcagccttggtgacagtgagaccctgtctcaaaaaaaaccaaaaaaacaaaaaaaaaggccggttgtggtggctcatacctgtagtcccagcactttgggaagccgaggcgggcgaatcacttgaggtcaggagttcgagaccagcctggccaacatggtgaagcctgtctctaccaaaaacacaaaaattagcagggcgtggtggggcatgcctgtagtaccagctgctcgggaggcagaggttgcagtgagtggagatggtgccaccgcactccagcctgggcgacagaacgagactccatctcaaaaataacataaaataaaataaaacaaaataaaaatcagtgtgttcaagttaaaaagtactgaactgaaaatttatcatgctatatatttatatgcaatttatgtatgcatagtgttcatctataaagaaaaaataaagcctggacataaagaaaaaataaagcctagagattggacagattagtaagtctctctctgtctgatttcttatatgcaaaataaagtggttgctgtagattatttccaggattccatctgcattttttctttaccgcatttttggcacatttatttttatggacaaagcccaaggtcatctagattttctcctatattctaggagttttatagttttgtattttatatttagatctgtgataaattttcagttaatttttgtgaaaggtatagtcagtgtctagattcttttttttttttgttttgcatatggatgttcagttgatccagcaccttttgttaaaaagactattctttctccattgaactgcctttgctcctttgtcaaagatcagttgactgtatctgcgtgagtctatttctagactttctcttctgttctattgacctatttgtatactctttcactaataccatactgtcttgattactgtagctttatagtaagtctctaaatcaggtcatttaagttcttaaactttatttttcttgaagtttattctggctctcctgagtttttgcctttgcgtataaacttgataatcattttgttgatatccagaaagtaacttgctggaattttgattggattgcattgaatgtactgatcaaagttgggaagaactgacatcttaaccatagtgagtcttccatagctatttgtttaaacaattccacatctaatccacgattaagcattgcatctatctgttatgtctctttagtctccttaatctggtcattcttctctgtctcttacgacatagacatatttgaagaccacttgtattatagattgttcttcaatctcttttttttctgatagtttcctcttgatgacattcctgtgcaattttggcaggaaaactatgaaagtgatgttttgttcttaccagtacatctaattaggaagcaaattatgtcaatttgtaccattctgtctttttttcctaactacttattgaacaaatctttaaccagtcttcctattttgagccccaggttcacctcccataaaggtacttggtgctgctgactcataatacccgtctcgtattctgctatgtaaatgaacttacttctgggttttcctcatttgctggcttaggtttcagttttcctggctctaccaggtcactttcatttgtccatgtgctatctagtgcatccatctgatttccagcttcccaaatctgattgctcttatcttccctgttccctttatccttgtagaatcttgcccttctaaaagtaacgtcattagcaaaactagatgactacgtaaagtcaggatagtgcttacttacctcttgggggtagggaatagcctgggaaaggatatgagggaaccttataggttctgtaaaattcctgtagtatgatctcagtggtagttacctgaacaaccacatgtataaaagaaatattgagctgtatacttaagaatagggcattttatgcattcaaatgtatgcatgttatatctcaaaaatatcactgacattttagtgaagttttgagagatggcagaggtgaacgcatggattcaatttactgcctttaagtactagatagtgttgaaaaaataaaaagcattgaacagttaacatgactcaaatttgtctagggttatactagtacatttctactacttaccataacttttggtatagttgaaaacttggccgggcgcagtggctcatgccagtaatcccggcactttgggaggccgaggtgggtggatcacctgaggtcaggagtttgagaccagcctgaccagtatggtgaaaccctgtctctactaaaaatacaaaaattagccaggcatggtggtgcacacctgtaatcccagctactcgggaggctgaggcaggagaattgcttgaacccaggaggtagaggttgcagcgagtcgagatcgcaccattgcactccagcttgggcaacaagagcgaaactccttctggaaaaaaaaaaaagaaaactagaaacacaagttatcattaattttattttgcaaagataatcaatttggtttacgttcttccagagtttttcaatgtaattgctaatgcacactttcacacatatacccacatgtattgtagatattcacacaaaattaaataatacacatttgaagaaaatggctatttgcaaacaaaatatttgtttttctgctttacaggtattagaaaagttctacagagacacagattatcaggaaattgccacatggttacatttcaacttgaatttcagattctggaaattcaggtaaattaagaagcatgttgtgataacagagatacttctgctatgagataaacaattcccacaccccagccttcaacagtgatggagctgaagaggagttcatgagccagggcccccccattcatagcacatttgtgcaaagtggtacattttcaaaatttcaggtattaatagcccagcaactgcatatggtagggttgttgtgaaagccaaaggtgctttattgaaggacaggtagcaagatgctcctgggcttccagtgcaattccatgaggttgtgggaatagtcctgggtgtcatcagtagttaggtgatatgccagccatctaatatctattagttatctattgctgcttaaccagtctccataatatttagcatcttaaaacaacccaaaataggccaaacatggtggctcacacctgtagtctcagcattttgcggggccaaggcaggaggattgcttgagcccaggagtttgagaccagcgtgggcaatgtagtgagaccctgtctctacaaaaaaataaaaaattagccaggcgtggtggtgcgcacctgtgctcccagctactccggaggctgaggtagaaggattgcttgagcctaggaggtcaaggctaccgtgagctgtgattgtgccactgtactcgagcctgggtagcagagtgagactctgtcacacacaaaaaaaaaaccaccaaaaatacaattatccctcagtatctgtgagggattggttccaggactccctgtagtaccaaaatccacggatgctcaagtcccttctataaaatcgtgtagtgtttacctataatgtacacacatcctcgtttatactttaaatcatttctagattacttccaatacccaatacaatgtaaacgctatgaaatagttactatagtatattgtttagggaatcattatgagaaaaacaacttgtacgtgttcagtacagatccaaccatctgcatctgtagatttttttttttcaaatatttttggtctgcagttggtcaatctatggatgtggaaccacagatagggagggctgactatatttattaattatctcacctattttgtgtgggtcaggaattttggagccactcagttgggtgtccttgctcagggcctctcatgaggttgtggtcatctgggaccacagccatttgaatgctccttggggctggatgatcttgtacctcgtattgaactgctgagacacaacagagggaggaagacccctttggctaagaccttcacataatatcaggaagcaggaaagcgaaagcagacagaatgataacaagtaaccccactggccagggtgcagcagaacagggctcagccaccttcaaaggctgactccaagaaaagttgaaagccagagaaagcagttgaaagaggagaaagcagtttcaaccagttggttttgccagttgggccaacagggaatgtgtgcaaagaggaggaacagaacagggaagggctgtcaggctgcattggcctcagctcatcagatatctaaagtggtgtagagtagttgttgtaactgagtcctatggacaagctgcctgcttatattcagggtcatgtgccaggattccttatccttttcatcagtgtccttagccacaaaaacagtcccaagtttcccattttgtatgagacaggacttggttatggagtcaggacttttccttattctttgtcagatagccactccctaactagtcccaaggatttggtacagttacctgggtttggaagttttgcttctctttgcaatccaagtctccatttgctattactggctctggcaggctgaggatgggctaggggttgtctagaccccctcatttgatggcaaagctcccagcctgtactcgtcttagagtatcactctcacactgccaaagtgaccaagaaaaggtgtagtatagcattgcctaggccatttgagcaggatacaaaacacatttcagcatgttcaatgtgtcaggggcatgggtggtaagtggctctaggggactgacattgttcccatatgggcagcaggccttggggatgtacaaggtcaccaaggagatatcacatgaccacaaagatcatttgctgaagactcaagcagagaatggacccaaatggattggtatcatttaggctggacaacctgtgccaccaccccaggcttttcctttaggtggctcagggactcctggatgttgtccctttgtaaaaggtttcatagtctgactgactatattttctttctttgtggctgatgtgaacttgacctgagagtggtaatctactgaatgctcttctgtatgctggcatccattaatgggccaggcctgcaacccatggcaggttggtggaatcataatcctatggtccactaccatctccgaaaacatctgcactctagtatatatgtccaggaaactgctcaggggaatcctagcagccttgcggtcttgcaggctttttctactgtaagagttcatctctttcacagttgcctcataggttatgcggagagaagctccgttgtgggcagaattagtcttgtccttgagaggcttgtccacaaatccaagtgaaaagggaaagattatcctctgacattgaggtgaatgagcttcttagtggagttataccttccaggatgggttgtaccctaagattgattggtatgctccttagtggggctatggcctgagacataacataggctataatatccaacatagactacaatatcttcactttatttaagttgcatacttcagtcaccttaaacctctgatggaaagtatcaaatagtaatttgatgccttcctgagtcagataaggatgaggtcaccatgtaaaatgttgcgggaagtcagggaccccaaatggagggactggctgaagccatggcagaagaacatggattgtgaagatttcatggacatttattagttccccaaattaatacttttataatttcttatgcctttctttactgcagtctctaaacataaattgtgaagatttcatggacccttatcacttccccaatcaatacccttgtgatttcctatgcctgtctttactttaatctcttaatcctgtcagctgaggggatgtatatcacctcaggaccctgtaataattgcattaactgcacaaattgtacagcatgtgtgtttgagcaatatgaaatatgggaatcttggaaaaagaacaggataacagcaattgttcagggaataagagagataaccttaaactctgactgctggtgagccgggcggaacagagccatatttctcttctttcaaaagcaaatggcagaaatatggctgaattctttttctcagcatgggacatcctgagaaagagaatacgtgcctggaggtataggattataaacagcccccccaggggcgcctgtctcttatggttgagactgcagagatgaaatatactccagtctcccatagcgctcccaggcttattaggaagaggaaattcccacctaataaattttgttcagaccagttgatctcaaaaccctgtctcctgataagatgttatcaatgacaatggtacctgaaacttcattagcaattttaatttcgccttggtcctgtggtcctgtgatcttgccctgcctccacttgccttgtgatattctattaccctgttaagtacttgatgtctgtcacccacacatattcgcacactccctccccttttgaaactccctaataaaaacttgctggtttttgtggctcgtggggcatcacggatcctaccaacgtgtgatgtctcccctggacgcccagctttaaaatttctctcttttgtactctgtccctttatttctcaagccggccgacgcttaggaaaaatagaaatgaacctatgtgattattggggtaggtcccccgatagtagaagacatttctgataatgtgatatgctcctaaagaatgacagctgcctgaccagagtcattcctagcatgaactaccacatggtttggcctgctgggcctgggcagccgccccagggcagcacagacaggacagaagccagacagtggatgtcctgccacttaggtcctgcaacccctgctgctgtggccacactctgcctcctaacagacagtgttggcactgacccagacctcaacagtattttaagccaatattctcatcctcatgtcatgaaagcatgattgaaaattttgtgaccatttgataatggcctgagattatactgttagctcacatgctgaatgaattagagtcagttgagctgtgccagacagaaaacttaaaaataaaggtactagaagtgtatttctctattacttaagtaaacttgtaagttttcaagggctaatatggtggttttatgataatcaggttctaccatcagccaacatggcttcaagtcatggcacaatgatcacattagcatttcaggtatcaggaagaagttgggcaaagaaagcctcgcctgttcttttaaaggacactttctggaagttgtacattcatcattttcacttatattctattggccaacaagttcatgcaaaggatgctgggaatttagtctttgttatgcttggccatatggccagtgaaaaactggggcaagaaaaaagtataaatagaggggactactagcagtttctgtcctatatgctttagcggatgcagggggaaaaaaatctaaggagaggaactgtagatatcttctttgaaggacatagaacctagtaattgctgagtctctaaagagacatgagttgtcattgtttaagttttaaagtatgtatgtgttttgggactgattggttttactaacaaagtgctacagaaagagtgtgttctccctggctgtgttaagaactctcactttctctctgagccttttagattttatgattcttcttgaagaccaggactggtaaacaaggtgttggaagaaattacagagagctgtggaatcaacagggtttttggaatcagttgtgtgagaggcaccaagagttcttacttggggagggaaaaacaaaggactatctcgtttctctttattgcttacaattctgatataataacttgatgaaaagtttttgaaatgtttattacttaatggtaaattctagcatattctataccaacttgtgtatgtatgcctttagaaacatatctagtagaattgctgggtcaaaggaaacttacaaattctgattgatagtggcaaattgccttctaaaatagttttaccattttacatactgagcacatttttacatttttactgtgaagactgatagaaaaagaaatgacacagcaaccttgtgtgttctaaaacattttttaaaaataaaatttccactagagggagaggtttagctatctgaaaattaaaaagtaatctaaatagtaaaaccctcaatttacagaatattgttgtaataaagttatattaatataatatttgaactaaacatgacctcaaatcatgttaatagaatgttagaacaaagtgatgacttatagtttgtctaggtcaaccctattattttataagtaaatggatccagagagtttgaatgattactcatgttggtgcagctattgttgtccaaggtggttgggacatagagctctgttggccagatttactttctggtgttcttagtactacatttgtgaagagttgtaaggccatcagaattaacgtttatcagccttccataatccaagcaatatagtcaattagattggtaggagtttgtggggaaagtggcaggttaagtatgtttccataacttctgtcccaatgaaatgaacaaaattattcaaaaaataagcaatttttttaaatggaagagaatacaattccattatcacaggctccaaagaaaatctgtttgatattaatgacatttgagtctaaacactgaaatccaatacagggtgcttcatgagagatttgtaagttttacaaagttaagctggccacattggctcacgcctataatctcagcactgagggaagccaaggcaggaggatagcttgagcccaggaattaaaggccagcctgggcaacatagcgagaccctgtctctaaaaaatatatatttttttaaataaaaaagaaattagccaggcttggttacttacatatatagtcctagccacttgggaggctgagacaggaggattgcttgagcccacaaattcaaggtcacaaagaactgtgattgaacgactgcattccagcctgggcaatagagcaaaaccctgtctcaaaaaaaaaaaaaaaaaaaaaaaaggaccaacttaatggcacccttttcctaaagatctctacccataatccttcagttgtagaggagaatgagaactgtgggcttaagtggaccatagtagaaaggaatgtggtactgagacacatgtaggggctttgaggtcagattgtttataaggtctcttcccttatttaccaactggggagaattgacctagttagcagtaccacaagcaggggagagatggaaagatggaaaaacaatattttgaagtcagcttttgagttgttaaacaggattctataacccaacaaaaaatttgtttttgcctatcctaatgggtgaaaagctgaaatctaacatgtatctacacatacttgaccaagagaccagatgtgctcctgagatttttgctttccttttcctttctttgcttttttttctggtaacagttctattgagatataattcacataccatataacttaccagtttaaagtgtacagttcaatactttttttaaagatgtaatttatttggaatccaagctttgtttcacaagtttattatttatttttattattattattgttattctttttgagactgagtctcgctctgttgcgcaggctgtagtgcagtggcacgatcttggctcgctgcaacctctgcctcctgtgctcaagcgattctcctgcctcagcctcccgagtagctgggattacaggcgcctgccacgacgcctagctaattttttgtatttttagtagagacggggtttcaccgtgttggtcaggatggtctccaactcctaacctcaggtgattcacccgcctctgcctcccaaagtgctggattacaggcgtgagccaccgcgcccggccagtctttgctcatcttataggtaaaaatggcatcttatcggccaggcgcggtggctcccgcctgtaatcccagcacttcaggaggcagagacggggggatcaggaggtcaagagattgagaccgcctggcacggtggctcacgcctgtaatcccagcactttgggaggctgaggcaggtggatcacgaggtcaggagatcgagaccattctggctaacacggtgaaaccccgtctctactaaaaaatacaaaaaaattagccaggcatggtggcgggcacctgtagtcccagctactcgggagactgaggcgggagaatggcgtgaacccgggaggcggagtttgcagtgagccgagatcgcgccaccacactccagcctgggcgacagagcgagactgtctcaaaacaaaaacaaaaacaaaacaaacgagattgagaccatcctggccgacatggtgaaaccccatctctactaaaaatacaaaaattagccgggcgtggtggtgggcacctgttgtcccagctccccagctttggggagaatgaggcagaagaatcgcttgaatccaggaggcggaggttgcggtgagccgagatcgcgccactgcactccagcctggtgacagagcaagactccgtctccaaaaaaaaaaaaaaaaggcatcttaccttattgttttaatttacaattattattagtgagattgaactttttttgtttttgttttgtttctgtcatgattactctttccttttatttggtggcatttcattttgcatatttcaaaagtatttttgtctttttgaagtttactgtgctttgatacagaaatttttatctttattttagaataaggagagattatcttctgctgttactgacctcaacataataatggagcccacagaatgctcagaattaagtgaatttgtgtctaggtaagctattttacaaacttacttttttagagaaaaaaagtaaatttacactttacagttttaagtttaccttttcctcttcttagtaagtaaataggtcttctctgaaagtataacaccactgttgtgcttatatttgagcccatattctctatatctatcattctttcatttagtttatatttattgcacattcactatgtgctgggtattaaaattaaaatgtgagcaaaaaaagacacaatcctcagtcctcatggaattgacagtctagtggagaagttagatattgatcaaataatggcagaagtaaatataaaattatggctatgttaaatgctacaaaggagagttacataatgctgttgaagtatatatcaggaatttttgttttttattatttttgtatttttttttaaattagagatggggtctcactatattgcccaggctgttctcaaactcctaggctcaagcagtcctcctgccttagcctcccaaagtgtttatcaggaatttgactagcagagagaacatgaaatcatttgctgaagcttgaactgacatctgaaaaatgagtaggtgtgaactaacaaagagggaataactttgctgagcactgtgccagcagggagcatggtgtctgtgagcaattgacacagggccacagtgacaggtggaggcaagagcctaggagaatggtgtaagatgaggttaggaaattaggtaaggtccatactactgggaattgggtataaagagtgttatcacagtcccaggaccaagtgaaactattgaaaagttttgagcagggcctgaggaaagcaaaagtgtggcatcctagaaagaattattctggatactatggggaaatggaatgaaggggtgcaatcattgatacaagtgagtcaatgactagtcttttaaaacagttcaggcaagagaagtttgtagtttggactgaaatgatgatacttagctagatggatttgggggataattaggaagcaaaaatgagtgggcatgggattgcttgagtaaaagggattagaggtcattcacaggggataactctttgattatggtggtcccgtctgctgttaagggaaggttggaagaggaccattgtcaggtgacattatgactttattttggacatatgggacttgagtgcctttgaaaacactgaaataaaaatgagaaagaggcagcacagtagaggtgggggtgggagatatagaacactggaattatcttctattgggtaggaattaaagccttgagcaggaatgagtttgcctatgaaggaatatagagtagaactagaaaaggccctagaactgagccttgaggaattctaaaatatactggctgaatagaagggaaggatcctgcaaaggaattagaaaaggaactgtttgagaggtagggagaataccaagaatgtgttgtgtcatggcagagatcacatatttccttttgttcagaccatagtttggaagtagcatctgctatttggaaattacaaaaggaagagtagtgagatatctctcttcctgtaataatgagcatattatagttacttaataaatatttaatcccagctttttgggcaattttttagactgggttcccattttgtggagagtgactggtattttagaaagggtgctgaacataggtcagaagacctggattttattccagattcaactacgtgtaagttacctctccttttggagtttctttcttctttatctctgctgttatgcaatttaaatgttatatgcctaattatgaatttatttttagtttttcattatagatctgtagtttttcagacaggattggtatctttaggttttgaaaaatttttagtcattattttattgactcttgcttctaccttgatcttcccttatcacagtctactttcactttaaatagtaagcatttcacatgtactataagaacaacagtatactttccatttattttccctcaaccattgtattattattttcatataattgtcatacacttttacatgttccaaatgtctcagggcattgttactatgtttgccttagactgtcaattattttttaaagcaattaaaaataagacaaaacttgttttgttttgttttgttttgagatggagtcttactcggtcacccaggctagagtggaatggcatgatcttggctcactgcaacctctgcctcccaagttcaggcaattctcctgcctcagcctcctgagtagctgggattgcaggcatccagccaccatgcccagctaattttctttctttctttctttcttttttttttttttttgtgcatttttggtagagacagggttttactacattggccaggctggtcttgaactcccgacctcaaatgatccacccaccacggcctcccaaagtgccaggattacaggcatgagccaccgtgcctggctgacaaaacgtgtttttgtatatttatcttcattttttcatttccaacattcttcatttctttatttcattcttcatttcatttgattcagatttctaactgctatgctccttcttccttaagaacttcctataacttttttttttttttttgagatggaatttcgctctttttgcccaggctggagtgcgatggcacaatctcagctcactgcaacctctgcctcccgggttcaagtaaatttcctgcctcagcctcccaagtagctgggactacaggtgtgtaccaccacacccggctaattttgtatttttagtagagacggggtttcaccatgttggtcaggctggtctcaaactcctgatctcaggtgatccacccgccttggcctcccaaagtgctgggaatacaggcgtgagccaccgcacctgaccctttaacatttcttactgtgcttgtctgttggccgtaatatctatcagcttttgtttctctggaaaggtcttaattttgccttcattttttgaaagatatttttgctggccatagaattctgagtagacaggtttaaagataaaaaacatatatctttaaacatactctttcataatctggattgcataggttgtgacaaaaagactgcgatgattgttatctttatttttctgtattagtgtgtcatgtgtgtgtgcttggggcagccttaaatctttctcttaattttgtgtttctgtagtttgtgctatgtttagggtatatttgtgtgaaaattatcaaccatgtcttttaaagtatttattttgccctgtgtcactctaatgacacatatgttagactatttgacatattgtcccagcatttggatgctctgttctatttctttcatgccttttttcctttgtgtttcagtttggataatttctattaacctatctgcaacttcgcagagtctttcctctgttgcagtactgtctgccagtgggcccatttaaggagttctttatgtcgcttgtaatgctttttatttcttgtgttttcatattcccttgtatgaatgtaccatagtttgtttattcatttacccattgaaggatatctgggttattttcagtttttggtgaatatagcatattatatatacttttttttttatttttttttttttgagacggagtctcgccctgtcaccaggctggagtgctgtagtatgatatcagctcgctgcaacctctgactccctggttcaagtgattctcctgcctcagcctcccgagtagctgggattataggcacgcaccaccacacccagctagtttttgtatttttaggagagatgtggtttcaccatgttggccaggatggtctcgatctcctgacctagtgatccgcccacctcagcctcccaaagtgctgggattacaggcgtgagccaccacgcctggcctatgtatacatttatgtagcatattatagtgtataatatagcatattatctttatatatgtttgtatgtatacacacacatacacatgcattcatgctgctacaaacattcatatgctataaatatgtatattacacacacaaacatacatgtatatgctgctgtgaacattcactagaggtttttgtgtgaatgtaagttttcttttctctagggtacataaccagaagtggaattgctgagtcgtataagagtatgtttaaatttataataaactgccaaaccgttttccagaatgaccatactgttttgtattcccaccagtaatgtgtgagaatgtctgttaatatttttgtgaattaatttctgatggtcacctaattttagatgtaatagtcccaggaatttattgttagaataaaattttggaatctttatcctaaatttctctttgtgttcgctttatacttgagaaggagacatttggagttatttttgtttcctgactactttagctgaaattgaaatgggttactgccaacattttatgaaagaaatccatgacatctgttttacgtttagtgaagtttggactttgcttaggaaaaatagataaattacagtcattcttacagctgtgagagccaacacccacacccacacacaaaatttctttctatatggaaaactcttatgtgctgtagtacagtatcctttatgaagatgcaaatggaagaataaaggaattgtgaattttttaaagttcattgtaaaagaacagtcttttcttctgtgtgtatgtgtttaaacttgagtcatcatagcttttaagattattttcatggcttactccctcatcacatgattaagagtttatttttttgctcacttgtttgatggagaacgaaatatcgtgtcactgtggcctttaagcgtgaatgaactaatttctcctctttgtaggcccatactttttggaaaacaatttttttcagatgtttaaataatttttaaaatagttattagactgacttttaacacataatctccagtgttccctataaactacatgcttatgcagctttgtgttaattcagctattattttatgttctttgttttcagtgaatctacttggtttttttgttcactattgcccaggctggtctcaaactcctaggctcaagcagtcctcttgccttagcctcccaaagtgtttatcaggaattagactagcacagagaacatgaaatcatttcctgaagcttgagctgacatctgaaaaatgagtaggtgtgaactaacacctactaacaccctttcttgccttcttttagattatttaacttgttttcctatttttttactgtggcaaaatacttacaaaatctaccaactcaaccatgttaaagagtacacttcaataatagtaaatacattcattatgttgtacaaccatcaccactatctgtcaacataactctttcctcttttaaaacagaaactttggccaggtgtggtggctcacgcctataatcccagcactttgggaggctgaggcgggtggatcatgaggtcaggagttcaaatccagcatggtgaaaccctgtctctactaaaaatacaaaaactagctgggcatggtggcacgtgactgtagtcccagctacttgggaggctgaggcaggagaatcgcttgaacctgggaggcggaggttgtggtgagccgagagcaccactacactccagcctgggtgacagagtgagactatctcaaaaaaaaaaaaaaaaaaccagaaactttgtacccataaacaataactcccacttcctccctctcctcatccaccattctactttttgtctgtgtgattttgattaatactatctaagtattaatctaagtacctcatataagtagaatcatacagtatttgccttttttctttagatggagtctcgctctgtcgcccaggcaggcgtgcagtggtgtgatctctgctcactgtaacctctacctcaccagggattctcctgcctcagcctcccaagtagctgggattacaggcacccgctaccatgcccagctaatttttatatttttagtagagaaggggttttgccatattggccaggctggtcttgaattcctgacctcaggtgatctagccatctcggcctcccaaagtgctgggattacaggcgtgagccactgtgcctggccagtatttgccttttttgactggtttatttcgctgagtgtaatgttgtcaaggttcatccatgtggcataagtcagaatttctttttctttttcttttccttttttttttttttttttaagcaccacacaagctttatttgcaccatctatataagatagtcctggccatgcacagtggctcatacctgcaatcccagcatgttgggaggccaaggtgggcacatcacctgaggtcaggagttagagacaagcctggcaaacatggagaaaccctgtctatactaaaaatacaaaaattagctgagtgtggtggtgggcgcctgtatccccagccactcgggaggctgaggcacgaaaatcgcttgaaccggggaggcggaggttgcagtgaaccaagattgtgccactgcactcctctgggtgacagagcaagacatcatctgaaaaaacaaaaccaaaaccaaaaaaaactaagatagttctgtgaatctgtcccattgagagaagacagggccttttctctcaagcctgttgcttaaagcctgtgtgtgtgtgtgtgtgtgtgtgtgtgtgtgtgtgtgtatacatatatatatatatatatatatatatataatataacggggagtttattaaatattaactcacatgatcacaaggtcccgtaataggccgtctgcaggctgaggagcaaggagagccagcctgagttccaaaactgaaaaacttggaattcagtgttcaaggacaggaagcatccaccacaggagaaaaatgtaggctgggaggctaggccagtctaaccttttcatgtgtttctgcctgctctatattcactggcagctgattagatagtgcccatccagattaagggtgagtctgccttctccagcccactgtctcaaatgttaatctcctttggcaataccctcacagacgcacccaggattaatactttgtatccttcaatccaatctagttgacacttagtattaaccatgacaagtccaccccttgtcaacttgaacccatacacatctcctaagatcatacataatcttcaaataaagacaataatagtcataattgtgcctaacatacaactatccttcataaaaccagaaactcaccaatccccaacccaaatactattacataaagttgataatacttaaatgctgatatgaagtcaataaatcatatgtcacatgataaaggaaaaaggaaataaaatgaaagtactttcttagtgcaagtgtatacatgcacaaacatatttttaacgaaagaagaaggaagtactcatgacaattacagtccccgtttctgcagctggtcatgtggtcatagctggtactgatgactcccttcttttactacccattatgtattccctttgcgttcagcaagcacctcagggggtcgtgtttttttcctgatggagcgacccaaaccttcattcctgaaggatctgggccatttgtagtcctgtttggattgggctgtcgtagtttcccattaaccttacttacagggcttggtaatactaagagaagccgtaatgaatctctgctattccatgcatattcttccttacctccattgtgaagtagtagaatgatttcatcttgatagtctgggtcagtcatcccagccaacactgtaactcccttcttagcctgttgacttaaatgtaggaggagcccaaagtgtccaggtggcaatcttaacttccagtttaatgagatctttgttgtgtctcctggaggcagcgttcctccctctggaactaagacctctaggccagcagaatgtaatgtcgcaggaacaggaagcaaaaattttgccagtagatcactaggggtgttggtgagtggtgccacttcaacttccaccccttgattcctggacccatgaatcttggctatggaagaaacagtaccatatattggatgctgattcagagcatacatggccttctggagagatttgccccagctttgcaaagtattgtcacctagttagcattgtaattgtgacttcaaaaggccattctactgttctgtcaatccagctgcttcaggatgattgggaacatggtaagaccagtgaattccatgagcatgagcccactgctgcacttctttagccgtaaagtgagtgccttcatcagaggcaatgctgtatggcatactgtgatggtggataaggcattctgtgagtccacgatggtagtcttggcagaagcattgcatgcagtataggcaaacccatatccggagtaagtgtctattccagtgaggacaaacctctgccctttccattatggaataggcccaatataatcaacctgccaccaggtagctagctgatcaccccaagaaatggtgccatatcgggggtcagtgttgatccctgctgctggcaaattggccttgtcagacgtggtgagtggaagtccttgttgctgagccatgcgtaacctccatccctgccaccatggccactttactttgttcatgggcccattgagcaatgataggggtggctggggaaagaggctgagtgatggattatcctatcccttgattatccatcctatccacttaaaaatgctaaaggaaggggtctcactctgttgcccaggctggtcttgaactcctggactcttgctatcctcctgccttgtcctcccaaagttctgggattataggcatgagccaccacacatgtccttgcaatttcattttatgccactttaacttaaaaaaagtttaaaagacctgtgtttctttagagctctgtcccctattgggggaacccacccccaatatttcagcataggttctttctattttccataagtgtcggctggctgagaaataaagagaaagagtaaaaagagaggaattttacagctgggccgctgggggtgacgtcacatatcagtaggaccgtgatgcctgcctgagtctcagaccagcaagtttttattaagggtttcaaaaggggagggggtataagaacagggagtaggtacaaagatcacatgcttccaagggcaaaaagcagaactactaataagggtccaacaaagatcacaaggcaaagggcaaaagcagaactactgataagggtccatgttcagcggtgcacatattgtcttgataaacatcttaaacaacagaaaacagggtttgagagcagagaaccggtctggccacaaatttaccagggcggagtttttccccaccctagtaagcctgtgagggtactgcaggagaccagggcgtatctcagtccttatctcaactgcataagacagacattcccagagtggctgtttatagacctccccccaggaatgcattcctttcccagggtattaacattaatattccttgctaggaaaagaatttagcgatatctctcctacttgcatgtctgtttttttttttcttcaagtaattcagccactactttaataccacactctacataaaacaaacacattaaatgccaagctggcagagcctcccagtatgcactacagctgcaaaaataatgacatggaaggtttctttttgaaggctgaattatttgagagaaaatcaaaccatttcttttagaccaatctagctgaacaaataagacttctgtaaagattaaggagtctatagcacaagaaatgcagcatattcatttgctatagcttctactcttcgaattttacactggagacctaaaaaaagaatagcttaagtctaaaatagcccattatgagacatttcatatgcataaattctcaatatttcataaatactgtaactaccaaaaaatcattcatgccttagatttagcaaatggacccttgtggaacattgcatttctcaacctgagcaaacataagttaaatatttataaaacaaaatatactgaaactatttcaattcttgtaggggtagaatagacactttaaaggaatcagcctgaacttaggagtcttctgtgtattaatagtgaatatgcatatgcaaaaactctacagaaatattaaaattgatagagtttctaaattttcatatcatatcagaatatataaacacaggggttagtcaactattttactaactgattgatattgtcagtcagtattgattagtttggtatttaaaaatatatggaagtaaactaaaaataactactgcttagaaaacctcagctgatatgtggaaggattagataattggaacactacagaaaggagcaaaatgaagagtagaattctctgtcactcaactaaccccatctctttctccaaaggcagccactattcaattttacttctgtttccttctggaaagggtgagaaaaagatttattaatgtagcaacaacttgcacatctgtttataggctctctgcaagaagaaaaatatggctctttttgcccgaccccacaggcagtcagaccttatggttgtcttcccctgttccctgaaaatcgctgctattctgttctttttcaaggtgcactgatttcatattgttcaaacacacatgttttacaatcaattagtacagttaacacagttgtcacagtggtcctgaggtgtcgtacatcctcagcttatgaagataacaggattaagagattgaagtaaagacaggcataagaaattataaaagtattatttgggaactgataaatgtccatatcaaaatgaaatcttcacaatttatgttcagagattaaagacaggtgtaagaaattataaaagtattgtttgggaactgataaatgtccatattaaaatgaaatcttcacaatttatgttcagagattaaagacaggtgtaagaaattataaaagtattatttgggaactgataaatgtccattttaaaatgaaatcttcacaatttatgttcctctgccgcagctccagctggtccctccgttcggggtccctgacttcccacaacagtccccagccttttgaattattgatgttacgaacttgtatatttatatgttgtgcaccccaaaatgtaaactaataattctttaaaatgcattagttttttaaattacatagaaaataatgtggagtcacaaatgaaaattacattaatactagcttttagtctaatttttaaaaaatgtattagtctgtaaaatcatgtaggaaacaaaaagtagagtaacaaactattgttgcaaaaatactagcttttataatttcacatgtatttacctttattgagtctttttttttgtttttttaaactttttacttcttttgcctttttccatatgttctaagagtctatttcttaatatgtcttcaggttactgtctagtgtcctttctttcactctacagaattctcttgaccatttcttacagagaaagtttaatgataaccaactccctcaacttttgtttgcctgagaatgtcttaatttctcctgcactttttttattttttgttttatttttcttttctccagccacatccctttgatcatctccctcattattattattattattattattattattattttgagatggaatttcactcttgttgcccaggctggagttcaatggcgcgatctcagctcaccgcaacctctgcctcccgggttcaggtgattctcctgccacggcctcccaagtagctgggattacaggcatgcgccaccactcctggctcattttttttgtatttttattagagatggtgtttctccatgttggttaggcttatctccgattcccgacctcaggtgatcctgccttggcctctgaaagtagtgggattacaggtgtgagccaccgcacccggccactatctccctcactttttaaggacagttttgcagaatagaaaattcttggttgacagatttttttttttcttttagcactttgaatatatgacctcactgacttctggcctccatactttctgatgaaaaatctgctgatcattttattgaacatcccttgtatgtgaccagtctcttttctcttgctgctttcaagatattctctctttgtctttgtcttttgacagcttgattataatgtttctctatgtggatctcttagttcatcttggagttctttgagtctcttggatgttttatattcatatctttcatcaaatttgggatgttttaacactttattctgtctgcttcttcctctctttttttttttttctgagactcctacagtgcagaagttggtagtttgttctcttgacatgtccccatgtcccacagtttccttacattctttttttttctttttaatggagtttccctctgtcacccaggctagagtacagtggcgcaatctcagctcactgcaacctccacctcataggttcaagcaattctcctgcctcagcctcccgagtagctgggattacaggtgcctgctgccacattcagctaattttttgtatttttagtagagatggggtttcaccatgttggtgtggctggtcttgaactcctgacctcaagtgatccacccaccttggcctcccaaagtgctaggattacaggcatgagccaccacgctcagctagtttccttacattctgttcacttttcctcattcttttttctttttatttctcagacttgacaatttctattgtcctatctccaggtttggtgatttttctttctgcctactcaaatctgcctttgaattc

SEQ ID NO: 24310 - DNA, 3679 bp, Homo Sapiens
accgcggtgggcgccggggctcccgggaatctaccttctcctgcggccggcacgcggttcccagggggccagcggcggtcagccgaggtcgagacgcccgcagggtggccttagcggccggtcgtaccacggcagccccgccgatcaggttcctttgggagacttcgacttgttggcgaaatgaaccggagaagaatcccaattgggaattgcggaaaacaggactctagggtagagaaaggttgtagaaccaatagggtttgagacctgatggccaaaagaaaggaagaaaatttttcctctcctaaaaatgccaaaaggccaagacaagaagaattggaggattttgataaagatggtgacgaagacgaatgtaaaggtactactttgactgcagcagaagttggaataattgagagtattcacctaaaaaacttcatgtgtcattcaatgcttggaccttttaagtttggttctaatgtcaactttgttgttggcaacaatggaagtgggaagagtgcagtactcacagctctcatagtcggtcttggtggaagagcagttgctactaatagaggatcctctttaaaaggttttgtgaaagatggacagaactctgcagatatctcaataacattgaggaacagaggagatgatgcctttaaagccagtgtgtatggtaactctatacttatacagcaacacatcagcatagatggaagtcgatcttataaacttaaaagtgcaacaggctccgtggtttccacgaggaaagaagagctgattgcaattcttgatcattttaacatccaggtggataatccagtttctgttttaacacaagaaatgagcaagcagttcttacagtctaaaaatgaaggagacaaatacaaattcttcatgaaagcaacgcaacttgaacagatgaaggaagattattcatacattatggaaacgaaagaaagaacaaaggagcagatacatcaaggagaagagcggcttactgaactaaagcgccagtgtgtagagaaagaggaacgttttcaaagtattgctggtttaagtacaatgaagactaatttagagtccttgaaacatgaaatggcttgggcagtggtcaatgaaattgaaaaacaattgaatgccatcagagataatatcaaaattggagaagatcgtgctgctagacttgacaggaaaatggaagaacagcaggtcagacttaatgaggcagaacaaaagtacaaggatattcaagacaaactagaaaagattagtgaagagacaaatgcacgagcaccagaatgtatggcattgaaagcagatgttgttgctaagaaaagggcctataatgaagctgaggttttatataaccgatccttaaacgaatataaagcattaaagaaagatgatgagcagctttgtaaacgaattgaagagctgaaaaaaagtactgaccaatctttggaacctgaacggttggaaagacaaaaaaaaatatcttggttaaaagagagagtaaaggcctttcaaaatcaagaaaattcagtcaatcaagagatcgaacagtttcagcaagccatagaaaaggacaaagaagaacatggcaaaattaagagagaagaattagatgtgaagcatgcactgagctacaatcagaggcaactgaaagaattgaaagatagtaaaactgatcgactcaaaagatttggccctaatgttccagctcttcttgaagccatagatgatgcttatagacaaggacattttacctataaacctgtaggccctttaggagcttgcattcatcttcgggacccagaacttgctttggctattgaatcttgcttaaaagggcttctgcaggcctattgttgccataatcatgctgatgaaagggtccttcaggcactcatgaaaaggttttatttaccagggacctcacggccaccgataatagtttctgagtttcggaatgagatatatgatgtaagacacagagctgcttatcatccagactttccaacagttctgacagctttagaaatagataatgcggttgtggcaaatagcctaattgacatgagaggcatagagacagtgctactaatcaaaaataattctgtagctcgtgcagtaatgcagtcccaaaagccacccaaaaattgtagagaagcttttactgctgatggtgatcaagtttttgcaggacgttattattcatctgaaaatacaagacctaagttcctaagcagagatgtggattctgaaataagtgacttggagaatgaggttgaaaataagacggcccagatattaaatcttcagcaacatttatctgcccttgaaaaagatattaaacacaatgaggaacttcttaaaaggtgccaactacattataaagaactaaagatgaaaataagaaaaaatatttctgaaattcgggaacttgagaacatagaagaacaccagtctgtagatattgcaactttggaagatgaagctcaggaaaataaaagcaaaatgaaaatggttgaggaacatatggagcaacaaaaagaaaatatggagcatcttaaaagtctgaaaatagaagcagaaaataagtatgatgcaattaaattcaaaattaatcaactatcggagctagcagacccacttaaggatgaattaaaccttgctgattctgaagtggataaccaaaaacgagggaaacgacattatgaagaaaaacaaaaagaacacttggataccttaaataaaaagaaacgagaactggatatgaaagagaaagaactagaggagaaaatgtcacaagcaagacaaatctgcccagagcgtatagaagtagaaaaatctgcatcaattctggacaaagaaattaatcgattaaggcagaagatacaggcagaacatgctagtcatggagatcgagaggaaataatgaggcagtaccaagaagcaagagagacctatcttgatctggatagtaaagtgaggactttaaaaaagtttattaaattactgggagaaatcatggagcacagattcaagacatatcaacaatttagaaggtgtttgactttacgatgcaaattatactttgacaacttactatctcagcgggcctattgtggaaaaatgaattttgaccacaagaatgaaactctaagtatatcagttcagcctggagaaggaaataaagctgctttcaatgacatgagagccttgtctggaggtgaacgttctttctccacagtgtgttttattctttccctgtggtccatcgcagaatctcctttcagatgcctggatgaatttgatgtctacatggatatggttaataggagaattgccatggacttgatactgaagatggcagattcccagcgttttagacagtttatcttgctcacacctcaaagcatgagttcacttccatccagtaaactgataagaattctccgaatgtctgatcctgaaagaggacaaactacattgcctttcagacctgtgactcaagaagaagatgatgaccaaaggtgatttgtaacttaacatgccttgtcctgatgttgaaggatttgtgaagggaaaaaaaattctggactctttgatataataaaatgagactggaggcattctgaaaaaaaaaaaaaaaaaaaaaaaaaaaaaaaaa

SEQ ID NO: 24311 - DNA, 2754 bp, Homo Sapiens
gcaatctcgggaaattggagactgacgcggctgctcctgcatgttatttatttttcctctttccctcccgtggagaccctcctgttggaaagagagctgcagcacgggacagagacaggcaggaagaagcagagaggactcggtgacgcccccaccgagcagcccctggcccactcctccagcaggggccatgagcaccaagcaggaggccaggagagatgagggagaagccaggacgagggggcaggaggcacagcttcgagaccgagcccacctgagccagcagcgccggctcaaacaggccacccagttcctgcacaaggactcggccgacctgctcccgctggacagcctcaagaggctcggcacctccaaggacttgcagccgcgcagtgtgatccaaagacgcctggtggagggaaacccgaattggcttcagggggagcctccccggatgcaggacctgattcatggccaggagagcaggaggaagaccagcaggacagagattccagctcttctggtcaactgcaagtgccaggaccagctgcttagagtggccgttgacacaggcacccaatacaatcggatctctgctggatgtctcagccgcctggggttagagaaaagggtcctaaaagcctcagctggggacctggcccctgggcccccaacccaggtggagcagttggagctacagctggggcaggagactgtggtgtgctcggcacaggtggtggatgctgagagtcctgaattctgcctgggcctgcagactctgctttctctcaagtgctgcatcgacctggagcacggagtgctgcggctgaaagccccgttctcagagctacccttcctgcctttgtaccaagagcctggccagtgactgctgtctcagtcagtccccagagggaaagaccttgccttagaagaagaggcgtgtggggaacgggggctcttgaagccaggtagctggggactatggtgtctgcccttccaatcacctccctgacccctgctgtcccattttccccagctggccgcattcctctctgcttctcagcagctgtcctactccccaggacgagttttcactagagggcccacgatgccaggattctgattcatcttcctcccaagaaaagcaaagccaaatcaagaccacagataggaacctaagcacaatggggtgcctgcttgggctgggtcgaaggctctgctgactgctgtccttgtccatcacccaataccaccccaaacacaactcaacttcccacaccaccatgtctctcaccacaccttctgggcctcattatctcccacaactagaccgccatgcctcaccaacctatgtccctggacctcctggtgtctgcctctcggagtctgtgcacatctgctcacagttgagtgggggaagaaacagccagaattcaatacaacaaagagcgggagttagtataggaatgtccatctcataaggctgagagctattttttcctgtggctgcaaatgtctgaagccagttagtttgattaccctgtgcaaaaccttggacatacttctgctattaacgctataggtatttatccgtttccactggctttttgtacccaccgagcccctgagccttgcgtgtgtgtgtgtggaagagccttgtagagaactgctcctgtgaggcagacaggacagtgaggttgtcaccactcagacttcacctattcagcattctttctgatttctagaactatccacctcattaggccttcttcctatccccatctctggcctcttgagcttaagcttgtattgtcctggaatcagtggctttctaaccccctgccaggctttgccaaagcaaaaagacagaggctttttttttttttttaaagtttggggtctgtcaggagacagaggcttttttgaattcactgtgaagagaagaacccgaaccttaagacgccagatccctgagagtctttctggctggtttgagtctctcaaatcatggattaggagtaaagaaagaggcaggcgcaatggctcatgcctgtaatcccagcactttgggaggctgaggtgggtggatcacttgaggtcaggagtttgagaccagcctgggtaatatggcaaaaccccatctctactaaaaaatacaaaaattagccaggtatggtggtgaacacctgtaatcccagctacttggaaggctgaggcataggagttgcttgaacctgggagatgggggttgtagtgagccaagttcgtgccatcggactccagcctgggtgaaggagtgagaccctgtctccaaaaacaaacaaaaaaggagcagagaaagacagtggtacagctaacctgaacaagggaactgggaccgttgggctgaaacagtcttgagcctggggttgactgggttagagaagaaccgggatgcaaggagctgcctgtgacacctggcctgccctttctcagctgcctcccctgccctttctcagctgcctcccctgccctcagaaggaaaggagagggctcacttatcacttgtgccatagcacctggtctcaaaatcctaaaagctttcctcgccctcactgccttgctccacaaggtccactttcctgggtcttgtgctgtgcctttccttgtctgcctcctgctgcttctgtaactgcagaccccaggcccaattgcaagccctcggctcagctgcttctccattggaataaactcttgtttctctaaaaaaaaaaa

SEQ ID NO: 24312 - DNA, 1645 bp, Homo Sapiens
ggattttccttggtcttaagatgggtagaaatgtgatgcgacacatgtctgatgacttaggaagttatgtttctctttcgtgtgatgacttttcttcacaggaattagagattttcatttgctccttttcctcctcctggcttcaaatgtttgttgcagaggcagtctttaaaaagttgtgtctacagagctctggcagtgtttcttctgagccactctctcttcagaaaatggtatattcctatttaccagccttggggaaaactggtgtgcttgggtctggaaagattcaggtgtcaaagaaaataggacagcggccttgttttgactctcagagaaccttactaatgctgaatggtactaaacaaaaacaagtcgaagggctgccagagttactagacctgaaccttgctaaatgttcctcatcattaaaaaaattgaaaaagaagtcagaaggagaattgtcatgttccaaggagaattgcccctctgtagttaaaaagatgaattttcacaagactaatctaaaaggagaaacagccctgcatagagcttgcataaataaccaagtggagaaattgattcttcttctctctttgccaggaatagacatcaatgttaaagacaatgctggctggacgcctttgcatgaagcctgtaactatggcaacacagtgtgtgtccaggaaattttgcaacgttgtccagaggtagatctgctcactcaagtggacggggtgactcctttgcatgatgcactgtcaaacggacatgtagaaattggcaagctgctactacagcatgggggcccagtgcttttacaacagaggaatgctaagggagaattgcccttggattatgtggtttcacctcaaatcaaagaagaactgtttgctattacaaaaatagaagatacagtggagaactttcatgcacaagcagagaaacattttcattaccagcaacttgaatttggctcctttttacttagtaggatgttgctaaatttttgttcaatttttgatttatcttcagagttcattttagcttccaaagggttaactcatctaaatgaactgcttatggcttgtaaaagtcataaagaaaccaccagtgttcatactgactggttactggatctttatgctggaaatataaagacattgcagaaactcccacacattcttaaggaactgcctgagaatttgaaagtgtgtcctggggtacacactgaggccttgatgataacattggaaatgatgtgtcggtcagtcatggagttttcatgatgatgctagaaagtatggattgactttctaaatctgttcagtttgcattggtacttactgtggacttcatagcttactgacagatagtaatttgatttatttattgacagactttgcagccttgctaaattttaaaagcatttttaaaaaaacttctacaaaactctagtatgggcttctgactttttccagggtgtagaatttgactcaaaagtaaaaataattttgttttagtatattctactttcattaatgtttttttgttctgaaagtgatattatattgtacatgtaaaattaatttaaatattttttcaaataaaaatgtaatgtcctgtaaaaaaaaaaaaaaaaaaa

SEQ ID NO: 24313 - DNA, 2538 bp, Homo Sapiens
cggacgcgtgggctgcggggttcctggtgctgaggacggacgccattggagttcccgagaaggctgagctctcatctccctgggacccgcagcatggctgagggaagcttcagcgtgcaatcggaaagctacagtgttgaagacatggatgagggtagcgacgaagtcggggaggaagagatggttgaaggcaacgactatgaagaattcggtgcgtttggtggctatggcaccctcaccagctttgacatccatatcctcagagccttcggaagcttgggtccaggccttcgcatcttatcgaatgagccctgggaactggaaaaccctgtgctggcccagaccctggtggaggcattgcagctggatccggaaacacttgccaatgagacggccgcccgtgctgccaacgtagcccgcgccgccgcctccaaccgtgcggctcgggccgctgccgccgctgcccgtaccgccttcagtcaggtggtcgctagccaccgggtggccacgccgcaggtctcaggagaggatacccagcccacgacctacgccgccgaggctcaggggcccacccctgagccaccccttgcttctccgcagacctcccagatgttagtcaccagtaagatggctgcccccgaggctccggcaacctccgcacagtcccagacaggctccccggcccaggaggctgctactgagggccctagtagcgcctgtgctttctctcaggctccgtgtgccagggaggtggacgccaaccggcccagcacagccttcctgggccagaatgatgtcttcgatttcactcagccggcaggtgtcagtggcatggccttcccgcgccccaagagacctgccccagcccaagaggctgccacagagggccccagtgctgcctctggtgtgccccagacgggacctggcagggaggtggcagccacccggcccaagaccaccaagtcggggaaggcgctggccaagactcggtgggtggagcctcagaatgttgtggcagcagctgctgccaaggccaagatggccacgagcatccctgagccggagggtgcagctgctgccactgctcagcacagtgctgagccctgggccaggatgggaggcaagaggaccaagaagtccaagcacctggatgatgagtatgagagcagcgaggaggagagagagactcccgcggtcccacccacctggagagcatcacagccctcattgacggtgcgggctcagttggcccctcggcccccgatggccccgaggtcccagataccctcaaggcacgtactgtgcctgcccccccgcaacgtgacccttctgcaggagagggcaaataagttggtgaaatacctgatgattaaggactacaagaagatccccatcaagcgcgcagacatgctgaaggatgtcatcagagaatatgatgaacatttccctgagatcattgaacgagcaacgtacaccctggaaaagaagtttgggatccacctgaaggagatcgacaaggaagaacacctgtatattcttgtctgcacacgggactcctcagctcgcctccttggaaaaaccaaggacactcccaggctgagtctcctcttggtgattctgggcgtcatcttcatgaatggcaaccgtgccagcgaggctgtcctctgggaggcactacgcaagatgggactgcgccctggggtgaggcacccattcctcggcgatctgaggaagctcatcacagatgactttgtgaagcagaagtacctggaatacaagaagatccccaacagcaacccacctgagtatgaattcctctggggcctgcgagcccgccatgagaccagcaagatgagggtcctgagattcatcgcccagaatcagaaccgagacccccgggaatggaaggctcatttcttggaggctgtggatgatgctttcaagacaatggatgtggatatggccgaggaacatgccagggcccagatgagggcccagatgaatatcggggatgaagcgctgattggacggtggagctgggatgacatacaagtcgagctcctgacctgggatgaggacggagattttggcgatgcctgggccaggatcccctttgctttctgggccagataccatcagtacattctgaatagcaaccgtgccaacaggagggccacgtggagagctggcgtcagcagtggcaccaatggaggggccagcaccagcgtcctagatggccccagcaccagctccaccatccggaccagaaatgctgccagagctggcgccagcttcttctcctggatccagcaccgttgacgaactgcagcgatcttactggccaagccagagcgcctcctctcagattccttctcgacacagcaccctaggcggcttcttcctgtcagtcggaggtggcatgcaagatgaagctctctttgctcttcctgctttcattttgtgcttttccttgtgttttcatgttttgggtatcagtgttacattaaagttgcaaaattaaaaaaaaaaaaaaaaaaa

SEQ ID NO: 24314 - DNA, 3473 bp, Homo Sapiens
gatatcccaatctttggactgcatcctggttgcctctactgtggtcacctttgggaagaaatgtcttctgtaaaaagaagtctgaagcaagaaatagttactcagtttcactgttcagctgctgaaggagatattgccaagttaacaggaatactcagtcattctccatctcttctcaatgaaacttctgaaaatggctggactgctttaatgtatgcggcaaggaatgggcacccagagatagtccaatttctgcttgagaaagggtgtgacagatcaattgtcaataaatcaaggcagactgcactggatattgctgtattttggggttataagcatatagctaatttactagctactgctaaaggtgggaagaagccttggttcctaacgaatgaagtggaagaatgtgaaaattattttagcaaaacactactggaccggaaaagtgaaaagaggaataattctgactggctgctagctaaagaaagccatccagccacagtttttattcttttctcagatttaaatcccttggttactctaggtggcaataaagaaagtttccaacagccagaagttaggctttgtcagctgaactacacagatataaaggattatttggcccagcctgagaagatcaccttgatttttcttggagtagaacttgaaataaaagacaaactacttaattatgctggtgaagtcccgagagaggaggaagatggattggttgcctggtttgctctaggtatagatcctattgctgctgaagaattcaagcaaagacatgaaaattgttactttcttcatcctcctatgccagcccttctgcaattgaaagaaaaagaagctggggttgtagctcaagcaagatctgttcttgcctggcacagtcgatacaagttttgcccaacctgtggaaatgcaactaaaattgaagaaggtggctataagagactatgtttaaaagaagactgtcctagtctcaatggcgtccataatacctcatacccaagagttgatccagtagtaatcatgcaagttattcatccagatgggaccaaatgccttttaggcaggcagaaaagatttcccccaggcatgtttacttgccttgctggatttattgagcctggagagacaatagaagatgctgttaggagagaagtagaagaggaaagtggagtcaaagttggccatgttcagtatgttgcttgtcaaccatggccaatgccttcctccttaatgattggttgcttagctctagcagtgtctacagaaattaaagttgacaagaatgaaatagaggatgcccgctggttcactagagaacaggtcctggatgttctgaccaaagggaagcagcaggcattctttgtgccaccaagccgagctattgcacatcaattaatcaaacactggattagaataaatcctaatctctaaatctaagaactaagctttgagtattatttaataatttctaataacactcattcctcaagtgatattagagattattcagtactcttgagagtgtcacaacacaaaatacgatgttgggttttcgaaatattttcaaagtgttctgtcttaatcacaaattcatatttttacacatttttacaatattgcctcagattatgttaaatttgggtcagtcttctctgaactttttctctctcggtttcttttcttccttcacagttttatctcacaaaaccatttttctaataagagacatcatgttggaaagatgttgtagaaatgtgcataaatttcagtgcctcttgtaagcattaaactgatgatgaagaaagttcctgatttgagaaatgaatcaaagtaattttaatgaatttttagcttgtattagcttgagttagctggcattgattttttagtccttttgttacctttaagttgtcaatatatggtttttgttcatctccccattgtagtcccacttgctctttcctgggggttccattgttctagcagtggaggtgttacagtgtcgccactcgtctaatttgaccagtgttaagaattttctaatttaataatttaatagtgatctcaataccacaccctcatggaaggagaaaagcatactattatatctgggacctctcttttagacctaaaattaattaacatatctacttatatgttacttatacctaaagctgttattaagacaaaccaagattctctgcttttgcactgaaattaaacttgaaaggaattctcctcaaaggtcggatattaaataagtcccaggcagatttacatatttaatttaaaacattggctttatttcattttgtgatgagtgatgtatctgtgttaacaaaaaattgtataatcattaccaatactatttattatgctcaaatatatcttggctttgaccttatttcaacacattctaagaagccttgacaaagtaagtatattttagagctgaatcagtaagattctagagaaagcaaaacatagtagttcacaattttgcaacatagaaagtcacattttgaaaggctattttgaaattgatttaatagctattatagtttatgaatatcaaaatttgtataatttgcatctttactaatgtatgctagagctacaagagaccttaaggataatatatgaaattagctttccttattttatagataaggaaaaagaaattgtgaaaggtgaatttacctaattagtgaaagttacataactaattacaacagtctgtactatataatgcagaggacgattctccctgtaaaaggaactagaagctattactaaaaatatatatagacaaaattaaaagaaggaatgataagaataaatttaatttaccaaatattgttaattaaaattttagatacttaacatttatttaacttaaataaaagataactgtcagataaaactttattttactaatgagcagtgattttcttaggaattgatgaaggcttattggtatcaagaatttaaaccaaattaaaactgacagaggacatttagatacataataaaattcgagctacataagtatatggaaaataatgtaccttgattattatgaaatagagcatcttgaaattcagttttactctaaatgtacttttaatacttgcagattctaagattacattgtgaaattccaggttttcataatgttaaaataggaaagtagaatataaagtatcaacaagtgtagttatacattttgttttggatatttaatccttacttgggaaaaaatcagcatctaggtaaattattattttaataagaactcttaaattgccaacctctgagaggtgaaaagctatgtaaatagaaggaatggccagttcaaaagaatagtagaagtgatagtgccgtgaatgtattctactggaaatgaatgtaataatacattaaatttttaaaatcgaaaaaaaaaaaaaaaaaaa

SEQ ID NO: 24315 - DNA, 3821 bp, Homo Sapiens
cggacgcgtgggcggggtcgggcgagaaacagcccggccctgctacagtttggccctggcacagctgttacagtcttttgaagacctccccttgtgcagcatcctgcagcagatacaagaaaaatatgacctgcatcaggtgaagaaggcaatgctgagacctgctctctttgcaaacctgtttggagtgctcgccctctttcagtcaggtcggctggtgaaggaccaggaggcactgatgaagtcggtgaagctgctgcaggccctggcccagtaccaaaaccacttgcaggagcagccccggaaggccctggtggacatcctctccgaggtctcgaaggccacattgcaggagatcctgccggaggtcctcaaagccgacttgaatataatactcagctcccctgaacagctagagctcttcctcctggcccagcagaaggtgccctccaagctcaagaagctggtgggatccgtgaacctattctcagatgagaatgtccccaggctggtgaatgtgctgaagatggccgcctcctctgtgaagaaggaccgcaagctgcccgccattgctctggacctgctccgcctggcgctcaaggaagacaagttcccacggttctggaaggaggtggtggaacaagggctgctgaagatgcagttctggccagccagctacctgtgtttccgcctgctgggcgcggccctgcccctgctgaccaaggagcagctgcacctggtgatgcagggagacgtgatccgccattacggggagcacgtgtgcactgctaagctcccaaagcagttcaagtttgccccagagatggacgattacgtgggcaccttcctagaggggtgccaggatgaccctgagcggcagctggccgtgctagtggccttctcatctgtcaccaaccaaggcctccctgtcacgcctactttctggcgggtcgtgcggttcctgagccctccggccctgcagggctatgtggcctggctgcgggccatgtttctccagccagacctggactccttggttgacttcagcaccaacaaccagaagaaagcccaggattcatcgctccacatgcctgagcgagctgtgttccggctgaggaaatggatcatctttcgattggtgagcattgtggacagcctgcacctggagatggaggaggccttgactgagcaggtggccaggttttgtttgttccactcgttctttgtcacaaagaagcccacatcccagatccctgagacaaagcacccgttctccttccctttggaaaaccaggcccgagaggctgtcagcagtgccttcttcagtctgttgcagaccctcagcacgcagttcaagcaggcaccgggccagacccagggtgggcagccctggacctaccacctggtgcagttcgcagacctcctgttgaatcacagccacaacgtgaccaccgtgacacccttcactgcgcagcagcgccaggcctgggaccggatgctgcagactctgaaggagctggaggcccactccgcagaggccagggctgctgccttccagcaccttctgctcctcgtgggcatccacctcctcaagtcccctgcagagagctgtgacctgctgggtgacatccagacctgcatcaggaaaagtctgggagagaagccccgccggagccgcaccaagaccatcgacccccaggaacccccgtgggtagaggtgctggtggagatcttgctggccctgttggcccagcccagccacctcatgcgccaggtggcccggagcgtgtttggccacatctgctcccacctgaccccgcgtgccctgcagctaattctggatgtgctgaaccccgagaccagtgaggatgagaatgaccgtgtggtggtgacggacgattctgatgagcggcggctgaagggtgcagaggacaagagcgaggaaggtgaggacaacagaagctcagagagtgaagaggagagcgagggggaggagagcgaggaggaggagcgcgacggggacgtggatcagggcttccgggaacagctgatgaccgtgctgcaggctgggaaggcgctgggtggagaggacagtgagaacgaggaggagctgggggatgaggccatgatggccctggaccagagcctcgccagcctctttgccgagcagaagctgcgtatccaggcccggcgagacgagaagaacaagctgcagaaggagaaggctctgcggcgcgacttccagatccgggtgctggacctggtggaggtgctagtgaccaagcagcccgagaatgccctggtcctggagctgctggagccgctgctgagcatcatccggcgcagcctgcgcagcagcagctccaaacaggagcaggaccttctgcacaagacggcgcgcatcttcacgcaccacctgtgccgtgcccggcgctactgccacgacttgggtgagcgcgcaggggccctgcacgcccaggtggagcggttggtgcagcaggctggccgccagcccgactcccccaccgccctctaccacttcaacgcctctctctacctgctccgggtcttgaagggcaacactgctgagggctgcgtgcatgagacacaggagaagcagaaagctggcactgaccccagccacatgcccacgggcccgcaggctgccagctgcttggacttgaacctggtgacccgggtgtactcgacagcactgagctccttcctgaccaagcgcaacagccccctcacagttcccatgttcctcagcctcttctcccggcacccggtgctctgtcagagcctgctccccatcctggtccagcatatcacgggcccggtgcggccccgtcatcaggcctgcctgctgctccagaagaccctgtccatgcgggaggtgaggtcgtgctttgaggaccccgagtggaagcagctgatgggccaggtcctagcaaaggtcaccgagaacttgcgcgtgctgggggaggcgcagaccaaggcgcagcatcagcaggcactgtcctccctggagctgctcaacgttctcttcaggacctgcaaacatgagaagctgaccttggacctgacggtgctcctgggtgtgctgcaggggcaacagcagagcctacagcagggggcacactccaccggctccagccgcctgcacgacctctactggcaggccatgaaaaccctgggagtccagcgccccaagttggagaagaaggatgccaaggagatccccagtgccacccagagccccatcagtaagaagcggaagaaaaagggattcttgccagagacgaagaagcgcaagaaacgcaagtcagaggatggcacgccagcggaggatggcacacctgcagccaccggcgggagccagccccccagcatgggcaggaagaagaggaacaggacaaaggctaaggtcccagcccaggcaaacgggacgccaaccaccaagagtccagcccctggcgcccccacccggagccccagcacccctgccaaatccccaaaactgcagaagaaaaaccagaagccgtcccaggtgaatggagctcccgggtcccccacggaacctgcaggccaaaagcagcatcagaaggctcttcccaaaaagggggtcttgggcaaatcaccactgtccgcgctggcacggaaaaaggcaaggctgtctttggtcatcaggagtcccagcctgcttcagagtggggccaagaagaaagcacagactctgagattcacaatcagcagctctaaaaaataaaggagcagtttggcttccggaaggaagaggaggcaaaaaaaaaaaaaaaaaa

SEQ ID NO: 24316 - DNA, 4748 bp, Homo Sapiens
tgggtccggtcctagggtcacacccaccgcagggtctggcttggtacagttgggtgcatgcagaagtaggtggagctgctgttgcagccttgagagagttttattgtaaaactcttgtaatttatagtaatcggaggggaaaacacctcttccttttaattgctctgaggaccgctgccaaagaaacgcagtagatccgctccctcttgggggcggggagaaagaacgggttgtgtccgccatgttggtgaagtcaagcgaaggcgactagagctccaggagggccagttctgtgggctctagtcggccatattaataaagagaaagggaaggctgaccgtccttcgcctccgcccccacatacacaccccttcttcccactccgctctcacgactaagctctcacgattaaggcacgcctgcctcgattgtccagcctctgccagaagaaagcttagcagccagcgcctcagtagagacctaagggcgctgaatgagtgggaaagggaaatgccgaccaattgcgctgcggcgggctgtgccactacctacaacaagcacattaacatcagcttccacaggtttcctttggatcctaaaagaagaaaagaatgggttcgcctggttaggcgcaaaaattttgtgccaggaaaacacacttttctttgttcaaagcactttgaagcctcctgttttgacctaacaggacaaactcgacgacttaaaatggatgctgttccaaccatttttgatttttgtacccatataaagtctatgaaactcaagtcaaggaatcttttgaagaaaaacaacagttgttctccagctggaccatctaatttaaaatcaaacattagtagtcagcaagtactacttgaacacagctatgcctttaggaatcctatggaggcaaaaaagaggatcattaaactggaaaaagaaatagcaagcttaagaagaaaaatgaaaacttgcctacaaaaggaacgcagagcaactcgaagatggatcaaagccacgtgtttggtaaagaatttagaagcaaatagtgtattacctaaaggtacatcagaacacatgttaccaactgccttaagcagtcttcccttggaagattttaagatccttgaacaagatcaacaagataaaacactgctaagtctaaatctaaaacagaccaagagtaccttcatttaaatttagcttgcacagagcttgatgcctatccttcattcttttcagaagtaaagataattatggcacttatgccaaaattcattatttaataaagttttacttgaagtaacattactgaatttgtgaagacttgattacaaaagaataaaaaacttcatatggaaattttatttgaaaatgagtggaagtgccttacattagaattacggacttaaaaattttgctaataaattgtgtgtttgaaaggtgttttttgtttttgtctttttaaactactgttaaaagaacagcttatgataagtaatatgtttaacttagagaagaattttttcctgtaccaaagttggcatattgcattctaaataagatgctaaataagagttaaccaacattcaacatgaccttaaaactgctgggttttgtattaattaaattataattggcactgtgatttgaaaaatttatagaaaaaaaggtacagggcaagtttttaaattaaaactttctatattttgttttaccagtaaaagtgagcttatcatggcctctctcataagaatgattttaaaataggttgtaaaatattttgaaaatatttgaatgtgaagtaccattgagtcatccaaactaggtaaggcctcaagtactttaaactagtaaaatctagtagctgataatattcacctaagtaagtgttgtaaaataattcagagttcaggacctagcttagataaatgtatactactctttttctcatagtaaaaatcttacatttccaacttcaaaattggtgcttccatatttgttgataaccaaaactcctaaggttttttgttttctttttaactactttccaaatgcatactatacctcagaaatagtgtatcaatatagtgggctttttttttcctcttcataaacccacagtaaaatttaatcacaggaaactacttatatcttcacactttgtattgataacttaaaatggcatcagtttatcttagacatcagcttgctttttatctccttttttagtgagtgaaatagagcaactagcatgcctgtgttcccagctacttgggaggctaaggtgggaagatcaattgaacctaggaggttgaggctatagtgagctgtgattgcacgactgcactccagcctgggcaatggagtgagactcctgtctctaaaacagcaacaacaaaaataaagcaaccatagtgcataagggaaattaaatgttccctatagaaatatgtgtatgtctgtgatagtggtatgcaaatgctaattattttataaaataaaagttcagaactattcttatcattgccacttgaacaattaaagggtttgctttatttcactaatgtttaataggaaccctttgcttcaaacagctttgttgaaatcatgtaaaaatttgttaatagagaatcaagttatttaactcaacttatttaattcaagcttgtgatactaacatacaaaggtagcataaaccaagtcataaattgctgtaatctttcctgtagagtaatagctacttcatgatttttttaaaaatttcatttttttgctatttaggattgcatttgcttggctcctagtaacaattcttttacagtattagcactctctttactaaggaatgcctcccaaggaaatgcaaaggtaggaaaagtctcttagaatgcccatgaggtatttaaaacagatatttatgaaaatctttttgtgaatgttataaatcttgctagttattttatctttatcttaagtattagatgtagttccttggaattgtcattacatatttatttttttctagtgtggtttcaaataactttttgccaacatataatcatcatcaaacattcactgaccatatctattttataactcaaaataagttggacaaataatcattttaataaaaactattttttccaagtataaccactgtcatgtggttcacccttcaccccagatacaaaacacttatttgtgtagcccagttcccatctacagtaataccttgaaaccttaataaattttaaaaatcataaaaataaaatattgtaaaatacaacaaattttggacaaggttacttcatcttcattcattattacctgacagtattaaactactactcaataattttagagtaaacttttctgtgttttccccgtgattttcattgtgctgtcctgacaacatgctccaaactctttgcatcaaattgttttattaacatacatttgtctaccttaaaactagctttattcacagagaaagacctaaaaggagtctattaaaatgctgctttcagtttgatagttttttttttaatcactctgaccataaactaactgaaattataatggattttttttcctctcccggtcacaacacagatcttctgttcatttgttctctgtctactgggcaccaacctctacaaagaaccagccaaaggctaggtacttgatataaaaaggaatattacattattttctgccctcaagttgctctatctcctgaaagaaacaagtaatatttataatacaatatgataaatgctacaaaagaaatagctgtaaagtcctttggtaaatgctgttgaattggaattcagtaagaactataaactgtagacctttttataatcaaatgcttttgtcttgaaacaaaacagattcctccttatattgacttagcaaaggaggtacaaggacattggcatttgacctgaattatggtgttttattgaatgagctataagacaacatttttaccctttaaaatgaacactgaacaaatgtgttaatggtatctttgttaaaaggaaaacatagctataaataaaatactacatcgaaatccagcactggagttcatttgaaatttgatattttgtgtaaagtaacaaacctattaacacagatttttaaaataactcagaatcgtataaagcactttggtacttatttgttctcttttcccttacattctgtgtggtaggtggtattatctctgatttacacatgaagacatccttgttaatgcaatttatttattcattcgggcatttactgtgtgccaacttgcaaaaggaatagaaatgtctgtgatctagatagttctagattgaacatagattttctgccaacaaatcctctctgctgttcacattatcctttgtttaacgtatgaaccaggttactaaaataggataaatcatgtgtcttagaatatgaaaatagtaaggtctttgaggtcacttgatcttctctaagtagactttataatattgtgttttatctcatttctcaatattagaatacgggtagattttaattttgctataatataggaaatggttcatctttgtaccaaaatattgcattcttctgatatttagacagttggaaactttctaaaattgaggattttgtagtgtatactaaataattgcatattcaaaaaaatgtattctgagtatggtgatattaaacatttttccccaaaaaaaaaaaaaaaaaaaaaa

SEQ ID NO: 24317 - DNA, 2905 bp, Homo Sapiens
gggggctccgctccgcaccaccaaccccgggccgcagtcctgacgagcgggtcagggcttgtcgggcggaagcctggcctggagcctggaagggggagacggcccgagcgggagcgggagcggacgcggcctcagtcctgcgcggaatattgaaggatgtttgttccaagatctctaaaaatcaagaggaatgctaatgatgatggcaaaagttgtgtggctaagataattaaaccagacccagaagaccttcagttggacaaaagcagagatgttcccgttgatgctgtagctacagaagcagccacaatagacaggcacatcagcgaatcatgccctttccccagcccaggtggccagttggcagaggttcattcagtaagtcccgagcagggtgcgaaggacagccatccttctgaagagcccgttaagtcattttccaaaacacagcgctgggcagaaccaggggaacccatctgtgttgtctgtggtcgttatggagagtatatctgtgataagacagatgaagatgtgtgtagtttggagtgtaaagcgaaacatcttctacaagttaaggaaaaggaagagaaatcaaaactcagcaatccacagaaggctgattctgagccagagtctccactgaatgcttcctatgtctacaaagagcacccctttattttgaaccttcaggaagaccagattgaaaatcttaaacagcagctgggaattttagttcaagggcaagaagtcaccaggcccattattgactttgaacattgtagtctccctgaggtcttaaatcacaacttgaagaaatcaggctatgaggtgccaactcccattcaaatgcagatgattcctgtgggacttctgggaagagacattctggccagtgcagatactggctcaggaaaaacagctgcttttcttcttcctgttatcatgcgagctttattcgagagcaaaactccatctgcgctcattcttacaccaaccagagagttagccattcagatagagagacaagctaaagaattgatgagtggcctgccacgcatgaaaactgtgcttcttgtagggggcttacccttacccccacagctttatcgtctgcaacaacatgttaaggttatcatagcaacccctgggcgacttctggatataataaagcagagctctgtagaactctgtggtgtaaagattgtggtagtagatgaagctgataccatgttaaagatgggttttcaacaacaagtgcttgacattttggaaaacattcctaatgattgtcagaccattttggtttcagccacaattccaactagcatagaacagctagcaagccagcttctgcataatcctgtgagaattatcactggagaaaagaacctaccttgtgccaatgtacgtcagattattttgtgggtagaagacccagccaaaaagaaaaaattatttgaaattttaaatgataagaaactctttaagcctccagtgttagtatttgtggactgcaaactaggagcagatcttttgagtgaagccgttcagaaaatcacagggctgaaaagcatatctatacattcggagaagtcgcaaatagaaaggaaaaacatattgaagggattacttgaaggagactatgaagttgtagtgagcacaggagtcttgggacgaggcctagacttgatcagtgtcaggctggttgtcaattttgatatgccttcaagtatggatgagtatgtccatcaggaaaatacctacaagtctacttggaggaatccccagcattttcaacaggatgtcagaatgaccttgggctatgttggcaaagcacaatgggaagaagacaaccaattgaaggtcaaactaggccttaaaaaaaattgttcttcctaaatgaaactttatgtaagacccaagcttcctttatgtaaaaataggatactcactaggctttggggctgacaatggtttttaaatcttgctaatcttccctggaatgaaaccagcatgactcaaagagaaaaagagagtctataatattttctaatccctgagttcttttctttatatattaaaaaggattattaggctgggtgtggtggctcacgcctgtaatcccagcactttgggaggccgaggggagtggatcacctgagttcgagaccagcctaaccaacatggagaaaccctgtctctactaaaaatacaaaattagccaggcgtggtggcgcatgcctgtaatcccagctactcaggaggctacagcaggagaattgcttgaactcgggaggcagagccaagatcgcaccactgcactccagcctgggcaacaagagtgaaactctgtctcaaaataatattaatgataataataataataataatagggattacttgcataattgttcttttaaaattattggcagtattgctgaatgtatttagattttttcaccaagtgacaacaactgaattcataaagattcatcaacaagacctgataaaaaaaaatgtaagcatattatagtggatacttccaagactcttggtctaacatgtattagaaagcagaaggagcccaggcacaggggctcccgccggtaatcccaaagctttgggaagccaaggcaggtggatcgcttgagctcaggagttagagaccagcctgggcaacatggtgaaatcccgtcaccacaaaaaaatgcaaaaattaactgggcgtggtggcatgcacctgtagtcccagctactctggaggctgaggtgaggggaatcacctgagccgggggaatcacctgagcccagggaagttgaggctgctgtgagccatggtcatgacactgccctccagcctggacaacagattgagaccctgtctcaaaaaaaaaaaaaaaaaaaa

SEQ ID NO: 24318 - DNA, 3300 bp, Homo Sapiens
ggggagaatctggtggatgctggaccttgctgctgctgctactgctgtttccaggggctgcagagcatggactgttaaatcttgcacttcttctgagtgagctgaattcttgccgccaggatggggaaacagaacagcaagctgcgcccggaggtcatgcaggacttgctggaaagcacagactttacagagcatgagatccaggaatggtataaaggcttcttgagagactgccccagtggacatttgtcaatggaagagtttaagaaaatatatgggaactttttcccttatggggatgcttccaaatttgcagagcatgtcttccgcaccttcgatgcaaatggagatgggacaatagactttagagaattcatcatcgccttgagtgtaacttcgagggggaagctggagcagaagctgaaatgggccttcagcatgtacgacctggacggaaatggctatatcagcaaggcagagatgctagtgatcgtgcaggcaatctataagatggtttcctctgtaatgaaaatgcctgaagatgagtcaaccccagagaaaagaacagaaaagatcttccgccagatggacaccaatagagacggaaaactctccctggaagagttcatccgaggagccaaaagcgacccgtccattgtgcgcctcctgcagtgcgacccgagcagtgccggccagttctgagccctgcgcccaccaatcgaattgtagagctgcttgtgttcccttttgattcttctttttaacaatttttttttttttttgccaaacaatatcaatggtgatgccgtcccctgtgcggtctgatgcgccttcctccgtgacgccttcagcctcttttgtcgtggatgcttcgtgggaatgcccagagccccagtgtgcttgtggagagcatggacagacttcgtggtgttcattgtttgatgatttttaatcgttactattatttctttttattctaatgtctctgttctaaaacgtaagactcgggggttggggcaaaagaagggaaacccatccagtcctgtgattctattgcaagcttcaaggggcttttgtttgaaagacaaaactccccacctgggtctgttgtcacacgtgccgtaggggtgatggatggcaccggatgctggattccccaagaacaagttaccctctggggtgaggctattccagcgagctgggacatttccccatgggggcccactcccctctcttccccagcaggctgtagtttctaagctgtgaacatttcaagataaattaacagaggagaggaaaaagatggctcagctattttttcacaggtttacactagttgagctaatatgcgtgtctttggaaattaaacacaaatggtaacatattccaaaaccagacccatcttgttgcctattgtgataaaataaaaagacggctgtatataacatattgggtaatgcagaccaaattaagtgttttgccttgtttaaatgaaatgcatgtttagtgagcactaatacaatcttattccagaagactgtttttagtagcttattgtgaagtaagacaactataatgaatgtctgtcttgtttggaagtcatatctgtctttgcacaaatgtaccaatcgacaagtatattttatatattccataaaaatacaaagtaaccctgactagggcccaactttaattttgaatgcatttccagagtggccatgcctagagggcagatgcagagcaggtggtagtgggacaggacaattggagcacaggaatgttaacatgtatgacaggggaccagtagggtggtttccctctcaggcccagcagcccattgacagcattagactggcggcatggtgcttttctgagcagatcaatactctgcagactcgaaaaaacatcacatacattcttggaacttcccagtggtttaatctatgtgcatggttagggagccaggcctggaatattcagtttccctgcccctgttaaagaatcagaggttgggcagtcatcaaattcatcataaagacatgggcaagtgtgtctgtggtttccaaggcccccctatggagaatccaaaagtattttccattgccgtgctctttgaatgcagacttctatttccagaagtgacagcacaagtctgagttgctgtttggtctggtgacctcagacacactaatttgaattgaaagctaagagtaaaaatttgctggttacaggcgagtcatactcttgcaagtagttagcaaagggaggcccaaattctcaaggttgttgatggggaacttgccactaagagaaggcagagaggtccctagtgggtatatttgctgccaagccacttgccaaagaagaggaaccacagaaagagagacatcatgaccaggagaaaaatgtgactagacatgctaacctccaggtttttatatatgacttgagtctgctgtaattggcagcagaaatccaaatttgtatggtagaccaaaaagaaccaaatccatagggtgaaattttgagacctagactctgtaaaaataatcctagtcttcctccaggggtcagttcctcacagtggttctgtaccaaaacttgccaaattcctccatggccaagtgttaaaatctgtgtttggaaaatagcgaattaacctaagacacagaaggcagactgggtgaggagacctagcatgccctattggcagtgctcaggagctgcatcccacttttccctgctctgaatcgaagtcctagttccttcctttgattctcctttggtaggtggaatcagttaatgttttgagaaacctgcctgggctctgcccttagtcatgacatctcgctgagccagacccactctgttccttggaacctagagctggagtgaggagtagaggtctccggctattccagaaagaaaagtgagccacatgcaggctgatgaatgccgacacttccagaatgtatagaaatagtccctgtcctggcctgccactgaccctgtctgtattttctcggaggttgtttttctccttctccttcccaggaaggtctttgtatgtcgaatccagtgcactcaagtttggccaagggactccacagcacccagaggactgcatgcctcaaggtttatgtcactcctctgctgggctgttcattgtcattgctgtgttcagggacctttggaaataaaacctgttctgtcccaaataaaaccagcctgtgatgttcaagggactggaataaagtggcttacgacctgaaggattctaaaaaaaaaaaaaaaaaaaaa

SEQ ID NO: 24319 - DNA, 1467 bp, Homo Sapiens
gggggaggcgggggagtcggaggaggtggcggcgctggagctcctcccggggaccagcgacccggggagcgagcacgtcgctccgcaccgctcttcccccagccgctgagccgtcccttctcgccatgtcccagagcaggcaccgcgccgaggccccgccgctggagcgcgaggacagtgggaccttcagtttggggaagatgataacagctaagccagggaaaacaccgattcaggtattacacgaatacggcatgaagaccaagaacatcccagtttatgaatgtgaaagatctgatgtgcaaatacacgtgcccactttcaccttcagagtaaccgttggtgacataacctgcacaggtgaaggtacaagtaagaagctggcgaaacatagagctgcagaggctgccataaacattttgaaagccaatgcaagtatttgctttgcagttcctgaccccttaatgcctgacccttccaagcaaccaaagaaccagcttaatcctattggttcattacaggaattggctattcatcatggctggagacttcctgaatataccctttcccaggagggaggacctgctcataagagagaatatactacaatttgcaggctagagtcatttatggaaactggaaagggggcatcaaaaaagcaagccaaaaggaatgctgctgagaaatttcttgccaaatttagtaatatttctccagagaaccacatttctttaacaaatgtagtaggacattctttaggatgtacttggcattccttgaggaattctcctggtgaaaagatcaacttactgaaaagaagcctcctcagtattccaaatacagattacatccagctgcttagtgaaattgccaaggaacaaggttttaatataacatatttggatatagatgaactgagcgccaatggacaatatcaatgtcttgctgaactgtccaccagccccatcacagtctgtcatggctccggtatctcctgtggcaatgcacaaagtgatgcagctcacaatgctttgcagtatttaaagataatagcagaaagaaagtaaatctggagcaacttaaaaaatctttcagtagcacataaaaagttcccctctggccccttcccaagtaaaacttttaccgtagtgtttatgtcttgtttctaaatctcttcatagattccatcaacactccagatttaattatctcctcatagttgttattaagctctttttaatggcttcaactttgtatcagtatactgtatttataaactttgtaccacaagagagagtgtagcacccattttacagtgccatgcacatcagagaaagaaactgcatgtttgttgttgatgatgaaataaaaatgctagcgacagtctttcttaaaaaaaaaaaaaaaaaaaaaaaaaaaaaaaaaaaaaaaaaaaaaaaaaaaaaaaaaaaaaaaaaaaaaaaaaaa

SEQ ID NO: 24320 - DNA, 2936 bp, Homo Sapiens
gggggcgctcccgagaaagagtgagggcgcgacgcgcaccaacggtggagggatgtttcagcagcccctgagaaggaagaggaggaagctgagggcccgctgagggcgcaggacctgagggagtcctacatccagctcgtccagggtgtgcaggagtggcaggatggttgcatgtaccagggggagtttgggttgaacatgaagcttggatatggcaaattctcttggcccacaggcgagtcataccatgggcagttttaccgggaccactgccatggcctgggtacctacatgtggccagatggctccagtttcacgggcacattttacctcagccaccgagaaggctacggcaccatgtacatgaagacacggcttttccagactcactgccacaacgacattgtcaaccttctcctggactgtggggccgacgtgaacaagtgctcagatgagggtctcacggcactcagcatgtgtttcctcctccactaccccgcccagtccttcaagcccaatgttgctgaacggaccatacctgagccccaggaacctccaaaattcccagttgttccaatcctttcatcatcatttatggacacaaacctggagtctctgtactatgaggtgaacgtgccttcccagggtagctatgagctgaggccaccgccagcaccactgctcctgccacgcgtctcaggcagccacgagggcggccacttccaggacaccgggcagtgtggggggtccatagaccacaggagcagctctctgaagggggactccccgttggtgaagggcagccttggccatgtggaaagcgggcttgaggacgtgttgggagacacagaccggggcagtctgtgcagtgctgagacgaaatttgagtccaacttgtgtgtgtgcgacttctccatcgagctctcgcaggccatgctggagagaagcgcccagtcccacagcttgctgaagatggcctcgccctcaccgtgcaccagcagcttcgacaaagggaccatgcggaggatggcgctgtccatgatcgagtaggtcctggcaccagctggtgggggtggagggccaccatcagggctgaatcctatgctcagcagacccacgtctcttccctgtgccagtgggaggcgttgtgtctggagatgtgtgtctgaatgtgtgagcatccctgtgtcggtggctccatgccatggccagccctgtgggggtgccacggtgacgggctgttttcagtgccaccccagccctgtgggggtgccacggtgacgggctgttttcagtaccacgccagccctgctttggcctttggcactggcctgaagtgtctctgtgggagcctcagcaggggccactgtcaggggtcctatcctagccatagtgcacgtgagtgacacctgcctgggcagctctcacacccctgctgtccaccctgtctataccagtgtgtctcaaaatgtggtctatgcacccccgggggtccaagaccctttcagggagtctgtggggtcaaaatgattctcttgataaccctgagactctgttagccttctccttgtgttgatgttggtggatggtatgaagacagggccgtgcagaccaccagcccccagcgtgcagggcagcagtgcccggcctgcttgggggcatggtattccttcaccacggtgtgcacttgcggggatgcctgtctcactgaagaatgcctttgactaagcagaaaagcaatgacaaattgcattaaatcttgctccttgcgtacacacccctcgaatattctgggtcggaaaacatgggaaggacactgatgtgtgtctgccacagaccaaggcacaccgcttccccgcaagaagcgcttcccccagggccagagtagcaacagaatgcggcatcttcccaacctcctgccccatttttgattggaagaatgaccactggtatgtggctgttcattctcctgaacacagcctgccactttaaggaaaacatatgacactatttgttgctggcgaaatttacattttcaagtgaatagcagaattctggacacttgccaccaccaccaaaaccttcatagcttcccttaactttgagacatgggtgttcagaggtttttcacgtgagatggcgttagcagcgcagttttgtgatactgcctgaagacatgccgacagtgcccagatctcttctattggtgagccagcttttcccacacggccaagttctgatgttgaaccattgccaggtgggtgaagatccattgacagtgagaggtgggcccgtgggcttcagtgcagccaggcgcagaaggctggttcatgagtgtccagctccgccaggtagctagctcaccacccccagcctgggttcatgtagttcaaataggaagaccacgatgatcagaaaggctgctcaaatactccttcgtccagccgcgtacctgggggaggctgaatctccactcacttccaccaaggctgtgcagagcagataggggaatccagcaaaggtggaaaacagtgccatccttctccccaactggttttgttttgtaaaataactttttgtgacagtgttacttattagtaacatgcagtgggtttgttatggttaacaagttggtgagcattattgagaggtgaagccagctgagcttctgggttgggtggggacttggagaacttttgtgtctagctaaaggattgtaaatgcaccaatcaatgctcagtgtctagctaaaggattgtaaatgcaccaatcagcactctgtaaaattgaccaatcagcgttctgtaaaatggaccaatcagtggtctgtaaaatggaccagtcagcaggatgtgggcggggccaaaaaagggaataaaagctggccaccgccaggctccccaccagcctgcagcgaaaaaaaaaaaaaaaaaaaa

SEQ ID NO: 24321 - DNA, 2835 bp, Homo Sapiens
tggggcggacggcgagggagtccagagccttgagcccggtgctcctccctcgcgcagcggtggctctgcggccgctggagtaaacactgcctttgttccctagcgcctcgtctttcgtcgccccgtgccctcacgccgccgggctctggccggcccgccctcggtccttgaaccccatttcggctcgtgccgtgcggatgcagctgccgggcctgggtttgggcattgagcgggaggaggaggaggagcggcggcgcctgggcggcatgcgatggggaactgctgctggacgcagtgcttcggactgcttcgcaaggaagcggggcggctgcagcgagtaggcggcggcggaggatccaagtattttagaacatgctcaagaggtgagcacttgacaatagagtttgagaatctagtagaaagtgatgaaggggagagcccaggaagcagtcataggcctcttactgaggaagaaattgttgacctaagagaaaggcattatgattccattgccgaaaaacaaaaagatcttgatgagaaaattcaaaaagagttagccttacaagaagagaagttaagactagaagaagaagctttatacgctgcacagcgtgaagcagccagggcagcaaagcagcgaaagctcttggagcaagaaaggcagagaattgtgcagcaatatcatccttccaacaatggagaatatcaaagttcaggaccagaagatgacttcgaatcttgtttgagaaatatgaagtcacagtatgaagtttttcgaagtagtagactctcatcagatgctacagttttgacaccaaatacagaaagcagttgtgatttaatgaccaaaactaaatcaactagtggaaatgacgacagcacatccttagatctagagtgggaagatgaagaaggaatgaatagaatgcttccaatgagagaacgttccaaaacagaggaagacattctacgggcagcacttaagtatagcaacaagaagactggaagtaatcctacatcagcctctgatgattccaatgggctggagtgggaaaatgattttgttagtgccgaaatggatgataatggaaattccgagtattctggatttgtaaatcctgtattagaactgtctgattctggcataaggcattctgacacagatcaacagactcgatagggtaaaattgtgtgaccttgtttatcagttatgaccaaatgttaaaaaccaactagaatgtataagtgattgtgcttagcctttttgtaagggagatgtgtaagaaaccatgctgtaaatgcttattttattacaaaggagtagggatgataggatctgaattgatacagaattaagtgcaatttcatcatctgccttctgcttttcaagaccaatttaatggtcctgtcatgttactgattaaatttactttgtcttgtctttatagcatttctgtttactatggtagatttccactttcaatttttaaaattaattttactttgaatgatttatgaagcctatttcattgtctaactatgaaaatattaagacttttttgttaattctcagccgatgtgaaggaagcatgaggagggatcgtcagactcagatttagaatagtgttcccgtttccagcattatttatttctatgacttctttggattttattatctaatagtaagtacagttgatgtgggtagatgactctaagaaatgctgaagtatcggcattacatgtgtttatttacatgtcctagtttgataatgttgattcaatctgaacaaaagataatataaaaataacccttcagagtttggacatttcaagttggtaataataaaaaataatatttaagaagatatatatatatatatatttagttttttccacttcattttacatgccactatattgactttaattgatatacagtattaagtttttaggtgccattatttttaaaaaattctatatttccaatgaacgatgttagattttacacagaacatattctctgcatgatttcagaaaagaaaatctaaaaaggtaatacgggtatttcaaataaaatcctttctggtatgaaaggctccattgattttattaagccttcctttaccttgtagtacaaggtgctttaatgggatagaactaagcatatcaatatctataactgcattttgtgctagacaattactgttcttttctctaaaatgtatatgtcaatttacaaggccagggatagaaaacactccataattgctttccttgattttgctgaggatttggtatgattttagtaagcaaactgttttttggtttttccttaatgtttttaattttttttcctcttgcaacaatgacggtgcatgttcttataaatataggaaggtccagatataaatagtaacctaaagttcttgctgtgcttaaaaaaaaaaatcatgtggctctttcaatatttgaactgctaagcaatgacatctgtagttttatctccttttttatgtcatagaaattaatatgatactttaaatatgtaaatataatacattggtaatgctattatttatatctgtcttaacataatttaagttgtagctgtgtcttggaaatatttttaaggtaatctatattcacattgcctgtgttaatgctttttaaggtttgtatacatcagatgtatatttttggtttggcataagctacgattgtaatttttcttggctttttgttcataaagaattttttgaaggaatggtaacaaatggtaatttacaaatggttgtgaataaacacatttttacacttaaaaaaaaaaaaaaaaaa

SEQ ID NO: 24322 - DNA, 2176 bp, Homo Sapiens
tggggagtattctaattatattttatatttaataaattatttttctatttctttgttatattaagttgcacacttgtttcttttatccagaaagtttagtataataaaaatagttttaagattaactgtgaatgtaaaggaaaagtattattaattatttcaggaaattgcaagacctaacatggctgaaagagaaacagaaacatcaaattctgaaagtaaacaagataaagctgcttcttcaaaagaaaaaaatggatgtaatgcaaattcatttgaaggctcatcaacaacaaaaagtgaagaaagcataacagtttcagataaggaaaatgaaacctgtcttgcagaccaggaaactggctcaaaaaacatcgtcagttgtgattcaaatattggtgcagataaagtggaaaagaaaaaacaaatacaacacgtttgtcaggaaatggagttgaagatgtgccagagttcagaaaacataatcttatctgatcagattaaagatcacaactccagtgaagccagattttcttcaaagaatattaaggatttgcgattagcatcagataatgtaagcattgatcagtttttgagaaaaagacatgaacctgaatctgttagttctgatgttagcgagcaaggcagtattcatttggaacctctgactccatccgaggtacttgagtatgaagccacagagattcttcagaaaggtagtggtgatccttcagccaagactgatgaagtagtgtctgatcaaacagatgacattcctggaggaaataaccctagcacaacagaggcaacagtagacctggaagatgaaaaagaaagaagttgaaattagtcattttaagtttcagtgtaccaacgataagggcatttggaacagtgctatcaggtgagctcagtggtgctgttgtaggttcagaaatggaaatatgtaagggaggtcacacatacactttacctgtatgttcaacctatgttatcaaacaaaccaattcaccaataatagcatgattagtagggattcccaaaaagtttttaaaaacacgaacaggattttaatgataattaaatttgcagtggaaaggtctcatttaatggttttcaaggaaatgggatttggttgctgacatgaattgatgatattagtaatatttataaagcctttcaaacttccatcaatcctaagctaaaaatctttattacctgtatatccttttcagttaactgagaggaagggatttggaaaccatgtacttttggggagtaattgattaaaaacaatggctgattggcattgttaatgaaggctttatttgtgaggatgatgctggtaaatggagcatgcttagagtactaaattgatctaatgagaatttggatgaacataaacttaattttggatttaatataacattccagtcagacgcatgtaaacagaatatttgaatctttgtacctccatacaagtgttagcctgccaggctgtaagcttaccttaattaaactttcagtgaaagtggaattattaagatataaatttatatttgtgctttttgtcagtgtgtaagctgtgtagaaattctttgatgtattagttgtattaatgtaaagtagaaacccattgttgaaactcctgtagctattatgcttttaatattgttttaatgttcttccttagaaataggcccataaaaatggtctggaagccaaaccaaagtatggtataatgtagatattgtaaagcagtaaactgaaaacatgtcctggcatgtattcagccatgtttaagtgacttttctgtaattgtaaaataaaaacttcaaatgggacctaaaacagtgatgtaaaagaactggttttggaaatttagcctaatttatctataagatggctgctaaattgatttttcagttctttttatcatctaaaatataatagatatagaaatgaataatatgaagaacagtagtttgctttgaaatactaataaacttttatttaagatgcttcatttttacttcttaaaacgtgctttggattcttaaattttgtttcactgaatgttcaatgttttaaatggcgattaaaatactctgctgtatatagtagtttttgagtaaatatttgcaataaaaatctgcccccgaaaaaaaaaaaaaaa

SEQ ID NO: 24323 - DNA, 4593 bp, Homo Sapiens
gggggagtttgaagacagaaaggaaaggggagaaacctgcagagagcatcaaaggatggggggtgctataaaagaagcaggggggtcctttgaaagaaatctatcatgcactgaaatgctttctggagaaggtgccgttattttcctcccctcttgctcagatgaaaggagccagcaaggacagtcctgaaatattcctcaggggactttttgtcattgttcctctttcctcttgcacagagctatttgctgacctttccagaggaatctcagtccagctgagaagacagttcttaataaaaacaaaaaaatgcaaaaaccaattcctgctgtttgaatgggaatggtagcttgcttgctgcagttcttttcctgtgacattttggaatgtctgcagaaacttaaaaaaaagaaaaaaaaaaccttaaaaactccctggattaggcaagagaaaaggaagtttttttttgctaaacaggagtaaatgagaggtggtaacttatccctaagccaggacctggatgatcaaaaccttcaaattctagggatcagcacttcaaaaataacaagtaaacaagcatgaggagtggctgttgggtttcgctcagaggcaggttttaaaggaagccaaaaccgggttcagaacttcaggcctgtacgatgcctgaagaccggaattctggggggtgcccggctggtgccttagcctcaactcctttcatccctaaaactacatacagaagaatcaaacggtgttttagttttcggaaaggcatttttggacagaaactggaggatactgttcgttatgagaagagatatgggaaccgtctggctccgatgttggtggagcagtgcgtggactttatccgacaaagggggctgaaagaagagggtctctttcgactgccaggccaggctaatcttgttaaggagctccaagatgcctttgactgtggggagaagccatcatttgacagcaacacagatgtacacacggtggcatcacttcttaagctgtacctccgagaacttccagaaccagttattccttatgcgaagtatgaagattttttgtcatgtgccaaactgctcagcaaggaagaggaagcaggtgttaaggaattagcaaagcaggtgaagagtttgccagtggtaaattacaacctcctcaagtatatttgcagattcttggatgaagtacagtcctactcgggagttaacaaaatgagtgtgcagaacttggcaacggtctttggtcctaatatcctgcgccccaaagtggaagatcctttgactatcatggagggcactgtggtggtccagcagttgatgtcagtgatgattagcaaacatgattgcctctttcccaaagatgcagaactacaaagcaagccccaagatggagtgagcaacaacaatgaaattcagaagaaagccaccatggggctgttacagaacaaggagaacaataacaccaaggacagccctagtaggcagtgctcctgggacaagtctgagtcaccccagagaagcagcatgaacaatggatcccccacagctctatcaggcagcaaaaccaacagcccaaagaacagtgttcacaagctagatgtgtctagaagcccccctctcatggtcaaaaagaacccagcctttaataagggtagtgggatagttaccaatgggtccttcagcagcagtaatgcagaaggtcttgagaaaacccaaaccacccccaatgggagcctacaggccagaaggagctcttcactgaaggtatctggtaccaaaatgggcacgcacagtgtacagaatggaacggtgcgcatgggcattttgaacagcgacacactcgggaaccccacaaatgttcgaaacatgagctggctgccaaatggctatgtgaccctgagggataacaagcagaaagaacaagctggagagttaggccagcacaacagactgtccacctatgataatgtccatcaacagttctccatgatgaaccttgatgacaagcagagcattgacagtgctacctggtccacttcctcctgtgaaatctccctccctgagaactccaactcctgtcgctcttctaccaccacctgcccagagcaagacttttttggggggaactttgaggaccctgttttggatgggcccccgcaggacgacctttcccaccccagggactatgaaagcaaaagtgaccacaggagtgtgggaggtcgaagtagtcgtgccaccagtagcagtgacaacagtgagacatttgtgggcaacagcagcagcaaccacagtgcactgcacagtttagtttccagcctgaaacaggaaatgaccaaacagaagatagagtatgagtccaggataaagagcttagaacagcgaaacttgactttggaaacagaaatgatgagcctccatgatgaactggatcaggagaggaaaaagttcacaatgatagaaataaaaatgcgaaatgccgagcgagcaaaagaagatgccgagaaaagaaatgacatgctacagaaagaaatggagcagtttttttccacgtttggagaactgacagtggaacccaggagaaccgagagaggaaacacaatatggattcagtgagcctgctttcgcctgctgtctctgatggctctggcaaggactccagggattctggtgggatatgacttagaaccaggtggctggtcacctggatgtacagaagtctaactggtgaaggaatatcatttacagacattaaacatccatatctgcaatgtgtaccaaagttatatcatgccccataatgctactgtcaagtgttacaactggatatgtgtatatagagtagtttttcaaaagtaaactaaaaatgagaagcatatttcaagaattattttattgcaagtcttgtatttaaatgttaaatcaatatgttgttgcaatttagcttgctttcaagcttcaccccttgcacttaacataagctatttttggcattgtgttatcatcggcttattttatagatcaatatttttatttcccttttttgctgaggaaatgaagataagcaaaaatataaatatatatataaatatatgagttattaaaaccagaagaatactttgtggctgtgctgtttgtgccaatagactttgtcatgaccaaaaagagaaatgtaaatagttttataaaatacagtcgaatcaccaggaacctttgagctgcttttaaaattcttcccctggcaccactcagttttgcttttgcgaggcgatttgacataggaactttgagactccatgagaaagtccctttctgaggcccactgtctaccttgccagatcctcagtgcgtatcgccaatgcaggatgctccttagaaaagaaaaaatggtaaaggatggcatttaacgattcaggctttgaattactctgtccctctggaccgaatctctttaactgctggatagttttagaggaattctcctgctacttaggtactgggaaacaatgcttgctaaaccatgcccacgtgagcacctgtctcccactcaaacctctcccatctcccaacaactgcactttagaataccagcagtgaaatggtattactgtttccctctgagtgaaactgctagagtatatgtcacgtagtgacatttttttctcactcaggctattgccatctgggattctctccctactacagctggcaaagttggtttgcagcaagaagatagtgggagggggccaggctgcaggagaaggagaaaagtttagaagaaacaaaccattttgcttctaattttgacagtatcactttcctgttaaaacatacaataattttaaaaggtgaatgcctaaagttccaattttagcaaatatgggaacctcagcaatgctaattttctagaaaaacccagggctctttggagctagagttttgggagaacagttcttcacaataaggcaatggttttgagaggccaggcaaataatctttctcaccgtagaacaaaaagttacaaaaggcataatcggaaatagagactacatacttgagtttatggggtttgtgttgtttgaaggttcaatgcttgcatgtgtttatttattttcaagagggaaagtggtctgtactgctttcatccttgccactgtcttgcttttattttttactctcccactgagcaagcgtctgtggtcctatggtatcaaccagtatctttatagcaataatttctttaattcccttttctctctctttccaattatttaaccagttacttccacctggacatacgataggaaattcaaactcaaaatatgaaaattgatcttaataactctcccttcatatcttttcacctatttccagtccttatcatagttgataaaaacctcagactcatccagaaagctatatgatgcactagtaaaaaaaacaaagatatttaaactgcttgggttcaaatggtatacaatttgccagctgttactgaaccttctatgcataactttttttttcctctgtgcaattggaataataaaaatactactcccataaaaaaaaaaaaaaaaaaac

SEQ ID NO: 24324 - DNA, 3522 bp, Homo Sapiens
ggggcgtgttggcgggattctgaacgctgccatggctcagaccgtgtagaatgttacattgtcgctcactctgcccatcacgtgccacatttgcttggggaaggtacgtcagcctgtcatatgcatcaacaaccatgtattttgttcgatttgtattgatttgtggttgaagaataatagccagtgtccagcttgcagagtccccatcactcctgaaaatccttgcaaagaaattataggaggaacaagtgaaagtgaacctatgctaagccatacggtcaggaagcatcttcggaaaactagacttgaattactacacaaagaatatgaggacgaaatagattgtttacagaaagaagtagaagagcttaagagtaaaaatctcagcttggagtcacagatcaaagctattctggatcctttaaccttggtgcagggcaaccaaaatgaagacaaacatctagtcacagataatccaagtataattaacccagaaactgtagcagagtggaagaaaaaactcagaacagctaatgaaatctatgaaaaagtgaaagatgatgtggataagctaaaggaggcaaataaaaaattgaaattggaaaatggtggtctggtgagggagaatttacgactgaaggctgaagttgataacagatcacctcaaaagtttggaaggtttgcagttgctgctcttcagtccaaagtagaacagtatgagcgtgaaaccaatcgcctcaagaaagccctggaacgaagtgataagtatatagaggaactagaatctcaagttgcacagctaaaaaattcaagtgaagagaaagaggctatgaattccatttgccagacagcactttctgcagatggcaaagggagcaaaggcagtgaggaggatgtggtgtcaaagaatcaaggcgatagtgccagaaagcagcctggctcatccacctccagttcttctcacctagcgaagccttccagcagcagactgtgtgacaccagttctgcaaggcaggaaagtaccagcaaagcagaccttaactgttctaagaacaaagacctatatcaagaacaggtagaagtaatgttagatgtgacagatacaagtatggatacttatttggaaagagaatgggggaataaaccaagtgactgtgtaccctacaaagatgaagaactttatgattttccagctccttgtactcctttgtcccttagttgccttcagctcagtactccagaaaatagagagagctctgtggtccaagcaggaggttccaaaaagcactcaaaccatctcagaaaattggtgtttgatgatttttgtgattcttcaaatgtttctaataaagattcttcagaagatgatataagtagaagtgaaaatgagaagaaatcagaatgtttttcttccacaaagacaggattttgggactgttgttccacaagctatgcccaaaacttagattttgaaagttcagaggggaacacgatagcaaattctgttggagaaatatcttcaaaattgagtgagaaatcaggcttatgtttatccaaaaggttgaattctattcgctcttttgaaatgaaccggacaagaacatccagtgaagcatcgatggatgctgcttaccttgacaaaatctctgagttggattcaatgatgtcagagtcagacaacagcaagagcccttgtaataacggttttaagtcactggatttggatgggttatcaaagtcatctcaaggcagtgaatttcttgaggaacctgataagttggaagaaaaaactgagctaaacctttccaaaggttctctaactaatgatcagttagaaaatggaagtgaatggaaacccacttcttttttttctcctctctccatctgaccaagaaatgaatgaagatttttcactccattccagttcttgtccagtaactaatgaaatcaaacccccaagctgcttgtttcagacagagttttcccagggcattttgttaagcagttcacatcgactattggaagatcaaagatttgggtcatctttgtttaagatgtcctcagagatgcacagtcttcataaccaccttcagtctccttggtctacttcctttgtgcctgaaaagaggaataaaaatgtgaatcaatcaacaaaaagaaaaatccagagcagcctttccagtgccagcccatcaaaagcaactaaaagttgactcattagaaaggtgtcatttgtggttttgtcctgagagaaatagaaaagttgttaaagttaccttttttcctcataaaagttctatacaaattggaattgataatctttagtcaagtatcaagtcaggatggtggattaacctgtacccagaatacttattgttcattttgaaaagactttgttcttttcatttttatttgggagtctttgtgaccagagaagttagggaggaggttatttttgtgttttggggttggttggttggttggttttgtttttggttttgtttttttactgaatttgatatgtatctcggttggatatacattgtttttttaaaaaatgttatttaactgttagatacagtggcctgttgataagccccacttgtcttcagaacttggatttcttaaataaaacttttagtgttgtctatacactgctcaataagacacttgagtttaagcttttcccagggtggaaattattttacctgtccctttttatttatgtttagtgatggcctagtttttctgcagggccatgatggagaaatagcactctagccttagtccaatattgatttactttctttttttaggttttatgtatatgtttgcattttttagcattgtgttttgtccagttttgtgaaaatgttctgctagtatgaaagaaaacattttctatatgaagacatttgttttatgttaggtagcttacattttctcctctgcgtgtgtgtgtatgtgtgtaaaatcagaaatttagcatactatggaaagaaggcatggagcacttgggtttagaggaacctaaaacatcatagcttcattgttccagatgtaacaggtttgaaagagctcatcgccaagttcttgatccacttgcattccaggggagttctcttttgagtagtatgtttcttgtttgcatgttcctgttctttgtggaaactatgcatggtagcatttttgcttgctgtgttttccatacttaagaaaaagaggtttcagttggctgatagaatatcttttatgtaggacaaaacttttctgtgaagagtgttgagggggtgaagataggtaagaggtaagcacaatttttaatttaggctctgaaaaagtgtattgttctaaacgtatttggtatgcctatataggtctttaaaaatgggtttgtatgctgtttaatgtgcactgaacattttacattaatattgtactgttttacattaatactgcatgcttttctatgtgaattgaataaagaatgtcataagcactggaaaaaaaaaaaaaaaaaaa

SEQ ID NO: 24325 - DNA, 3088 bp, Homo Sapiens
cgcgccagggaggttgtcgggaggggccggcgaataaaacgagcggcgaaagaaccgaaaaaaggctcgacgctaccgtgtatgaggaactttgatccttgcgggccaccattccggaagtagaatttagaggaagaaaataccggagttgcagggtataggtaaatttctcaaggttataggttggggttcttagaactttttgtggtgtgtgttggcctagagcgactcagaagcgttagtgacttcacctaaaaaagctaacctctctgctgagcgcgaccggtatgcggcgcaggatgagcctcagggcttctgttaagagtctgtctgagaaagccggtctgcgctgttcctcggtggcgaccttaattatgagatgagctaatgctttactgacttaaccatggcgcagcgggcagtgtggctcataagccacgaaccgggaactccactttgtggcaccgtgagattctccagacggtatccaactgttgaaaaacgagccagagtcttcaatggagcaagttatgtgcctgttcctgaagatggtccctttcttaaagcactgctctttgaacttagattattggatgatgataaagacttcgttgagagtcgtgatagctgttcacgcatcaataaaacatccatttatggactcctgataggaggtgaagaactctggccagttgttgcttttctgaagaatgacatgatatatgcttgtgttccactagttgaacaaactctgtcccctcgtccgccactaattagtgtcagtggagtttcacaaggctttgaatttctttttgggatacaggattttctttattcaggtcaaaaaaatgactctgagctgaatacaaaattgagccagttgcctgacttgcttctgcaggcttgtccatttggtactttattagatgccaacttacagaattcattagataataccaattttgcatctgtgactcagccacagaaacagccagcttggaaaactgggacgtacaaaggaaaaccacaagtttctatttctatcactgaaaaggtaaaatccatgcaatatgataaacagggtatagcagatacatggcaagttgttggaacagtgacttgcaagtgtgatttggaaggaatcatgccaaatgttaccatcagcttgagtctccccaccaatggatctccacttcaggatattctagttcacccttgtgtaacttctcttgactctgcaattctgacttctagtagtattgatgcaatggatgactctgcatttagtgggccttacaaatttccattcactccacctttagagtcattcaacttatgcttctacacttcccaggtccctgccccaccaattttgggtttttatcaaatgaaggaggaagaagtacaactaagaataaccattaatttaaaacttcatgaaagtgtgaaaaataattttgaattctgtgaagcccatatacctttttacaatagaggtccaattacacatttggaatacaaaactagttttggccagcttgaagtatttcgagagaaaagcttattgatctggattattggccagaagttcccaaaatcaatggaaattagtctttctggaactgtaacttttggagccaagagccatgagaagcagccatttgacccaatttgtactggagaaacagcatatttaaagcttcattttaggatcttagattacacacttactggatgttatgcagatcagcattcagttcaagtttttgcatcaggaaaaccaaaaataagtgcacaccggaaactaatttcttctgattattacatctggaattctaaagcccctgctccagtaacatatggatcattattattgtaatagtctcatgtttaaatgggattatataatgataacagtttaaagaaaatcataatcttatatttttaatgtggatgcatataacctgtgagtgaaaaatcactgaatgatttaattgtaaaagtagtcttatgtggtgtttgtagtctgatagagcttgaaaggacattttaaaagctaatgtctccaattttgtcaaccttcgattttatgccagtataattcagaacatagaaaagtaatgattcacttgggctcattttagactggtcctgggtcaccctgccacacttgtttcctagtgtttctgtggcagacattgctaatcaattacagcccttttctgtactgagccttggataaagggtcaggctcctttttagttcagagattcaggcagccactcccagtgggttgtagataatgtgcaagataaaaactattttctcttccaaatctaagtactaagctcctagtataaggtgttgttacagaataccagagaccatgttagagacaactacatctcttcaaaaaacagccaacagagacaaaggaaaagtgtttaaatagtaagctgttcttcttaatcagaactatcctattgactaataaataatctgcataattctacttaaggtgtgtaatctctgttctagagttagtttttaagtaagcttgttaatctgccactttgacattttgcttaggatgtcagtagccatattaagatgtgtagaataccttcagaagatgatcatagtgttttgtaatcatttaatgtctgcagccaaatttttaaaggtaatttagacctaatactgctcttgctgtgtcttattaagttaaaattaatgaatgaattctggtaaaaattcaaaaggcactctgtgagtagagagtatcatttaagcttattttagtcacatgtagtatatatctccttaaagctgtcactctcactttcttaccattctcttgatttcttcagaaaccatctagtcatcatctttatactctacctgcttctgcaattatatatcatattatgttttcagagcagttcattgtcaagttggactttaagtgaccattcaagaaaagatgaaatctcacgaacctcaaaacttcattcatgtctttttacaaatgagaaaaaaaaatgcattaaagattaatactcaatttgaaaaaaaaaaaaaaaaaaaa

SEQ ID NO: 24326 - DNA, 1513 bp, Homo Sapiens
ggggtactcggcggcggcggagcgggcggcagagcagggcggcggcgactcgcagggtaccaccatcttaaggacagaaaagctacaggactctaggaggccaccgtcctgatttgggaagtccaacttactttggccagacagcagctaagctggttcatcccatcagcctggattggtgaaactgaatcacaggagatatttccaggtttgctgggatgggaaacctgctcaaagtccttaccagggaaattgaaaactatccacactttttcctggattttgaaaatgctcagcctacagaaggagagagagaaatctggaaccagatcagcgccgtccttcaggattctgagagcatccttgcagacctgcaggcttacaaaggcgcaggcccagagatccgagatgcaattcaaaatcccaatgacattcagcttcaagaaaaagcttggaatgcggtgtgccctcttgttgtgaggctaaagagattttacgagttttccattagactagaaaaagctcttcagagtttattggaatctctgacttgtccaccctacacaccaacccaacacctggaaagggaacaggccctggcaaaggagtttgccgaaattttacattttacccttcgattcgatgagctgaagatgaggaacccggctattcagaatgacttcagctactacagaagaacaatcagtcgcaaccgcatcaacaacatgcacctagacattgagaatgaagtcaataatgagatggccaatcgaatgtccctcttctatgcagaagccacgccaatgctgaaaacccttagcaatgccacaatgcactttgtctctgaaaacaaaactctgccaatagagaacaccacagactgcctcagcacaatgacaagtgtctgtaaagtcatgctggaaactccggagtacagaagtaggtttacgagtgaagagaccctgatgttctgcatgagggtgatggtgggagtcatcatcctctatgaccatgtccaccctgtgggagctttctgcaagacatccaagatcgatatgaaaggctgcataaaagttttgaaggagcaggccccagacagtgtggaggggctgctaaatgccctcaggttcactacaaagcacttgaacgatgaatcaacttccaaacagattcgagcaatgcttcagtagagctctgctcaaagaagaggatctatgtgctgacctcagaagatgtatatgtttacataatttaatacagattgatgttaatacttgtgtatttacataaccgtttccttcttgtcactgaaatatatggaccttaatttgtatcctgactgactcaacccagcagagcataaattgacttgagagccttacctttgatgtctgaaatgaaacccccttctccaaaggcaaaattcggagactttgatctttgctactggagtcctttaacaacatctataacgataaaaaattcctaattgtcaaaaaaaaaaaaaaaaaaa

SEQ ID NO: 24327 - DNA, 5641 bp, Homo Sapiens
cagccctcggcagacggccaatggcggcggtgctcggggcgctcggggcgacgcggcgcttgttggcggcgctgcgaggccagagcctagggctagcggccatgtcatcaggtactcacaggttgattgcagaggagaggaaccaagctatacttgaccttaaagcagcaggatggtcggaattaagtgagagagatgccatctacaaagaattctccttccacaattttaatcaggcatttggctttatgtcccgagttgccctacaagcagagaagatgaatcatcacccagaatggttcaatgtatacaacaaggtccagataactctcacctcacatgactgtggtgaactgaccaaaaaagatgtgaagctggccaagtttattgaaaaagcagctgcttctgtgtgatttcttccaaaatacataagtctgagaggctaaacttgatggctgtgttaacatatgtcacgtgtagcacagtggagaaagcaggatatggctcataatgacagtggtgaagacctgcgaatgaagttgctagttaacacctacattagggtttgacataggtctatgttatgggtcgctgcatctgctggaactcacagactttactatagagaatcaaagatcccgtatccgaagtctatggaaatgctcatggtggtaaattccaacagaatgaaacaccaaacttgcttaaagtaactcacgtttcaatttgaaagagatattgtcaaaattggaggcccccaggttcctgtctgttccaaatctttgcatgatgacagtggtttctctgatgtggtaagctttggctttcttctgttttctttctaaaagatcactggagtagagaggagttaaacagacatgacctttgacctcttgcatgacctccacagatagcaaaccgggccgacacatggttgacgatgtccttttctacaatgaagttaatgaaagttctgaaaatagtgattactttctgacattgataggatttaggaaacctctggataaatagcttaagcatggctgtttatgtttttgctatagacaaaaagcagcagcatgtacattgtatttggacacaagcctgcctcggttaatatattgaactattggaccactagggttagtagggagcggtctgtacactttctgattcagcattcagaaacattctaggtggactctgtagctttcagttttgtaaagttatcggaaaaacatcgggagggtttggccatcatatgtgagctttgtgtttcaatgccagttactcaggattagtaaattaatgactgtccagaggacttcagggtcaccaagctgctgcacctgccattggctgactctccccggctatctgtggctgagatggtgctgcttaggtcacgcagagcatgagctgctgctgaaagggcacaggagatggcccttgggcttctcatcccaggatgcctgccctgcccaccaatccatgagaagatatgtatgatttcagtaggccctggatcagcttgtcacctctggtttcctgtttgctttccactcactcagctggagtttcatttccagactaaagtcttcatcattggcttcagaaacagcattcatctgtggctgtgctgatgtagtacaccaagaacaactgggctcttctctgtcactttcagtgggctaccttccctcacctctccaagcagcatgaaagaattctttacatttttaatctcttttttgtttttccctgaaagtatgctttggtgcttaaagagagaagtcacaaaagtatactactgagtttcctggagatgaaatcctgttgtccctagctatgtgaatgagcacagggatccctgatgccattattttgtatattcatacggcacacacttactgagggccttctgtgtgccctaggggattgagcacagtgacatatcagggcaggtagaaacagatggagagctgatgcgggctgtcttagagcagctgccccaggaggcccctgtggatggatgttgggcaggagccctgagacgttaggggcatataactaaaggacatagcaggagttataggaggagctgatccctgagggaaacaatgaagacggagaagatggggctaaagtttgaattgtggggacattaatcacggtgattcttaaaactttgctgttgatgattttaaatggagaaaatgagtacgtaagatgttatttcccagttcagtatataggttgcccacaaagtattttcctaccatgaatggtcatatatacttgttgtagaataccagggacagcagagatggtggggtagttacttccttttcttacagcccaagaactttggtgtccaggagattgaccaatttagccactgagcatttaatacaacacagggctacccagatcccactgtcctgatttgccctgaaagccaaaggagtcaggagaaggtgagtggggtgaatatattaatcctgagagttgaacagagcaaaaatccctattacttttgtacttaaaacatctctgccacatgtgctcactctttatattctgtttaggtggtttatatgtgcacatcccatcctatgcctgcagttagccaactcagggtttatattgcctcctttctttttttcttttttttttttttttttaagagatggggtctcgttctgtcatgcagactggagtgcagtggtgtgatcacagctcattgtaacctccaacgcctggactgaagtgatcctcctgccttggcctctctggtagctgggactacaggtgcatgccaccacacccacctaattttttttatttttattttttgtagagacagtctcactatcttgctcgggctggtcctgaactcctgggctcaagttatcttgctgcctcagcctcccatgggtaatctttatttccttttttttttttttttggagatggagtttcgctcttgtcgcccaggctggagtgcaatggcacgatcttggctcactgcagtctccacctcctgggttcaggtgattctccatcctcggcctactgagtagctgagattacaggcaactgccaccatgcgcggctaatttgtgtatttttttttagtaagagatggggtttcgccatgttggccggactggtcttagactcctgacctcaagcgacctgcctgccttggcctcccaaagtgctgggattacaggcatgagccgctatgcctcgtcgctgatttttatttcttattttttttttagagatgggggtctcactatgctgctcaggctgatctcaaactcctggcctcaagtgatcctcccaccttagcctcccaagttgctgggattataagtgtgagccactatccctacctcactattaccttctttgcttctcttgttttcttttgttctaagtcaaacccatcacaatcttttcttgtccttccaggtgttttccagtgctgtgccctggatgtgctctctttctcttagagcccagagaacttgcttttcccccttatatatgacccttaactttttctaacacattattaagggcctgtgtctatcagctgggggcacttcttgaagggagggcctttgtgtggtctgtttctagtgacttccagctttaacccagagcctcatgattgctgggtgcccatagcctttttgctgaatggaggcactcagtctccttgggaagagagaatccatgatagacccacttgggagctccccacttcaggggcctacacactggtaatgcaacagaatgcccaagagtgacctcataaagcaaggattcccttcgtggccccttctctgctgcctctcagaatccagacgctaaggaaaatccctaagcagagattttctgttggatgctaaaagcaaggaataaaagttgaaaatttggaaaatgtctcaacaccgtcaccagcgccactcgagagtcatttctagttcaccagttgacactacatcggtgggattttgcccaacattcaagaaatttaagtaaatattatctatctccattgcctgttaagaaatgtgctagtagaagtgtgagggcagggtgtcagtgttctctcagcctcttccctcagatactcgtctgcttaccaaaataagttgcatgtccttgacaatctggtttctatgattggtgaggctggcatgctattacctttatgtgccctgtagacttgaatgaccagtttgaccagtttgactgttagataatcagaaggcttttctctttttttataatagaccccatctcaaatcagataatgaaaattacatatcttgatatattagaaaagtatatacattctggctgggcacggtggctcacgcctgtaatccctgcactttgagaggctggggcggatcacttgaggtcaggagtttgagaccggcctggccagcgtggcgaaaccccatctctactaaaaatacacagattagcccggagtgatggtgtgcacctgttgtcccagctactcaggatgctgaggcaggagaatccctttaacctggggggcgaaggttgcagtgagccaggattgcaccactgcactccagcctgggtgacggaacgggactctgtctcagaaaaaaaaaaaaagaagaggaaaaagaaaaatatatattctatatttttttaacttatgagaatgtgttcatttcatttgtaacatataatgggaaacagtaatacgtactctgagaaaaattgcaaagcacagataaatggaaataaacaggaaaaagaatcacctataacctcaccatccatagacagacactgttaaaattttggcatatttcctgctgattttttctactgctgatttttgcacaggtgagataattttgaacagagaattttgtatctttggtttttgtgtttcgctgcacacaaaaacaaaagatataaaaatggatcataaacatttttctaaatcctgaaaagtgcatagacatattttagtgcctgtatttcacaagatggacataccataatttacttacacagtcctttttgttagatgtttaagttgttttcaagcttctcagtgctggaaaaaatactgagatagacatgtttagttgaagttatttcatttcaggttatattatcttgggtcagagaatgaatggttctcaggcttttcaaaagagctggtcagtttttatgcctctggcagtttttgagagtgctcaatcatactacactgttgccagcattagatcttatcacatttaagtcattgctaattttataaacaaaaacaatggttttactttgcatctccctgattggtgttgctgtagaacatatttggagaagtttgtttgtctttggtgtttattccatgaatagattgtgtgcccattttctcttggggtattcagttttttattactgatgtgagcatgtgtatgggtgattatttgatgattatcagttttgcttagtagactggcaatatttagtcttgctgtcactgtgttcccagtgccaactagattgcttgatatgtagttgccactcaataaagatttgttgagtcaatgaaaaaaaaaaaaaaaaaaaa

SEQ ID NO: 24328 - DNA, 3433 bp, Homo Sapiens
ggcgcggctggtgcgctcgagaagcgatggcggcggcctgaactcacctaacaccgcagcagcaaccgggcccggccaggttcggcgttccgtgagtgaacgatttagaaatctggactggccagtgacctctgggcttgccattccagcctggtataacctctggctccatgggcagctactggctcctacagaccggatgaagcagactggagacacaagtggagaaaacctccagctggcaaatcctcagagtgtaggcctctggctgccagtcctgcccagcctgcctcatggagaggatgaattggctgagcagactggcctcccggggccctgggcaccgtatacctcaaggggccaatctccaaaccccagtcatggctgatcccgagacctgcctcatggtcttcaagaatcactggtcccaggtggtgcgaatcctggagcggcaaggccctcgggcagctcctgggggtgcagacgatctcagtgctgtgcgcaaccacacttaccagatgttgacactgctggcagaggaccgtgcagttccctcggcccccacaggccctgggtccctgctggagtttgctctgcacgaggatctgctgacccgtgtgttgacatggcagctgcaatgggatgagcttggggatggggtcgaggaacggcgggctgagcaactgaaactatttgaagtgctagtgagcgaagctcgccagccactgttgcggcatggtccagttcgtgaggctctgctcaccctgctggatgcctgtggccgccctgtgcccagtagcccagcactggatgaaggcttggtgctacttctcagccagctgtgtgtttgtgtggcccaggagccttcattgctcgagttcttcctgcagccacctcctgagcctggagccgctccccgtcttcttctcttttctcgccttgtcccttttgtgcatcgagagggcaccctgggccagcaggcccgtgatgccctacttcttctcatggctttgtcagctgggagccccactgtgggccgctacatcgcggatcactcttacttctgcccggtgctggccacagggctcagtgccctgtactcatcactgcctcgaaagattgaggttccaggggatgattggcactgtctgcgacgggaagactggctgggagtgccagcccttgcactcttcatgagttccctggagttctgcaatgcagtaattcaggtggctcaccccctggtgcagaagcagttggttgattatatccataatgggttcctggtgcctgtcatgggtcctgccttgcacaagacctctgtggaggagatgatcgccagtaccgcctacctggaacttttcctacggagtatctcagagcctgctttgctccgtaccttcctgcgattcctgttgttgcaccggcatgacacccacaccatcctcgacaccctcgttgctcgtattggcagtaactcccggctctgcatggtctctctgagtctcttcaggaccctcctgaacctcagctgtgaggatgtcctgctgcagctggttctcaggtatcttgttccatgtaaccacgttatgctgagccagaagccggctgttcgtgatgtggacctatatggacgagcagctgacaagtttctctccctaatcccacgctgttgtcggcaccacgcccccagcccacctcgtccagagcatgcctcatgggcacgaggtgggcctagcagagagacagggagaagggaggacatcacgggtcctggaagcccaagtgtggactcctcttctgtgacgacagtaccccggccctccacaccatctcgtctggttctcttcctgcggcagcagagcctgggtggctctgagtctccaggcccagccccttgctcaccagggctttctgcatcccccgcctccagccctggccgacggcctacccctgcagaggagcctggagagctggaagacaattacctggagtatctgcgtgaggcacgtcgtggtgtggaccgctgtgtccgagcctgccgtacctggtctgccccctatgatggcgagcggccctctcctgagcccagtccttttggctcccggactaagaaacgcagcctactgcctgaggaggacaggaacaacgtgggggaaggggaggaggaagagctggggaggagggggcgggctgggggtgcaggggagggccctggtcacctgccccctccccagctcaatggagtgccaggatcatggcctgagggggccaagaaggttcgtctggtgccaaaggagggagctggggaactgctagagggcatctccgagggcatggcaggactagagggctttgggcaggagctccgggagctagaggtggcattgagcaatgggggaactggctcagagtcccccttagaacctccactgccccttgaggaggaggaggcctacgagagcttcacctgtccccctgagccccctggccccttcctcagcagccctttgcggactctcaaccagctgccaagccagcccttcactggccccttcatggctgtgctctttgccaaactcgagaacatgctgcagaactccgtctatgtcaacttcctgctgacggggctggtggcccagctggcctgtcacccccagcccctgctccgctctttcctgctcaacaccaacatggtcttccagcccagtgtcaagtccctgctgcaggtgctgggctctgtgaagaataagattgagaactttgcggcttcccaggaggacttcccagcactgctgtccaaagccaagaagtacctcattgcccgtggcaagttggactgggctgagggccctgcagcaggacctgccccacgccgttctgatcccctagtgaagagccggaggccatccttgggggagttactcctgcggcatgcacacagtccaaccagggcccggcaggcggcacaattggtccttcagcctgggcgagacggagcaggacttggcctaagtgggggctcccctggggcttcaactccagttctactcacccggggcggggcccctgaacgccaaggtgaggctcttcgagtcaagaatgctgtctactgtgcagtcattttccctgaatttctcaaggagttggctgccatctcccaggctcatgccgtcacctcgcctttcttgttggagacttcagaggaaggatctggccctctcatctcaggctgtgggcccctcaatccttaactttcttccatggacaatcagggccatgggtggcccgggctggggctagggcacaggctcctttttatgtttggaggcagtgacaaaaggactttttaatttatttcagatgaatgttttatggagaacttgttgcaatatgtataaaagggaaatctccaaaaaaaaaaaaaaaaaaa

SEQ ID NO: 24329 - DNA, 2884 bp, Homo Sapiens
cggaaatggagggggtcgctttcctcaccttcctcgctgcgcgggcggcggttggtaaccggtcagaccagcccgagagggacctggtgcctgtacccaggcttctgtcgctctgtcgcctgcgctatgccctgctgtagtcacaggagctgtagagaggaccccggtacatctgaaagccgggaaatggacccagtggcctttgaggatgtggctgtgaacttcacccaggaagagtggacattgctggatatttcccagaagaatctcttcagggaagtgatgctggaaactttcaggaacctgacctctataggaaaaaaatggagtgaccagaacattgaatatgagtaccaaaaccccagaagaagcttcaggagtctcatagaagagaaagtcaatgaaattaaagaagacagtcattgtggagaaacttttacccaggttccagatgacagactgaacttccaggagaagaaagcttctcctgaagtaaaatcatgtgacagctttgtgtgtgcagaagttggcataggtaactcatcttttaatatgagcatcagaggtgacactggacacaaggcatatgagtatcaggaatatggaccaaagccatataagtgtcaacaacctaaaaataagaaagccttcaggtatcgcccatccattagaacacaagaaagggatcacactggagagaaaccctatgcttgtaaagtctgtggaaaaacctttattttccattcaagcattcgaagacacatggtaatgcacagtggggatggaacttataaatgtaaattttgtgggaaagccttccattctttcagtttatatcttatccatgaaagaactcacactggagagaaaccatatgaatgtaaacaatgtggtaaatcctttacttattctgctacccttcaaatacatgaaagaactcacactggggagaagccctatgaatgtagcaaatgtgataaagcatttcatagttctagttcctatcatagacatgaaagaagtcacatgggagagaagccttatcaatgcaaagaatgtggaaaagcatttgcatataccagttctcttcgtagacatgaaaggacccactctgggaaaaaaccgtatgaatgtaagcaatatggggaaggcttatcctatcttataagttttcaaacacacataagaatgaactctggagaaagaccttataaatgtaagatatgtgggaaaggcttttattctgccaagtcatttcaaacacatgaaaaaactcacactggagagaaacgctataaatgcaagcaatgtggtaaagccttcaatctttccagttcctttcgatatcatgaaaggattcacactggagagaaaccctatgagtgtaagcagtgtgggaaagccttcagatctgcctcacagcttcgagtgcacggtgggactcacactggagagaaaccctatgaatgtaaggaatgtgggaaagccttcagatctacctcacaccttcgagtgcatggtaggactcatactggagagaaaccctatgaatgtaaggaatgtgggaaagccttcagatatgtgaagcaccttcaaattcatgaaaggacagaaaaacacataagaatgccctctggagaaagaccttataaatgtagtatatgtgagaaaggcttttattctgccaagtcatttcaaacacatgaaaaaactcacactggagagaaaccctatgaatgcaaccaatgtggtaaagccttcagatgttgcaattcccttcgatatcatgaaaggactcacactggagagaaaccctatgagtgtaagcaatgtgggaaagccttcagatctgcctcacaccttcgaatgcatgaaaggactcacactggagagaaaccctatgagtgtaagcaatgtgggaaagccttcagttgtgcctcaaaccttcgaaagcatggtaggactcacactggagagaaaccctatgagtgtaagcaatgtgggaaagccttcagatctgcctcaaaccttcagatgcatgaaaggactcacactggagagaaaccctatgaatgtaaggaatgcgaaaaagcattctgtaaattctcttcttttcaaatacatgaaaggaagcacagaggagagaagccctatgaatgtaagcattgtgggaatggattcacatctgccaagattcttcaaatacatgcaagaacacacattggagagaaacactatgaatgtaaggaatgcggaaaagcattcaattatttttcttccttgcatatacacgcaaggactcatatgggagagaagccatatgaatgtaaggattgtgggaaagcattcagctagcctggttccttttatggacatgaatagactcacactggaaggaagcactatgaatgcaagcaatgtggcaaaactttcacattttccagttcttttcgatatcatgaaaggactcacactggggagaaaccctatcaatgtaagcagtgtgggaaagccttcattccttttacttcttttcaatgtcatgaaaggactcacacgggagagaaaccctatgagtgtattctagttccgtttgatatcatgaaaggacttacactggagtgaaaccctatgaatgtaagcaatgtgggaaagccttcagatgtgcctcgcaccttcaacggcatggaagggttcacacttgggagaaactctatgaatgtaagcagtatgggaaagccttcagatctgccaagattctttgaatacagataattaatgtaaacaattatcataagtatactaacatgttattctttttaaataagaaggtataataaaatatcccattggttttatgtattaaaaaaaaaaaaaaaaaaaa

SEQ ID NO: 24330 - DNA, 2357 bp, Homo Sapiens
cgccgttttcccggggagatgcgccgcccggtctccctgccagcggagtgctgggccgaggacagggcggcaggggtgacagtggggtccaggagagtctcaaaatcctaagctttcagtatttgttattgtgaaagaagttaattcacctgaaacagaggaggggcaacctgagttatcagaaagtgacttcctggccttcccttctttactgatcagaggcacacaaagcgtagtttctaagctgaatgatgacaacgttgcagaataaagaagaatgtggaaagggaccaaagagaatctttgccccacctgcacaaaaatcttacagcctgttaccttgtagccctaactcccctaaggaggagaccccggggatcagttccccagagacagaggccaggataagcctgccaaaggccagtttaaagaagaaagaggaaaaagcaaccatgaagaatgttccaagcagggaacaggagaaaaaaagaaaggcacaaatcaacaagcaagcagagaagaaagaaaaggaaaaatcaagtcttaccaatgcagaatttgaggagattgtccagattgttctgcagaagtcccttcaggagtgcttggggatgggatctggccttgattttgcagagacttcttgtgcccagcccgtagtatctacccaatcagacaaggagccaggaattactgcttctgctactgatactgataatgctaatggagaggaggtaccacatactcaagagatttcagtgtcttgggaaggtgaagctgcccctgagataaggacatctaagttaggccagccagatcctgcaccctctaagaagaaatccaatagactcaccttaagcaaaagaaagaaggaagctcatgagaaggtggagaaaactcaaggtggacatgagcacagacaggaagaccgactaaagaaaacagttcaggatcattctcagatcagggaccagcaaaaaggagagataagtggttttggtcaatgtctggtctgggtccagtgttccttcccaaactgtgggaaatggaggcggctgtgtgggaacattgacccctcagttctcccagataattggtcctgtgatcagaacacagatgtgcagtataatcgctgtgatattcctgaggagacctggacagggcttgagagtgatgtggcctatgcctcctacatcccaggatccatcatctgggccaagcaatacggttacccctggtggccaggcatgatagaatctgatcctgacttaggggaatattttctttttacttcccatcttgattccctgccgtctaagtaccatgtgacgttttttggagaaacagtttctcgtgcatggatcccagtcaacatgctaaagaacttccaggagctgtccctggagctatcagtcatgaaaaagcgcagaaatgactgcagccagaaactgggggtggccctgatgatggctcaagaggcagaacagatcagcattcaggaacgggttaacttgtttggtttctggagccgattcaacggatctaacagtaatggggaaagaaaagacttacagctctctggtttgaacagcccaggatcctgcttagagaaaaaggagaaagaggaagagttggaaaaggaggaaggagagaaaacagacccaattttgcccattcgtaagcgagtcaaaatacagacccaaaaaaaccaagccaagagggcttgggggtgatgcaggcacagcagatggccgaggcaggacactgcagaggaagataatgaagagatctctaggcaggaaatccacagctcctcctgcacccagaatgggaaggaaagaaggccaagggaattcagattctgaccagccaggccctaagaaaaaatttaaagctccccagagcaaggccttggcagccagcttttcagagggaaaagaagttagaacagtgccaaagaacctgggcctatcagcgtgtaagggggcctgcccctcatctgcgaaagaagagcccagacaccgggaacccctgacccaggaggctggaagtgtcccccttgaggacgaagcctccagtgacctggacctggagcaactcatggaagatgttgggagagagctggggcagagcggggagctgcagcacagcaacagtgatggcgaggacttccccgtggcgctgtttgggaagtagctggtgctcctctgctccctctttttctcccttctctggggcgcaggagggagaagttgctaagtgctgggtctgttcattggctatgaggttcaaatgtgtgtggtgcagtttctgtgttaataaagcaggttacagtcgaaaaaaaaaaaaaaaaaaaa

SEQ ID NO: 24331 - DNA, 5469 bp, Homo Sapiens
aaggacagaggacgagattttgaacgacaaagagaaaagagagacaagccaaggtctacttccccagcaggacagcatcattctcctatatcttctagacatcactcatcttcctcacaatcaggatcatctattcaaagacattctccttctcctcgtcgaaaaagaactccttcaccatcttatcagcggacactaactccacctttacgacgctctgcctctccttatccttcacattctttgtcgtctccccagagaaagcagagtcctccaagacatcgctctccaatgcgagagaaagggagacatgatcatgaacgaacttcacagtctcatgatcgacgccacgaaaggagggaagatactaggggcaaacgagacagagaaaaggactcaagagaagaacgagaatatgaacaggatcagagctcttctagagaccacagagatgacagagaacctcgagatggtcgggatcggagagatgccagagatactagggaccgaagggaactaagagactccagagacatgcgggactcaagggagatgagagattatagcagagataccaaagagagccgtgatcccagagattctcggtccactcgtgatgcccatgactacagggaccgtgaaggtcgagatactcatcgaaaggaggatacatatccagaagaatcccggagttatggccgaaaccatttgagagaagaaagttctcgtacggaaataaggaatgagtccagaaatgagtctcgaagtgaaattagaaatgaccgaatgggccgaagtagggggagggttcctgagttacctgaaaagggaagtcgaggctcaagaggttctcaaattgatagtcacagtagtaatagcaactatcatgacagctgggaaactcgaagtagctatcctgaaagagatagatatcctgaaagagacaacagagatcaagcaagggattcttcctttgagagaagacatggagagcgagaccgtcgtgacaacagagagagagatcaaagaccaagctcaccaattcgacatcagggaaggaatgacgagcttgagcgtgatgaaagaagagaggaacgaagagtagacagagtggatgataggagagatgaaagggctagagagagagatcgggaacgagaacgagacagggagcgggagagagagagggaacgtgaacgggatcgggaaagagaaaaagagagagaactagaaagagagcgtgctagggaacgggagagagaaagagaaaaagagagagatcgtgaaagggatagagaccgagaccacgatcgagagcgggaaagagagagggaacgagacagggaaaaagaacgggaacgagaaagagaagagagagagagggagagagagcgagaacgggagagagagcgagagcgagaacgggaacgagaaagagcgagagaaagggataaagaacgagaacgccaaagggattgggaagacaaagacaaaggacgagatgaccgcagagaaaagcgagaagagatccgagaagataggaatccaagagatggacatgatgaaagaaaatcaaagaagcgctatagaaatgaagggagtcccagccctagacagtccccgaagcgccggcgtgaacattctccggacagtgatgcctacaacagtggagatgataaaaatgaaaaacacagactcttgagccaagttgtacgacctcaagaatctcgttctcttagtccctcgcacctcacagaagacagacagggtagatggaaagaggaggatcgtaaaccagaaaggaaagagagttcaaggcgctacgaagaacaggaactcaaggagaaagtttcttctgtagataaacagagagaacagacagaaatcctggaaagctcaagaatgcgtgcacaggacattataggacaccaccagtctgaagatcgagagacatctgatcgagctcatgatgaaaacaagaagaaagcaaaaattcaaaagaaaccaattaagaaaaagaaagaggatgatgttggaatagagaggggtaacatagagacaacatctgaagatggtcaagtattttcaccaaaaaaaggacagaaaaagaaaagcattgaaaaaaaacgtaaaaaatccaaaggtgattctgatatttctgatgaagaagcagcccagcaaagtaagaagaaaagaggcccacggactccccctataacaactaaagaggaattggttgaaatgtgcaatggtaagaatggtattctagaggactcccagaaaaaagaagatacagcattcagtgactggtctgatgaggatgtccctgaccgtacagaggtgacagaagcagagcatactgccaccgccacgactcctggtagtaccccttctcctctatcttctcttcttcctcctccaccgcctgtggctactgccactgctacaactgtgcctgcaactcttgctgccactactgctgctgccgccacctctttcagcacatctgccatcactatttccacctctgccacccccaccaataccaccaataatacttttgccaatgaagactcacacagaaaatgccacagaacacgagtagaaaaagtagagacgcctcacgtgactatagaagatgcacagcatcgcaagcctatggatcaaaagaggagcagcagcctcgggagcaatcggagtaaccgtagtcatacgtctggtcgtcttcgctccccatccaatgattcagcccatcgaagtggagatgaccaaagtggtcgaaagagagtactgcacagtggctcaagagatagagaaaaaacaaaaagcctggaaatcacaggagagagaaaatctaggattgatcagttaaagcgtggagaacccagtcgaagtacttcttcagatcgccaggattcaagaagccatagttcaagaagaagttctccagagtcagatcgacaggtccattcaagatctgggtcatttgatagcagagacaggcttcaagaacgagatcgatatgaacacgacagagagcgcgagagagagaggagagatacgaggcagagagaatgggaccgagatgctgataaagattggccacgcaacagggatcgagatagattgcgagaacgagaacgagagagagaacgagacaaaaggagagacttggatagggaaagagagagactaatttctgattctgttgaaagggacagggacagagacagagacagaacttttgagagttctcaaatagagtctgtgaaacgctgtgaagcaaaactggaaggtgaacatgaaagggatctagaaagcacttcccgagactctctagccttggataaagagagaatggataaagatctgggatctgtgcagggatttgaagatacaaataaatccgagagaactgagagtctggaagcaggagatgacgagtccaagttagatgatgcacattcattaggctctggtgctggagaaggatacgagccaatcagtgatgacgaactagatgaaattctggcaggtgatgcagaaaagagggaggaccaacaggatgaggagaagatgccagatcccttagatgtgatagatgtggattggtctggtcttatgccaaagcatccaaaagaaccacgagagcctggggctgcactcttaaaattcacacctggagctgttatgctaagagttgggatttctaaaaagttggcaggttctgaactctttgccaaagtcaaagaaacatgtcagagacttttagaaaaacccaaaggtagtttcattttactttaactatataatgtctgttaaccatttaagatgccatctgaaggggattctgatctgttcttatgtagcacttaacactgtgtagaaactattttttgagaaatcattttataatcattatttaaccctcatggtcaaagtttctctttaaaatttattttgagaagaagagttatcccacagaaaagttgggaaaagagtacaatgacctttttgtatgaaaattacttattaacaggccaggcgtggtgttgcatgtctgtagtcacagctactcagggaggttgaggcagcaggattgctggagcccaggaaattgaggctgcagtgagccatgattgagccaccacactccaacctaggtgacagagcaagaccctgtctcaaaaaaaaaaaaacaaattaaccaataagttctaatatcaaagtgctcagtggtttgcccttggctaaatgaagcagagccaggaaaaacagactacatatttttcatgtctaaagaaattgggtattttggcagccctttcccctagacatctacccaaatgcaggtgtgtaggttgagtctttaacaaagtgattaagagcttggtctgtaaggccggatgatctggatttcagtaggcacaccacttactggctattacttaatctgtgtgttagtgtcatcatctgtaagtcaggaataatcataccaccaacttcctatggtaattaggagcaaatgagttattacaggcaaaacacttagaacagttcctggcatatagtaatacccaataaatattaactgctactttgaaaatatcctatcacgctgatttttgacctcactgcagcaattttcagttattccagattatctagcttatggattctggtggtaggggttgtttggttttggttttcactgtctctgtctcatctagtacctaccttagtttattttgcaacttactaatactttattaatggggagggacgagtagatggtaaaaagaaggaaaaggaggtaaaaggtgaaaggaacaacattaattaacaattttacgtcatgtccctggacataaaagtttagttagtattaaatttttcactaatacaaaataaaaaaatattgttttatgagttttatgaattcatgcccttcctttactctattagcataagcagtaaatttttttattttaatatagcccaataaacctagagtatacatgtacaaaatacatataattgttaacgtgtattaaccgaaaaatgacccaagacttagttcttgccctactgtatctgccttgtttggttggttctgtgaccttaagcaaataactcctgtgagcctcaattttatttgtaaagtgatggaataaaacccctaaaatcttacccacctctaaagatatttgtttctgtgaccttttgctagtagcatttcaagttaaaatctggtttgattttgctacccatgaaatacagttcggcccttacttattgatgacttaacctaaacagtgaaaatatgcactgtaaagggtggggtgatgtggcttaacaatcagacttcttctatttttgctgctatggtggttgtattagagaactgatgtattatcttgaataaagactttgtcttgtttactgccctaaaaaaaaaaaaaaaaaaaa

SEQ ID NO: 24332 - DNA, 4501 bp, Homo Sapiens
gatcgccgcgcgagggtggtgggcatcgaggtcccagcagcggacgagggaggtgccgccgtcgcccaggatgggctgggaatgaagcgatgtagccttttaagagatttgctctgacccatctgaagtccatatggctctgtatgatgaagacctcctgaaaaatcctttctatctggctctgcaaaagtgccgccctgacttgtgcagcaaagtggcccaaatccatggcattgtcttagtaccctgcaaaggaagcctgtcgagcagcatccagtctacttgtcagtttgagtcctacattttgatacctgtggaagagcattttcagaccttaaatggaaaggatgtctttattcaagggaacaggattaaattaggagctggttttgcctgtcttctctcagtgcccattctctttgaagaaactttctacaatgaaaaagaagagagtttcagcatcctgtgtatagcccatcctttggaaaagagagagagttcagaagagcctttggcaccctcagatcccttttccctgaaaaccattgaagatgtgagagagttcttgggaagacactccgagcgatttgacaggaacatcgcctctttccatcgaacattccgagaatgcgagagaaagagcctccgtcaccacatagactcagcgaatgctctctacaccaaatgcctccagcagcttctgagggactctcacctgaaaatgctcgccaagcaggaggcccagatgaacctgatgaagcaggcagtggagatatacgtccatcatgaaatttacaacctgatctttaaatacgtggggaccatggaggcaagtgaggatgcggcctttaacaaaatcacaagaagccttcaagatcttcagcagaaagatattggtgtgaaaccggagttcagctttaacatacctcgtgccaaaagagagctggctcagctgaacaaatgcacctccccacagcagaagcttgtctgcttgcgaaaagtggtgcagctcattacacagtctccaagccagagagtgaacctggagaccatgtgtgctgatgatctgctatcagtcctgttatacttgcttgtgaaaacggagatccctaattggatggcaaatttgagttacatcaaaaacttcaggtttagcagcttggcaaaggatgaactgggatactgcctgacctcattcgaagctgccattgaatatattcggcaaggaagcctctctgctaaaccccctgagtctgagggatttggagacaggctgttccttaagcagagaatgagcttactctctcagatgacttcgtctcccaccgactgcctgtttaagcacattgcatcaggtaaccagaaagaagtggagagacttctgagccaagaggaccatgataaagataccgtccaaaagatgtgtcaccctctctgcttctgcgatgactgtgagaaactcgtctctgggaggttgaatgatccctcagttgtcactccattctccagagacgacagggggcacacccctctccatgtggctgctgtctgtgggcaggcatccctcatcgacctcctggtttccaagggcgccatggtaaatgccacagactaccatggggccactccgctccacctggcctgtcagaagggctaccagagcgtgacgctgctgctgctgcactacaaggccagcgcggaagtgcaggacaacaatgggaatacgccactccacctggcctgcacctacggccacgaggactgtgtgaaggctctggtttactacgacgtggagtcgtgcagacttgacattggcaatgagaaaggagacacccctctacacattgctgcccgctggggctaccaaggcgtcatagagacattgctgcagaacggagcgtccaccgagatccagaacagactgaaggagacgcccctcaagtgtgcattaaactcaaagattctgtctgtaatggaagcctatcacctgtccttcgagaggaggcagaagtcgtccgaggcccctgtgcagtccccgcagcgctccgtggactccatcagccaagagtcctccacttccagcttctcctccatgtcagccggctcaaggcaggaggagaccaagaaggactacagagaggtagaaaaacttttgagagcagttgctgatggagatctagaaatggtgcgttacctgttggaatggacagaggaggacctggaggatgcggaggacactgtcagtgcagcagaccccgaattctgtcacccgttgtgccagtgccccaagtgtgccccagctcagaagaggctggcgaaggttcctgccagtgggcttggtgtgaacgtgaccagccaggacggctcctccccgctgcatgtcgccgccctgcacggccgggcggacctcatccgcctcctgctgaagcacggggccaacgcaggtgccaggaacgcagaccaagccgtcccgctccacctggcctgccagcagggccactttcaggtggtgaagtgtctgttagattcgaatgcaaaacccaataagaaggacctcagtggaaacacgcccctcatttacgcctgctccggtggccatcacgagcttgtggcactgctgctacagcacggggcctccattaacgcttctaacaataagggcaacacagcgctgcacgaggctgtgattgaaaagcacgtcttcgtggtagagctgcttctgctccacggagcgtcagttcaggtgctgaacaagcggcagcgcacggctgtagactgtgctgaacagaattcaaaaataatggaattgcttcaggtggtaccaagctgtgttgcttcattagatgatgtggctgaaactgaccgcaaggagtatgtcactgttaagatcaggaaaaaatggaactcaaaactgtatgatctaccagatgagccttttacaagacagttttactttgtccactcagctggtcagtttaagggaaagacttcaagggagattatggcaagagatagaagtgtccctaatttaaccgaaggttctttgcatgagccagggaggcaaagtgtcacactgagacagaataacctgccagctcagagtggatctcatgctgctgagaaaggcaacagcgactggccagagaggcctggactgacacagactggccctggacacagacggatgctgcggagacacacggtagaggatgcggtcgtgtcccagggcccggaggctgctggccccctctccactccccaagaggttagtgcttcccggtcctaacaggaatgaggagttgttgaacccactgctaggaagcaaggatgcaacaagatgatgctgagcgtgaacacatctgagaactaaatgtgcttccatgagactggcttgagaagtcttcagcaccaagttcctgaaagcttttctgtggcaggaaagaatgcaacaaaaaagttaaccaccaccatctctctcctcttcaaagctaatgaatacaattgaaacagacaaaaattccagtagcatccagatccttaagccagaggtgcatgcttctttttaagtatgagggtttgttggtcacagtgggagaggtttcaccaccgcattctgacctcctcctcccaaaaggtgctaaacctctctgacctgtgtacattcacaaaccacagctagaattcctccacctaggattaagctggagagaagtaagtaatttaggtttcatggtactgtagaggccaggctgaaatgtcatatctgaaggaagaaagcagcagctggacaatgtttctttgcaaagcaacactcgaaccaaaagatgcctcaatcccattttgatattcattttagtgaaaggatgcatcagacctgttccacatcatgcacatgggaaagggtggttatcattttccttctaacaagtaggtacagatattcggttactacacgtgcacctgtagcagtatttctagaaacatccctttttgttgagaacctcccttgaatgtctgtcacactcacacctgacgggatggttactggattagagagtagatttggcacatcttttcttagtcttttgattcaaattcaaaacttaacagcacaaaccaggtcagagttactttcggttagaatttattgccatttattcctttttataaatttctatagattatactgttatttttatgttattggcctagagctacacgtatatgggtttgtcctgagtccgttttcaaatgaccttgtgatagggaaatggttttgtccatgttcttggaaatacttgtgtatgtacagaaggaagggagggattatttttctacaaagtaatttatgatttctaattttctaatgtgccttggatatgtgccaaatgatggaaaagaaacagtaaactttatgattcttaaaaaaaaaaaaaaaaaaaaaaaaaaaaaaaaaaaaaaaaaaaaaaaaaaaaaaaaaaaaaaaaaaaaaaaaaaaagg

SEQ ID NO: 24333 - DNA, 993 bp, Homo Sapiens
gggagtacctggaccagcttaatgccctgcgccgcgagaagcagaagctcgtggagaagatcatggaccaataccgcgtgctggagcctgtgcccctgccccggaccaaggtccccttccccggcacccatgcgccgggcccagagctccctctgcctgcgggatgagaccttggcaggcgggcagcggcggaaactcagctcaaggttcccggtggggcgaagctctgagtcattcagccctggggacacccctaggcaacgattccgacagcgccatccaggccccctgggggcgcccgtctcccacagcaaaggacctggtgtgggatgggagaactccgctgagaccctgcaggaacacgaaacagatgccaaccgagagggccctgaggtacaggaaccggagaaacgtcccctcaccccatccctcagccagtgacaccgtgggaacagcaggcttgggagtgcagccttctcggcactggagtgtcagcggaggccccaggcagcccaagagctcagggagccagggaccccaaggggagtccttggacaaggaggcctgggccctgagatcctccacggtcagcgccggggcccggagatggagctgggacgagtgtgtggacaggggggatggctggccccccgagcagctccaggctggagttctggttcttccaggtggctcccgctgaggcagcggtctctgggggatcccccagctgaaggaggctggcaggagttggcaagagaaccccctgccctgtccaggtgggaagctgagtcccagtgctgggggactgtggcctgggctgatcttgagccttaactggacatgaggggcatgagaataaagctgaactgcagcctcctgaaaaaaaaaaaaaaaaaaaaaaaaaaaaaaaaaaaaaaaaaaaaaaaaaaaaaaaaaaaaaaaaaaaaaaaaaaaaaaaaaaaaaaaaaaaaaaaaaaaaaaaaaaaaaaaaaa

SEQ ID NO: 24334 - DNA, 2547 bp, Homo Sapiens
ggccacgttcagcggacacgggagcaagatggcgattccgggcaggcagtatgggcttattttgccaaagaaaacacagcagttgcaccctgttttgcaaaaaccatcagtgtttgggaatgattctgatgatgatgatgagacctctgtgagtgaaagccttcagagggaagctgctaagaagcaggccatgaaacagaccaaactggaaatccagaaggcccttgcagaagatgctactgtgtatgaatatgacagtatttatgatgaaatgcagaaaaaaaaggaggaaaataatcccaaattgcttttggggaaagacagaaagcccaagtatattcacaacttgctaaaagcagttgagatcagaaaaaaggaacaggaaaaaagaatggaaaagaaaatacagagagaacgagaaatggaaaagggggagtttgatgataaagaagcatttgtgacatctgcatataagaaaaaactgcaagagagagctgaagaagaagaaagagaaaagagggctgctgcactggaagcatgtttggatgtaaccaagcagaaagatctcagtggattttataggcacctattaaatcaagcagttggtgaagaggaagtacctaaatgcagctttcgtgaagccagatctggtataaaggaagaaaaatcaaggggcttctccaatgaagtaagttcaaaaaacagaataccacaagagaaatgcattcttcaaactgatgtgaaagtagaggaaaacccagatgcagacagtgacttcgatgctaagagcagtgcggatgatgaaatagaagaaactagagtgaactgcagaagggaaaaggtcatagagacccctgagaatgacttcaagcaccacaggagtcaaaaccactctcggtcacctagtgaagaaagagggcacagtaccaggcaccacacgaaaggatcacgaacgtcgagaggacatgagaaaagggaagatcagcaccagcagaagcaatccagagaccaagagaaccattacactgaccgtgattaccggaaagaaagggattctcataggcacagagaggccagtcatagagattcccattggaagaggcatgaacaggaagataaaccaagggcgagggaccaaagagaaagaagtgacagagtatggaaaagggagaaagatagggagaaatattcccaaagagaacaagaaagagatagacaacaaaatgatcagaaccgacccagtgagaaaggagagaaggaagagaaaagcaaagcaaaggaagagcatatgaaagtaaggaaggaaagatatgaaaataatgataaatacagagatagagaaaaacgagaggtaggtgttcagtcttcagaaagaaatcaagacagaaaggaaagcagcccaaattctagggcaaaggataaatttcttgaccaagaaagatccaacaaaatgagaaacatggcaaaggacaaagaaagaaaccaagagaaaccctctaattctgaatcatcactgggagcaaaacacagactcacagaggaagggcaagagaagggtaaagaacaagagagaccacctgaggcagtgagcaagtttgcaaagcggaacaatgaagaaactgtaatgtcagctagagacaggtacttggccaggcagatggcgcgggttaatgcaaagacctatattgagaaagaagatgattgatggctaccccaagagaaagatttaaggaagcacagaaaactgtaattcctggaacctgctgcgtaaaaccataaaggagtgtgttaccagtagtttggagggcatttttaaatttattttcaaaattttaagttaaaagtcagtcttacagcttggatgtttggatgtggatgtttggctgaatttatatatagtgtgtactcatcaataccacattctttgttgtattcaagaaccgttaagagtgtgctaattccctgtaggtacataatgaggaaaatttgctccactacaaccattaaaaaataattttggccagatacggtagctcgtgcctgtaataccaacattttgggaggccaaggcagaaggatattgaggctaggcattcaagaccagcctaggcaggataataagaccttgtctctatttaaaaaacaaaaagcctagcatggtagtccatgcctgtagtcccagctgttcgagaggctgaggcaagaagatcacttgagcctaggaatttgatgttacagtgaggtatgatcatgccactgcactccaacctgggcaacagaatgagaccctgtctctaaaaaattttttttaaataaataatttaactcttctaataatgttttgttgcaggaaatgtatttcagataaaatatggatttgaaaaacagaaaatatactttatgttctgaaatttgtatttaagtataaaatgtgaatcatcttgtctaaatagcttacagcatagttggcttaaatgaaaataaaatgatatgcttatacatttggaaaaaaaaaaaaaaaaaaaaaaaaaaaaaaaaaaaaaaaag

SEQ ID NO: 24335 - DNA, 3066 bp, Homo Sapiens
cctcccaccttgccccggggcagacgagcggcgccccgacaccccctcttctcccgcagccccgccagcgccaccccccgcgggccgcaggggctcatgcagccgccaagggagaggctagtggtaacaggccgagctggatggatgggtatggggagaggggcaggacgttcagccctgggattctggccgaccctcgccttccttctctgcagcttccccgcagccacctccccgtgcaagatcctcaagtgcaactctgagttctggagcgccacgtcgggcagccacgccccagcctcagacgacacccccgagttctgtgcagccttgcgcagctacgccctgtgcacgcggcggacggcccgcacctgccggggtgacctggcctaccactcggccgtccatggcatagaggacctcatgagccagcacaactgctccaaggatggccccacctcgcagccacgcctgcgcacgctcccaccggccggagacagccaggagcgctcggacagccccgagatctgccattacgagaagagctttcacaagcactcggccacccccaactacacgcactgtggcctcttcggggacccacacctcaggactttcaccgaccgcttccagacctgcaaggtgcagggcgcctggccgctcatcgacaataattacctgaacgtgcaggtcaccaacacgcctgtgctgcccggctcagcggccactgccaccagcaagctcaccatcatcttcaagaacttccaggagtgtgtggaccagaaggtgtaccaggctgagatggacgagctcccggccgccttcgtggatggctctaagaacggtggggacaagcacggggccaacagcctgaagatcactgagaaggtgtcaggccagcacgtggagatccaggccaagtacatcggcaccaccatcgtggtgcgccaggtgggccgctacctgacctttgccgtccgcatgccagaggaagtggtcaatgctgtggaggactgggacagccagggtctctacctctgcctgcggggctgccccctcaaccagcagatcgacttccaggccttccacaccaatgctgagggcaccggtgcccgcaggctggcagccgccagccctgcacccacagcccccgagaccttcccatacgagacagccgtggccaagtgcaaggagaagctgccggtggaggacctgtactaccaggcctgcgtcttcgacctcctcaccacgggcgacgtgaacttcacactggccgcctactacgcgttggaggatgtcaagatgctccactccaacaaagacaaactgcacctgtatgagaggactcgggacctgccaggcagggcggctgcggggctgcccctggccccccggcccctcctgggcgccctcgtcccgctcctggccctgctccctgtgttctgctagacgcgtagatgtggagggaggcgcgggctccgtcctctcggcttccccatgtgtgggctgggaccgcccacggggtgcagatctcctggcgtgtccaccatggccccgcagaacgccagggaccgcctgctgccaagggctcaggcatggacccctccccttctagtgcacgtgacaaggttgttgtgactggtgccgtgatgtttgacagtagagctgtgtgagagggagagcagctcccctcgccccgcccctgcagtgtgaatgtgtgaaacatcccctcaggctgaagccccccacccccaccagagacacactgggaaccgtcagagtcagctccttccccctcgcaatgcactgaaaggcccggccgactgctgctcgccgatccgtggggccccctgtgcccgccacacgcacgcacacactcttacacgagagcacactcgatccccctaggccagcggggacaccccagccacacagggaggcatccttggggcttggccccaggcagggcaaccccggggcgctgcttggcaccttagcagactgctggaaccttttggccagtaggtcgtgcccgcctggtgccttctggcctgtggcctccctgcccatgttcacctggctgctgtgggtaccagtgcaggtcccggttttcaggcacctgctcagctgcccgtctctggcctgggcccctgccccttccaccctgtgcttagaaagtcgaagtgcttggttctaaatgtctaaacagagaagagatccttgacttctgttcctctccctcctgcagatgcaagagctcctgggcaggggtgcctgggccccagggtgtggcaggagacccagtggatggggccagctggcctgccctgatcctctgcttcctcctcacaaccccaagagcccccagcccggtccatccacgtctggagtctggggagaggagcagggtcttaggactctcagctctgagcatccctggcagggtcttcaacctctaatctcttcccttaagccctgtggccacacagccaggagagacttgccgctggctcccgcctcatttcagcccagggtgctcatccaggggcccagaacagtcccacctgtgctgctatgcccacagcacaaagccaggcttcactcccaaaagtgcagccaggccctggagggtgatcctgccagcagccctacagctccacaccctacccacccatcggcagcccctctgctgttccccagggacctctcatacactggccaggaggctgcagaacgtgtgtctccccctccctccaagaggtcctgctccctctgccagaaccgtgtgtgggcgggtgggagggcgctcggggcccggcccctccctctccctgctggttttagttggtccctatgttggaagtaaaaagtgaagcactttattttggttgtgtttgctcacgttctgcttggaagtggggacccctcactgcgtccacgtgtctgcgacctgtgtggagtgtcaccgcgtgtacatactgtaaattatttattaatggctaaatgcaagtaaagtttggtttttttgttaaaaaaaaaaaaaaaaaaaaaaaaaaaaaaaaaaaa

SEQ ID NO: 24336 - DNA, 1232 bp, Homo Sapiens
ggagctcagaagttgggcaaaggtcacagcagacttcctgaaaagcagacactgaggaacacagtggagagcgggagttcacagcgacgcagctgaggacgacgcaggacctctcccaaaggtgctgcagctccagcaccaggggccagggctgcggcgacagcagctcagcaacccttgctgtgctcaagttcttggggattcagagctaagttcaaaatttagaaacagtgccttaaagacgggcaagaaaacccggtgtgggagtctgctcatctatggtttgttactgctctcgctttgatattcttaaattcctaggtaccaatgaaaaagccaagtgaacgtggcagagtgaggaggagacaggagcgtgtgcaccttccatctgtgagaggcacacttcagtctgggttcaagatgcagaatggtgcctacagcaaaaaaaaaaaaaacaccctcctcccttctttaccatttgaatggacattttccttacctgtgatcccaacagaaacagatccagacctatcatgtgaagtccacgttccaggatcagaagtaaccagtttatggactgagcttacacgggaaagtctacccccgactccttctggatagtaacatacacagctgcataaaaacgtctccaaggggacatacgatgcatttgcttggtgtcccagccaagctccccaccggcgacctcactgttccttagagctcgagagctcgtctcctatcaatcagagaaccccatcagctgtgaccaacagagctggagccctctgtggagggagctgaccccacacacaggacagagcagaatcctgattattttacaaactgcaaaccttctgagtaagaagacaaaaatatacattccaaggtatctgtaaagtgcttggaagatgcagacagctgcaccgaggggctctgatccatccacacgctgcgctttgctgcggtcacacacacggtctcagtcacgtgatggttttgcttttatttcttaaacggctgagtgataatccagctagtgtgcagtcatttcatacctttcaatgggcgtcaccgcagtgacgctgccccagccccatgctgagggccgacacaattcacggaacagattcatcatatttggtctttatgtaaataataaatgttttaaaattgcctaaatataaaaaaaaaaaaaaaaaaaaaaaaaaaaaaaaaaaaaagggcggccg

SEQ ID NO: 24337 - DNA, 2312 bp, Homo Sapiens
gttttcacctgatcattagaaactaatgaaacaccttttaagtcttatgaattcaggttacactgttttccagatgccttggcagctggtacagggcctctgaaaaatggaaccaaattctctgaggactaaagtcccagctttcttatctgatttggggaaggccacattgaggggaatcagaaagtgtccccgatgtggcacatacaatggaacccggggactgagctgtaagaacaagacatgtggaaccatattccgctacggtgcacgcaagcagcctagtgttgaagctgtcaaaatcattacaggctctgatcttcaggtctactcagtgcggcaaagagaccggggccctgattaccgatgctttgtggagctcggggtttcagagacaacaatccagacagtggatgggacgatcatcactcagctgagctctggacggtgttatgtcccctcatgcctgaaagctgccactcaaggcgttgtggaaaaccagtgccagcacatcaagctggcggtgaactgccaggcagaggccacccctctgaccctgaagagctcggtcctgaatgcaatgcaggcctccccggaaaccaaacagaccatctggcagttggccacggaacccacaggtcctctggtgcagagaattactaaaaacatcttggtggtgaaatgcaaggcaagccagaagcacagtttggggtatttgcatacatcttttgtgcagaaagtcagtggcaaaagcttgcctgagcgccgcttcttctgctcctgtcagactctgaaatcgcacaagtcaaatgcctccaaggatgagacagcccagagatgcattcatttctttgcttgcatctgtgcctttgccagtgatgagacactggctcaggaattctcagacttcctaaattttgattccagcggtcttaaagagattattgtaccccagttaggttgccattcagaatcaacagtatctgcttgtgagtctactgcctctaagtcaaagaagaggagaaaggatgaagtatctggtgcacagatgaacagttcactactgcctcaagatgcagtgagcagtaatctaaggaaaagtggcctgaaaaagcctgtggttgcttcctcgttaaaaaggcaggcctgtggtcagctgttagatgaggcacaagtgactttatccttccaagactggctggccagtgtcacagaacgcatccatcaaaccatgcactatcagtttgatggcaaaccagaaccattggtgttccacattcctcagtcattttttgatgccctgcaacaaagaatatctataggaagtgcaaaaaaacggctccccaactccaccacagcttttgttcggaaagatgccttgccactgggaaccttttccaagtatacttggcatatcactaatatcctgcaagttaaacaaatcttagataccccagagatgcccttggaaatcacccgtagctttatccagaaccgagatgggacttatgagctatttaaatgccctaaagtggaagtagaaagcatagcagaaacctacggtcgtatagaaaaacaaccagtgctgcgacccttggaactaaaaacttttctcaaagttggcaacacttccccagatcaaaaggagccaacacctttcatcatcgagtggatcccagatatccttccccaatctaagattggcgagctgcggatcaagtttgagtatggccaccaccggaatgggcatgtggcggagtaccaagaccagcggccccccttggaccagcccttggaactggcccctctgaccactattactttcccttaaagcaaaacaagataataatcttttgctgcttaatttgcacatccccaccccttgacaactttaaatgctagttaggcacttagatggccctgttccttggtaaactgctcttagctaagatgcaaattctcagtgctttcaagtggattctgttgaagaaaatctcttgtaaatagcctttttgatgctgctgtgtacagtcttcattatgcattgggcagtatttctggctagagttttaaaaggaacagaaagaaaaccagcttattttccttcttacggactcatctttagcgtttatttcaaccttttgctaattctctgagaaatctgcagcactcagccatacaccaacagtgttggaaagttaacaccctggttagggcagaatgttaaagaccatcttggcagagttccagccacgctctttattctgttctcaaataaagcagtgtcactagtttttcctaaaaaaaaaaaa

SEQ ID NO: 24338 - DNA, 2768 bp, Homo Sapiens
ggcctggccggggcggcgcactcaggtggcctcgcttccctgcgggtcaccgcccgccactcgcacagctaggtcggcctgttgggatcgggagaggtgggcgcacgagttttagtgcgggagtccggggtgcgggcggagtcctattgtccccgtgcacccgggcggcagcacctccgggtccctctttaaaccgagcgtccggcgacctttctttgtgcttagggagtcgaaagcggcatcttctccgagagaagtcgcctactggggggtggcgctggggaggtaacaatgggcgcccattgtcctccgagggtccaacggtgaccccccccgctgcgcacgcgcccggccaccggttggccccgggccagggcacaggtaccgcggccgggagggtcggccccgctgcccgcgccctccgccccgccccagtgagtccccgcgccgccggccccgccccgcgccgccccgccctccgcaggttcagtcctcgcgtccggccgccccgcgctcagtcgcgcgcaccttctctcgcggccgggggaccgcagcgcggggctagcccggagacccggccaccggcctggggcgccttcacgccgtctcggagcggataatgcggtgagcaggcaccacgccggcagactcggctggatctgcgcacagcggcagggattgcgtgcgcccgcgggaggcccggggcagcggctgggatcctcagcggcggccggtttgtcctggttgtggtcaagactggatgatgtaactggctctctaggaagcctcacttggccgtaacctcaggaaggttctctttgaccccatctcatttcgaagccacttctgaagccacttgagaaaaatgatgtgacagttcctatcaaaaaggattcagaaacatataccatctgtgaagaaagtggccctttctcccgcttgcaaaatagacattctcaaattccaaaatgccagccaagaccccaatttacctgaaagcagccaataacaagaaaggaaagaaatttaaactgagggacattctgtctcctgatatgatcagtcccccgcttggagactttcgccacaccatccacattggcaaagagggccagcacgatgtctttggagatatttcctttcttcaagggaactacgagcttttacctggaaaccaggagaaagcacacctgggccagttccctgggcataatgagttcttccgggccaacagcacctcggactctgtgttcacagaaacgccctccccggtgctcaaaaatgccatctccctcccgaccattggaggatcccaagctctcatgttgcccttattgtcaccagtgacatttaattccaaacaggagtccttcgggccagcaaagctgcccaggcttagctgcgagcccgtcatggaggaaaaagctcaggagaaaagcagtctgttggagaatgggacagtccaccagggagacacctcgtggggctccagcggttctgcatctcagtccagccaaggcagagacagccactcctccagcctgtccgaacagtaccccgactggccagccgaggacatgtttgaccatcccaccccatgcgagctcatcaagggaaagactaagtcagaggagtccctctctgaccttacaggttccctcctctccctgcagcttgatcttgggccctcacttttggatgaggtgctgaatgtaatggataaaaataagtaacaagatgccaacttttttcctttggggtaaaaggtacaaaaacaaactaaccacagttgaagagaagggcttccggagctgtatttgcagttttgtgttgggttttctaaaataatattcttacaaagtatttttttacctgttatgccctgtttgcaaaaacaatttagaaaaaaacaacaaagcaaaacctatcttggcaaaaaaaggaagtgagtcagagcccattttcaggaggcattggtgatgttcggctcacatattgtttgcagacacacaagaaatctggcttggccaggattggcactagctatgaagggctgagcgagtcacattaaggaacttcacggaactttatagcactccgacattttctgagcaagaggaagtcaaaatttatttaacacctaagcctttttgtagactcttttctatatattgcttaggctcaccatagcgaattctccagtgttaaaacttttctgttttcacatttgaactttatgggttttggggattttcttgtagttcttatatatccctatatattatatctatattgcaaaattttgactgtcagctacatgttggtaagacacaggcaaagtattactgtaactaagttatttttaaagttaaaatatatttttacgtgcctttggctttttattgcagagtctacattttatagattctacatcagatgttgtcacttatttccattgggattccattgtaagctgtgtatgtgcgtgtttggaaaagtgtattcatacttagtttttttttcttcatctgttatcatacttttaacagcaaccaataacggattgtaaagtgtaaaggcacaggttactcatgatgcttctgcagagactgtgggctacaccacatatgttatttggaaatataggtattttagtacagtacatacttgcattacataggtacttcaagcaacacaataaaaagtaaatgataaaaaaaaaaaaaaaaaaaaaaaaaaaaaaaaaaaaaaaaaaaaaaaaaaaaaag

SEQ ID NO: 24339 - DNA, 4574 bp, Homo Sapiens
ggcggctgctcccattgagctgtctgctcgctgtgcccgctgtgcctgctgtgcccgcgctgtcgccgctgctaccgcgtctgctggacgcgggagacgccagcgagctggtgattggagccctgcggagagctcaagcgcccagctctgcccgaggagcccaggctgccccgtgagtcccatagttgctgcaggagtggagccatgagctgcgtcctgggtggtgtcatccccttggggctgctgttcctggtctgcggatcccaaggctacctcctgcccaacgtcactctcttagaggagctgctcagcaaataccagcacaacgagtctcactcccgggtccgcagagccatccccagggaggacaaggaggagatcctcatgctgcacaacaagcttcggggccaggtgcagcctcaggcctccaacatggagtacatgacctgggatgacgaactggagaagtctgctgcagcgtgggccagtcagtgcatctgggagcacgggcccaccagtctgctggtgtccatcgggcagaacctgggcgctcactggggcaggtatcgctctccggggttccatgtgcagtcctggtatgacgaggtgaaggactacacctacccctacccgagcgagtgcaacccctggtgtccagagaggtgctcggggcctatgtgcacgcactacacacagatagtttgggccaccaccaacaagatcggttgtgctgtgaacacctgccggaagatgactgtctggggagaagtttgggagaacgcggtctactttgtctgcaattattctccaaaggggaactggattggagaagccccctacaagaatggccggccctgctctgagtgcccacccagctatggaggcagctgcaggaacaacttgtgttaccgagaagaaacctacactccaaaacctgaaacggacgagatgaatgaggtggaaacggctcccattcctgaagaaaaccatgtttggctccaaccgagggtgatgagacccaccaagcccaagaaaacctctgcggtcaactacatgacccaagtcgtcagatgtgacaccaagatgaaggacaggtgcaaagggtccacgtgtaacaggtaccagtgcccagcaggctgcctgaaccacaaggcgaagatctttggaactctgttctatgaaagctcgtctagcatatgccgcgccgccatccactacgggatcctggatgacaagggaggcctggtggatatcaccaggaacgggaaggtccccttcttcgtgaagtctgagagacacggcgtgcagtccctcagcaaatacaaaccttccagctcattcatggtgtcaaaagtgaaagtgcaggatttggactgctacacgaccgttgctcagctgtgcccgtttgaaaagccagcaactcactgcccaagaatccattgtccggcacactgcaaagacgaaccttcctactgggctccggtgtttggaaccaacatctatgcagatacctcaagcatctgcaagacagccgtgcacgcgggagtcatcagcaacgagagtgggggtgacgtggacgtgatgcccgtggataaaaagaagacctacgtgggctcgctcaggaatggagttcagtctgaaagcctggggactcctcgggatggaaaggccttccggatctttgctgtcaggcagtgaatttccagcaccaggggagaaggggcgtcttcaggagggcttcggggttttgcttttatttttattttgtcattgcggggtatatggagagtcaggaaacttcctttgactgatgttcagtgtccatcactttgtggcctgtgggtgaggtgacatctcatcccctcactgaagcaacagcatcccaaggtgctcagccggactccctggtgcctgatcctgctggggcccgggggtctccatctggacgtcctctctcctttagagatctgagctgtctcttaaaggggacagttgcccaaaatgttccttgctatgtgttcttctgttggtggaggaagttgatttcaacctccctgccaaaagaacaaaccatttgaagctcacaattgtgaagcattcacggcgtcggaagaggccttttgagcaagcgccaatgagtttcaggaatgaagtagaaggtagttatttaaaaataaaaaacacagtccgtccctaccaatagaggaaaatggttttaatgtttgctggtcagacagacaaatgggctagagtaagagggctgcgggtatgagagaccccggctccgccctggcacgtgtccttgctggcggcccgccacaggcccccttcaatggccgcattcaggatggctctatacacagcagtgctggtttatgtagagttcagcagtcacttcagagatgtatcttgtctttgtcaggcccttcatcttcatggcccacctgttttctgccgtgacctttggtcccattgaggactaaggatcgggaccctttctttaccccctacccattgtggctcccaccctgcctcggactggtttacgtgtcctggttcacacccaggacttttctttgcaagcgaacctgtttgaagcccaagtcttaactcctggtctcgtaaggttccactgagacgagatgtctgagaacaaccaaagaaggcctgctctttgctgcttttaaaaaatgacaattaaatgtgcagattccccacgcacccgatgacctattttttcagccgtgggaggaatggagtctttggtacattcctcaccgaggttagcagctcagtttgtggttatgaaaccgtctgtggcctcatgacagcgagagatgggaatacactagaaggatctcttttcctgttttcgtgaaacgactcttgccaaacgttcccgaggcgccaaggagtgtagtacaccctggctgccatcactctataaaagtgcttcatgagcccagaccaaaagcccacagtgaaatgaagtacccttttgtaaatagcatttttttgcagaaggtgaaaattccactctctaccaccgggccagccaatagatcactttggtgaatgctagtttcaaatttgattcaaaatatttcttaggtgaaagaactagcagaaagtcaaaaactaagatactgtagactggacaagaaattctacctgggcacctaggtgatgccttctttctttgattgcctttctaataaatgcagaatctgaaggtaaataggtttaaaacaaaacaaaaacccacccctttaaggagttggtaaaaagcagttcaactcttagcttgactgagctaaaattcacaggactacgtgctttgtgcattgtagtctagtcgtaattcataggtactgactcctcagccccaaatgtcggagaggaagaattcggtcagcctgtcaggtcgtgagtccagttaccaccaaacatctgggaaacttctgggtgctgggtgctctgctgctggacttttgtggctgtgtctgtgtctgcaagataaattagatcgccctgtggggtttgcagaattagtgaagggtccaggacgatcccagtgggctcgcttccaaagcatcccactcaagggagacttgaaacttccagtgtgagttgaccccatcatttaaaaataaagtccccgggttccttaatgcctccttcactgggccttcctagcaggatagaaagtccttgcccagagcaggacctggctgtctttttttttttttttttcccgagaccaagtttcactctgttgcccaaggtagagtgcagtggcgtgatctctgctcattgcaactgccgcctcccgggttcaagcaattctcatgcatcagcctcccaagtacctgggactacaggcgtgagctaccatgcccggctaatttttgtatttttagtagagatggggtttcattatgttggccaggctggtctcgaactccttacctcaggtgatccacccaccttggcctcccgaagtgctgggattacaggcatgagccactgcgcccggccatggacctggctgtctttatcatccccacaaacattttgaaactggaatatttgtcttcagaaaatggaaacaagactataaatgataagccctgtccctagcaccacctctcctgtgtgtggaatagaggcccctcgtgctaccaacacttaccctgtgtttaaaaagatcttgtaccaagccaacggcgttcctggctctcctgcccacaggatgaacattttcggcttccttaggagttttgccctaccgtattccaaagcgtgtgctggtttctcatattgtctgtaggctcactcagcccgcagtttatgtgtgtgcttttttctatgaaaaatgatgtattttgctacttcctgtgtacaaagttttattgtaaatgttttttgtgctttgcatgaacaggggccacgttgttgcaattgtttcagtagaactggtttgatttctaaaatgttcctgtaacatatcttttatgaacaaatctgaacaatttgtgaaataaaacattgaaaaccaaaaaaaaaaaaaaaaa

SEQ ID NO: 24340 - DNA, 2992 bp, Homo Sapiens
ggcgggatggaggcggcgggaccggctcgcgggtgcgggtccgggtgaagcgggaggcagccagagtcggagccgggcccgagcaccaggcgcaggcccggcgcccgcctgcccgcaccctcgtcctcacagacgccacagccatggccatgatggtgtttccgcgggaggagaagctgagccaggatgagatcgtgctgggcaccaaggctgtcatccagggactggagactctgcgtggggagcatcgtgccctgctggctcctctggttgcacctgaggccggcgaagccgagcctggctcgcaggagcgctgcatcctcctgcgtcgctccctggaagccattgagcttgggctgggggaggcccaggtgatcttggcattgtcgagccacctgggggctgtagaatcagagaagcagaagctgcgggcgcaggtgcggcgtctggtgcaggagaaccagtggctgcgtgaggagctggcggggacacagcagaagctgcagcgcagtgagcaggccgtggcccagctcgaggaggagaagcagcacttgctgttcatgagccagatccgcaagttggatgaagacgcctcccctaacgaggagaagggggacgtccccaaagacacactggatgacctgttccccaatgaggatgagcagagcccagcccctagcccaggaggaggggatgtgtctggtcagcatgggggctacgagatcccggcccggctccgcaccctgcacaacctggtgatccaatacgcctcacagggccgctacgaggtagctgtgccactctgcaagcaggcactcgaagacctggagaagacgtcaggccacgaccaccctgacgttgccaccatgctgaacatcctggcactggtctatcgggatcagaacaagtacaaggaggctgcccacctgctcaatgatgctctggccatccgggagaaaacactgggcaaggaccacccagccgtggctgcgacactaaacaacctggcagtcctgtatggcaagaggggcaagtacaaggaggctgagccattgtgcaagcgggcactggagatccgggagaaggtcctgggcaagtttcacccagatgtggccaagcagctcagcaacctggccctgctgtgccagaaccagggcaaagctgaggaggtggaatattactatcggcgggcactggagatctatgctacacgcctcgggcccgatgaccccaatgtggccaagaccaagaacaacctggcttcctgctacctgaagcagggcaagtaccaggatgcggagaccttgtacaaggagatcctcacccgcgctcatgagaaagagtttggctctgtcaatggggacaacaagcccatctggatgcacgcagaggagcgggaggaaagcaaggataagcgccgggacagcgccccctatggggaatacggcagctggtacaaggcctgtaaagtagacagccccacagtcaacaccaccctgcgcagcttgggggccctataccggcgccagggcaagctggaagccgcgcacacactagaggactgtgccagccgtaaccgcaagcagggtttggaccccgcaagccagaccaaggtggtagaactgctgaaagatggcagtggcaggcggggagaccgccgcagcagccgagacatggctgggggtgccgggcctcggtctgagtctgacctcgaggacgtgggacctacagctgagtggaatggggatggcagtggctccttgaggcgcagcggttcctttgggaaactccgggatgccctgaggcgcagcagtgagatgctggtaaagaagctgcaggggggcaccccccaggagccccctaaccccaggatgaagcgggccagttccctcaacttcctcaacaagagcgtggaagagccgacccagcctggaggcacaggtctctctgacagccgcactctcagctccagctccatggacctctcccgacgaagctccctggtgggctaatgctgaaggggcagccagtcaccagagcgcccacctggcacacccccctcaccccagccctgcgcatgggcctgctgcttgtcccgcctgtctctcccacagcccctgtcttttctgttcaatctcagggtaaccttctcccttgtcatctcagcctgagccctggaggctgggcctgcccactccagctccatcccttatttattccttccagcagggccctcttccctaggttcgggccagcaggaggtgccggctggagtctccaccatagactcagtggcctggcctccccagaccccagagccaagaacactaagcactcgccggcccttcggcaccctcgccctccctcccgactcaacccggccgttgcttctgtatatagagaaataagttattggccgcgcgcctcccttcagtccacggtactacccgggcctcccctcgtccctcttctagtggtaccgcccaggccttaatcacccccattccgtgcggtggtatctcccaggctctacattctcgggagcggcgcctcccaagggggtcctgggaccttctcgcgctcctcctggcctctgagggatgcgtcctacccgcgccatcgccccgtggcccaggacggggacctccccttagtccgtcctcccaccgccgggccctgccccgcatcccggccttatgcactgcccctcccacccggccccgcccaggcacggccgaccccgccccgggcaccgcccaccgagccatcctgcctcgcctccccccacgcctgcagcttctcgcgaggggcggcgacggtcccctggtggcaggaggggctccccctgttgcgggtgaggcggctgctctctattttcagatgttgctgtagaaataaagacggtttaaatctgaaaaaaaaaaaaaaaaaaaaaaaaaaaaaaaaaaaaaaaaaaaaaaaaaaaaaaaaaaaaaaaaaaaaaaaaaaaaaa

SEQ ID NO: 24341 - DNA, 3767 bp, Homo Sapiens
ggctaggtttagcttcaggggcagcccagggcagtgttgctgcatattgcatggatgaaaggctgaaggctgcctcctcttgcaggctggcttctgagattgcaccttcttctcctgctactcctccaaatctatgacccttcaaggcagagctgacctgtccggtaatcaaggcaatgcagccggccgcctagctacagttcacgagccagttgtcacccagtgggcggtgcatcctccagcccccgctcaccccagtctcctggacaaaatggagaaagcgcctccacagccccagcacgagggcctcaagtccaaggagcatcttccgcaacagcctgccgaaggcaagacggcgtcccgccgcgtcccacgcctccgggctgtggtcgagagccaggccttcaagaacatcctggtagacgagatggacatgatgcacgcccgtgcagccacgctcatccaagccaactggaggggctattggctccggcagaagctgatttcccagatgatggcggccaaggccatccaggaggcctggcggcgcttcaacaagagacacatccttcactccagcaagtcgttggtaaagaaaacgagggcggaggagggggacataccttatcacgccccacagcaggtgcgcttccagcatccggaagagaaccgccttctgtccccgcccatcatggtgaacaaggagacccagttcccttcctgtgacaatctggtcctctgcagaccccagtcgtcccccctcctgcagcccccagcagctcagggtaccccagagccctgtgtgcagggtcctcatgctgccagagtccgggggctggccttcctgccacaccagacggtcaccatcagatttccctgcccagtgagtttggacgcaaaatgccagccatgcctgctgaccagaaccatcagaagcacctgcctcgtccacatagagggtgactcagtgaagaccaaacgtgtaagtgcccggaccaacaaagccagggctccggagacaccattgtccagaaggtatgaccaggcagttacgagaccatccagagcccaaacccagggccctgtgaaagcagagacccccaaagcccccttccagatatgtccagggcccatgatcaccaagactctactccagacatatccagtggtctccgtgaccctgccacagacatatccagcgtccacgatgaccaccaccccacccaagactagcccagttcccaaagtaacaataatcaagaccccagcccagatgtatccggggcccacagtgaccaaaactgcacctcacacatgccccatgcccacaatgaccaagatccaggtacaccccacagcctccagaactggcaccccacggcagacatgccctgcgaccatcacggcaaagaaccgacctcaggtttcccttctggcttccatcatgaagagcctgccccaggtatgcccggggcctgcgatggcaaagaccccaccccagatgcacccggtcaccaccccagccaaaaacccattgcaaacatgtctgtcagccacaatgtccaagacttcatcccagaggagcccagttggggtgaccaagccctcaccccagacccgcctgccagccatgataaccaagaccccagcccagttacgctcggtggccaccatcctcaagactctgtgtctggcctctccaacagtggcaaatgtcaaggctccaccccaagtggcggtagcagccggaactcccaacacctcaggctccatccatgagaacccacccaaggccaaggccaccgtgaatgtgaagcaggctgcaaaggtggtgaaagcctcatccccctcctatttggctgaggggaagatcaggtgcctggctcaaccacatccgggaactggggtccccagggctgcagctgagcttcctttggaagccgagaaaatcaagactggcacccagaaacaggcgaaaacagacatggcatttaagaccagtgtggcagtggaaatggctggggctccatcctggacaaaagttgctgaggaaggggacaagccacctcacgtgtatgtgcctgtagacatggctgtcaccctgccccggggacagctggctgccccactgaccaatgcctcatcccagagacatccaccctgcctgtcccagagaccactggccgccccgctgaccaaggcctcatctcagggacatctgcccactgagctgaccaagaccccatccctggcccatctggacacctgtctgagcaagatgcattcccagacacatctggccacaggtgccgtgaaggtccagtcccaagcgcctctagccacctgtctgaccaagacgcagtcccgggggcagccgatcacagacataaccacgtgcctcatcccagcgcaccaggctgctgatctcagcagcaacacccactcccaggtgctcctaacagggtccaaggtgtccaaccacgcctgccagcgcctcggtggcctcagcgccccaccctgggccaagccagaggacagacagacccagccacagccccacggacacgtgccggggaagaccactcaggggggaccatgcccggcagcctgtgaggtccagggtatgctggtgccgccgatggcacccaccggccattccacatgcaacgttgagtcctggggagacaacggagccacacgtgcccagccatcaatgcccggccaggcggtgccctgccaggaggacacgggccccgcggacgctggtgtggttggtggccaatcgtggaaccgcgcatgggagccagccaggggtgctgcgtcctgggacacctggcgcaacaaggcggtggtgcctcccaggcggtccggggagccaatggtgtccatgcaggctgcagaggagatccgcatcctcgcagtgatcactatccaggcgggcgtccgtggctacctggcgcgtcgcaggatccggctgtggcaccggggggccatggtcatccaagctacttggcgcggctaccgtgtgcggcggaacctggcacacctctgcagagccaccacgaccatccagtctgcctggcgcggctacagcacccgccgggaccaagcccggcactggcagatgctccaccccgtcacgtgggtggagctgggcagccgggccggggtcatgtctgaccgaagctggttccaggatggcagagccaggacagtatctgaccatcgctgcttccagtcctgccaggcacacgcttgcagcgtctgccactccctgagctccaggatcgggagcccgcccagcgtggtgatgctagtgggctccagccctcgcacctgtcatacctgtggacgcacacagcccacccgtgtggtgcagggcatgggccagggcactgagggccccggggcagtgtcttgggcctccgcctaccagctggctgccctgagtcccaggcagccgcatcgccaggacaaagcggccacagccatccagtccgcctggaggggctttaagatccgccagcagatgaggcagcagcaaatggcagcgaagatagttcaagccacctggcgaggccaccatacccggagctgtctgaagaacacagaggcgctcttgggaccagcagacccctcggccagctcacggcacatgcattggcctggcatctaggaccctggctccctgcagtggggacttcgtgggaggcactcatggctctctgggtctaatgaataaagtcctccacagcctaaaaaaaaaa

SEQ ID NO: 24342 - DNA, 1840 bp, Homo Sapiens
ggaagagactcttggaggtcctggcctcccagggacatatcttggcagctggctgtggagcttgcctcctgctgcagtgaggcacctcactgtatcccttcagatgtgggcagcagcttgagtaggacagggcagaacatcttcttgcctgagcctctgcatcctgtgctaaaccgaccatggctgcaagctgcagggttgtaacctccatttctgacatccccactggtattccagttcacctagagctggccagtatgactaacagggagctcatgagcagcattgtccatcaggtctttcccgcggtgacttcccttgggctgaatgaacaggagctgttatttctcacccagtcagcctctggacctcactcttctctctcttcctggaacggtgttcctgatgtgggcatggtcagtgacatcctcttctggatcttgaaagaacatgggaggagtaaaagcagagcctcggatctcaccaggatccatttccacacgctggtctaccacatcctggcaactgtggatggacactgggccaaccagctggcagccgtggctgcaggagctcgtgtggctgggacacaggcctgcgccacagaaaccatagacaccagccgagtgtctctgagggcaccccaagagttcatgacttcccattcggaggcaggctccaggattgtattaaacccaaacaagccagtagtagaatggcacagagagggaatatccttccacttcacaccagtattggtgtgtaaagaccccattcgaactgtaggccttggagatgccatttcagccgaaggactcttctattcggaagtacaccctcactattaggaagattcttaggggtaatttttctgaggaaggagaactagccaacttaagaattacaggaagaaagtggtttggaagacagccaaagaaataaaagcagattaaattgtatcaggtacattccagcctgttggcaactccataaaaacatttcagattttaatccgaatttagctaatgagactggatttttgttttttatgttgtgtgtcacagagctaaaaactcagttcccaaatccccagtttatgcagcgccatcaggtattttaagctaaacttcttcacccctgagagcatgtcagctggagaaaagcagttcttccttgcccacttgagaagtgcacgcccactcacccaacatcctggtctctaggaaagcctcatgtgaggttcctctttctttcagctcagtgcccatgggcaaggatcatgatttccattccgtgttacaatgacaatatttaatgagcataaccttctcagtctcctgctctcaaatttaggacagagccgctaaggacaaaacaatccctcccgtgctttatgatggcagcaggggctggggagcctctgagggactctttcattctgcagttgtctggaagcctgggtggcgtcatgagctgaaggatcatgctttcctgtcctggctccataggttataggctggctggtgaaaggttcacgtggcccaggctgaacttcattgcctagctttggatgtgctttctgccataaagactgatttttgttcgttctgagccttcaaggaatttgttttttacaactggaatatgctcctgtgtgtgttaacagatcatggatgttttatgttttcactgatcatttaaagagtttgacctcagagctccaggatcatcagtaaatttgtcatgttatatatttatttttttataaatcaagacttctgtgtgctcttaaatatattaaaaacaatttacatttcaggaaaaaaaaaaaaaaaaaaaa

SEQ ID NO: 24343 - DNA, 5261 bp, Homo Sapiens
ctcaggcacgtctagattttcccacttacataggtcttgttaagaaaccagtcctgccttcttgccactcgtgtctttcgatggctcccttcccgaagtcccgctgcctctaagcggagtgttaagcggggctctcggaagccggtggaccgagatttccccgggtggggcgggcgcggtgtagcggcccgcgggctgacttgctcccggctgtcccccggccccagcgaccatgccccgtaaaggcacccagccctccactgcccggcgcagagaggaagggccgccgccgccgtcccctgacggcgccagcagcgacgcggagcctgagccgccgtccggccgcacggagagcccagccaccgccgcagagactgcaagtgaggaacttgataatagaagtttagaagagattttgaacagcattcctcctcccccgcctccagcaatgaccaatgaagctggagctcctcggcttatgataactcatattgtaaaccagaacttcaaatcctatgctggggagaaaattctgggacctttccataagcgcttttcctgtattatcgggccaaatggcagtggcaaatccaatgttattgattctatgctttttgtgtttggctatcgagcacaaaaaataagatctaaaaaactctcagtattaatacataattctgatgaacacaaggacattcagagttgtacagtagaagttcattttcaaaagataattgataaggaaggggatgattatgaagtcattcctaacagtaatttctatgtatccagaacggcctgcagagataatacttctgtctatcacataagtggaaagaaaaagacatttaaggatgttggaaatcttcttcgaagccatggaattgacttggaccataatagatttttaattttacagggtgaagttgaacaaattgctatgatgaaaccaaaaggccagactgaacacgatgagggtatgcttgaatatttagaagatataattggttgtggacggctaaatgaacctattaaagtcttgtgtcggagagttgaaatattaaatgaacacagaggagataagttaaacagggtaaagatggtggaaaaggaaaaggatgccttagaaggagagaaaaacatagctatcgaatttcttaccttggaaaatgaaatatttagaaaaaagaatcatgtttgtcaatattatatttatgagttgcagaaacgaattgctgaaatggaaactcaaaaggaaaaaattcatgaagataccaaagaaattaatgagaagagcaatatactatcaaatgaaatgaaagctaagaataaagatgtaaaagatacagaaaagaaactgaataaaattacaaaatttattgaggagaataaagaaaaatttacacagctagatttggaagatgttcaagttagagaaaagttaaaacatgccacgagtaaagccaaaaaactggagaaacaacttcaaaaagataaagaaaaggttgaagaatttaaaagtatacctgccaagagtaacaatatcattaatgaaacaacaaccagaaacaatgccctcgagaaggaaaaagagaaagaagaaaaaaaattaaaggaagttatggatagccttaaacaggaaacacaagggcttcagaaagaaaaagaaagtcgagagaaagaacttatgggtttcagcaaatcggtaaatgaagcacgttcaaagatggatgtagcccagtcagaacttgatatctatctcagtcgtcataatactgcagtgtctcaattaactaaggctaaggaagctctaattgcagcttctgagactctcaaagaaaggaaagctgcaatcagagatatagaaggaaaactccctcaaactgaacaagaattaaaggagaaagaaaaagaacttcaaaaacttacacaagaagaaacaaactttaaaagtttggttcatgatctctttcaaaaagttgaagaagcaaagagctcattagcaatgaatcgaagtagggggaaagtccttgatgcaataattcaagaaaaaaaatctggcaggattccaggaatatatggaagattgggggacttaggagccattgatgaaaaatacgacgtggctatatcatcctgttgtcatgcactggactacattgttgttgattctattgatatagcccaagaatgtgtaaacttccttaaaagacaaaatattggagttgcaacctttataggtttagataagatggctgtatgggcgaaaaagatgaccgaaattcaaactcctgaaaatactcctcgtttatttgatttagtaaaagtaaaagatgagaaaattcgccaagctttttattttgctttacgagataccttagtagctgacaacttggatcaagccacaagagtagcatatcaaaaagatagaagatggagagtggtaactttacagggacaaatcatagaacagtcaggtacaatgactggtggtggaagcaaagtaatgaaaggaagaatgggttcctcacttgttattgaaatctctgaagaagaggtaaacaaaatggaatcacagttgcaaaacgactctaaaaaagcaatgcaaatccaagaacagaaagtacaacttgaagaaagagtagttaagttacggcatagtgaacgagaaatgaggaacacactagaaaaatttactgcaagcatccagcgtttaatagagcaagaagaatatttgaatgtccaagttaaggaacttgaagctaatgtacttgctacagcccctgacaaaaaaaagcagaaattgctagaagaaaacgttagtgctttcaaaacagaatatgatgctgtggctgagaaagctggtaaagtagaagctgaggttaaacgcttacacaataccatcgtagaaatcaataatcataaactcaaggcccaacaagacaaacttgataaaataaataagcaattagatgaatgtgcttctgctattactaaagcccaagtagcaatcaagactgctgacagaaaccttcaaaaggcacaagactctgtcttgcgtacagagaaagaaataaaagatactgagaaagaggtggatgacctaacagcagagctgaaaagtcttgaggacaaagcagcagaggtcgtaaagaatacaaatgctgcagaggaatccttaccagagatccagaaagaacatcgcaatctgcttcaagaattaaaagttattcaagaaaatgaacatgctcttcaaaaagatgcacttagtattaagttgaaacttgaacaaatagatggtcacattgctgaacataattctaaaataaaatattggcacaaagagatttcaaaaatatcactgcatcctatagaagataatcctattgaagagatttcggttctaagcccagaggatcttgaagcgatcaagaatccagattctataacaaatcaaattgcacttttggaagcccggtgtcatgaaatgaaaccaaacctcggtgccatcgcagagtataaaaagaaggaagaattgtatttgcaacgggtagcagaattggacaaaattacttatgaaagagacagttttagacaggcatatgaagatcttcggaaacaaaggcttaatgaatttatggcaggtttttatataataacaaataaattaaaggaaaattaccaaatgcttactttgggaggggacgccgaactcgagcttgtagacagcttggatcctttctctgaaggaatcatgttcagtgttcgaccacctaagaaaagttggaaaaagatcttcaacctttcgggaggagagaaaacacttagttcattggctttagtatttgctcttcaccactacaagcccactcccctttacttcatggatgagattgatgcagcccttgattttaaaaatgtgtccattgttgcattttatatatatgaacaaacaaaaaatgcacagttcataataatttctcttcgaaataatatgtttgagatttcggatagacttattggaatttacaagacatacaacataacaaaaagtgttgctgtaaatccaaaagaaattgcatctaagggactttgttgaactttatgctgaagattcttcaagttgattcagtgtattactgatttttttctatttgtaaaggattatgagttgtataaaatacatactccctaaactagatcatgaaactggtttctgttttatgcagttgtcatttgtaaagtctaataaaatattctctataattgcttctagattacaaaaatatgacaatcttgtaagtagcagactatggagaaaaatgagttacctggagggtcaggtaacttgccaaactaaaaagtatgttagttgaggcaaagtcctaagcaaggttgtgctatcaaggctcagcataccttcgtgggcctttgatttaccaacactggaaatgcctgccaactaatcttggatagattctttaaggcattccacttagcttgccagttgagacaatcaccacagttattacccaaatactatgaacatatttttgtaaaccagtcattctgaattatagtgatgagaatttaaatatatgcttttctagaatttgatgtttgaccatttatgacttaattaccagagagccagtaaattaggacagtgtttcaacaagcctaggctatctcgtaagttgaaaaatatcccactatagttgcttcatgagtatgaagtaagatggcctctgatttacactggttcaatttacaaattttcaactttatgataggtttatccgggtactaaatgcatttcaacttgatagtttcaacttatgataggtttaccaggatgtagtcccactgttgaggagcatctatttaggggttaattactttagtaataagtggaaagtaagataccttgagtaatgtttgcctataaaattgtcagcgtatttttacactattggctcaagaatgttataatgctaagggacataagttggcaaccacttggtttttggaaggactttcggtattgtattagaagtctgccctagctgttaaatttctgggtatttatcctaaggaattaattaaagagttaattgttcctttcttcagtgggccattgttttagatatttaaaaaatccaacagtttctatcataatgtaactgtaaaaatgtaaacacattattagcatggacttttaaataaagatttaaagaaagcaaaaaaaaaaaaaaaaaaaa

SEQ ID NO: 24344 - DNA, 4572 bp, Homo Sapiens
ggcggcgctagcttcggagtctcccgcgcgcacctcagccgcctcctagcggcgcggcgctcgctcctacgcctaaaatgaccaatgtgtgatttcagtggaataaatggcgtccaaagtcacagatgctatagtctggtatcaaaagaagattggagcatatgatcaacaaatatgggaaaaatctgttgaacagagagaaatcaaggggctaaggaataaaccaaagaaaacagcacatgtgaaaccagacctcatagatgttgatcttgtaagagggtctgcatttgcaaaggcaaagcctgaaagtccttggacttctctgaccagaaagggaattgttcgagttgtatttttcccctttttcttccggtggtggttacaagtaacatcaaaggtcatctttttctggcttcttgtcctttatcttcttcaagttgctgcaatagtattattctgctccacttctagcccacacagcatacctctgacagaggtgattgggccgatatggctgatgctgctcctgggaactgtgcattgccagattgtttccacaagaacacccaaacctcctctaagtacagggggtaaaagaagaaggaaattaagaaaagcagcccatttggaagtacatagggaaggagatggttctagtaccacagataacacacaagagggagcagttcagaaccacggtacaagcacctctcacagcgttggcactgtcttcagagatctctggcatgctgctttctttttatcaggatcaaagaaagcaaagaattcaattgataaatcaactgaaactgacaatggctatgtatcccttgatgggaagaagactgttaaaagcggtgaagatggaatacaaaaccatgaacctcagtgtgaaactattcgaccagaagagacagcctggaacacaggaacactgaggaatggtcctagcaaagatacccaaaggacaataacaaatgtctctgatgaagtctccagtgaggaaggtcctgaaacaggatactcattacgtcgtcatgtggacaggacttctgaaggtgttcttcggaatagaaagtcacaccattataagaaacattaccctaatgaggacgcccctaaatcgggtactagttgcagctctcgctgttcaagttccagacaggattctgagagtgcaaggccagaatctgaaacagaagatgtgttatgggaagacttgttacattgtgcagaatgccattcatcttgtaccagtgagacagatgtggaaaatcatcagattaatccatgtgtgaaaaaagaatatagagatgacccttttcatcagagtcatttgccctggctccatagttcccacccaggattagaaaaaataagtgctatagtatgggaaggtaatgattgtaagaaagcagacatgtctgtacttgaaatcagtggaatgataatgaacagagtgaacagccatataccaggaataggataccagatttttggaaatgcagtctctctcatactgggtttaactccatttgttttccgactttctcaagctacagacttggaacaactcacagcacattctgcttcagaactttatgtgattgcatttggttctaatgaagatgtcatagttctttctatggttataataagttttgtggttcgcgtgtctcttgtgtggattttcttttttttgctctgtgtagcagaaagaacttataaacagcgattactttttgcaaaactctttggacatttaacatctgcaaggagggctcgaaaatctgaggttcctcatttccggttgaagaaagtacagaatataaaaatgtggctatctctccgttcctatcttaagcgtcgaggtcctcagcgatcagttgatgtaatagtttcatctgctttcttattgactatctcagttgtatttatctgttgtgcccagataaacctctacttgaaaatggagaaaaaacctaacaaaaaggaggaactgacactagtgaataatgttttaaaactggctactaaactgctaaaggagttggacagtccttttagattatatgggcttacaatgaatccgctgctttataacatcacccaggttgttatcctgtcagctgtttctggtgttatcagtgacttgcttggatttaatttaaagctatggaagattaagtcatgacaattcaaagaaaagaagatgtagcctcttttccagaataagagtactgactaagctgcctgaaagcttgtcactgattctttgcttcaggagtctcagctagggagttgaagtgtttacatcagactgtcttgtgcaattcttatatttattttactggttcacttttttttacatttattttagtctttatatttttatttttaagcattgatgtacttagttgttgaaagggtgatgaaactgatatccagatacttgagatcctggtaattggtcataaataattggcaaaataacaaattgtgaaaatagaagccattgctcagcaccgtttctccatcaatgccgtgaacttgccttacttgaggaaaaattctttaactttggaatattgcattgaactcagctatacacataaaacattttctttggtaaatcaagatccagtcagggtttctcttgaattattttggaacaatgccaggatccaaactgattaagttacagtttaagcacccttcagtattaatatatacggtattatataacaggtcaacaagtgctctttgatgataaaacttgtaatagagcaataattgtaaatggttaccatactgtaagatattttgataaaaattaactagtaatacttgtatttatttgaaacactgggctgtttgcacagctccaactgtgcatgctcaaaatgtgcactttttaaaattgttacttttaatgcgtatctttatatgggatctgttatagtatactagggcatgatatggtatccttttgagtgaggtatatactcatctcacaagtgaagtgcctactgatattactaaagtacattatgtttactcaagtaaataattttctccccatggtacactctagtgtaggctattcataccacactgaaatgaacaactgaagaataaggctaagaaccaataaaatatttctctaattgctagttgtaaaactgtatccaaattttcagaaaagacagcttcagcttgcaaattctatcctctaaacttatctggtgcattctccccaccccacccccattatataagggctattttagatgcttttaacctccccaacaaataatttgccaagtgtccaatgagaacttatcatgttggtgtgttaggtaaatcgggcaaatatgatagtgtcttacattgggccttgattttaagttgttatatttgtacaatcgagtattttagaaattacatgaaacatgaaacagtttttgcaattttttttaaactgggcatctggtttctaaaaatttatttgaaacaatctagaattttcttggtgcaaagtgtatcatgtggaatatcctcatatttttaccatattttaagaactttaagacgattaattgtaaataatttatttgattggtgcagttctaatccctaaatcataatcttaaaatcaggaatgtgtggagaacagagccatgtcatatcactttgctcttaccattccttttgatcagcctcaattcagcctcattgtgtagtatgttttttctttctatgaaaaacaacagaaagcatttcattttatttgcctatgttcaaatatgtttaataatgaccaaagtgcattctgagttttttcaaggaatgtaatactggagctttaagaacatacttagtttctcatgtgaaaacttaggctttgtctgatgtttttccttcctctattgtctaatgttgaggttgtttttaggaattatgttttataaactttttcaatataaggtacatgcctatacagaacttaacattttgcacagaatatatcaaatatattttgagaaaaaaagtacggcatgagttctgttaggaataaaagatgaaactattgtatctcacaaaaaatcttatttcagaatggaaatatttttgagaaaagtagctgagtatactggtttaagaaaatgcttgttttagattgaggttaacttagagttgggagttgatttattaagtacagtatacctctcaacagtttataaataatatgttgaattatgtcagtgtgggcagcagtagaatactaaaaggaaaatgtcatgttaagcaatttcagaacattaactgaactattttcaaagcagaaaaattgacattgctgcctttaagaataccatgaatgtaagaaattgaaagaaattgtaaaatatcacataatatagaaatggcagttcaaagagaattgtggcagatgttgtgtgtgaactgttgtttctttgccacatgtgttgtatttgaaagttttacagtaagtttaaaataaaacattctgtgactgaaaaaaaaaaaaaaaaaaaaaaaaaaaaaaaa

SEQ ID NO: 24345 - DNA, 2291 bp, Homo Sapiens
ggaagaaaggctagcgggcgttggccgtatgtgggtgtcttgaggcagtttttcagttctttcatttaccaaagtgacatgcacctactaggtgccaggtgtttagacgtacatacaaccctctgcaaaatctttcagtgtagtcctctgtatgaaaagtttccagccaagaattgccactgcacctgagataagggggatcctggccattaaggaaaccttgccttcgaaactgagccgtgaggaactatacaaaatgggaaattgggacaaatcccagtggctcatgacactaagaagtaaaattacgaactcactgagctggaagtcattcaacgggaattgaataggtaactgcacttttgtgagattataaatataccacggagggtaacgaagctacagaagaatggaagaagacagcctggaagactcaaaccttcctccaaaagtttggcattctgagatgacggtgtcagtgacaggcgaaccacctagtaccgtagaagaagaaggaatacctaaagaaacagacatagaaatcatcccagaaatcccggaaactctagagccactgtcccttccagatgtgctgaggatctcggcagttctggaggacaccacagaccagctctctattctgaactacatcatgcccgttcagtacgaagggagacagagcatctgcgtgaaaagcagagaaatgaatctagaaggaacgaatctagacaaacttccaatggcctcaacaatcacaaaaatacccagtccgttaataactgaggaaggacccaacttgccagaaatcagacacagaggccggttcgctgtggagtttaacaaaatgcaggatcttgtcttcaaaaaacctacaaggcagaccatcatgactacggagacactgaagaaaattcagattgataggcagtttttcagcgatgtgattgcagataccattaaggagttgcaagattcggccacttacaacagtctcctgcaagctttgagcaaagagagggaaaacaaaatgcatttctatgacatcattgccagggaggaaaaaggaagaaaacagataatatcacttcaaaaacagctaattaatgtcaaaaaggaatggcaatttgaagtccagagtcagaatgagtatattgctaacctcaaggaccaactgcaagagatgaaggcaaaatccaacttggagaatcgctacatgaaaaccaataccgagctgcagattgcccagacccagaaaaagtgtaacagaacagaggaactcttggtggaagagattgagaaactcaggatgaaaaccgaagaagaggcccggactcatacagagattgaaatgttccttagaaaggagcagcagaaacttgaggagaggctggagttctggatggagaaatacgataaggacacagaaatgaaacagaatgaactaaatgctctcaaagccacaaaggccagtgacttagcacaccttcaagacctggcaaagatgataagagagtatgaacaggtcatcattgaagatcgtatagaaaaggagaggagcaagaagaaggtaaaacaggatctcttggaattaaagagcgttataaagctccaggcctggtggcgaggcactatgatacggagagaaattggtggtttcaagatgcctaaagacaaagttgatagcaaggattcaaaaggcaaaggtaaaggcaaggataagaggagaggcaagaagaagtgaccaagttctcttttgtgttttctgctggtattctggaggtgggaaggacttggagagttaagaaacacctggtacctcaaagatgactcatctacaggttgtttcctattgagactttcccagggaagcctgatttcactttgcctgttaatttcactctgcctgttaggtgggttttcaaaccctgatttaggattacaccattgacttagggcttcctcataccttgctgggaagaagtttctagtagtcctgtgaagattcattcttcttgctctttctcagcagaacaaaggagttcactggcttagctacagtgacgcattgaaacttgagtaattcctgtaatgtcagattttgattttacccaatttgtctgtagtgaaaaaactcttatgagcaaaagtattcagtaggaattacaatatgatgttattagctgtccagcataatatatacacagcaaagttttaataaatgttggttcctgcctgccttttaaaaaaaaaaaaaaaaaaaaaaaaaaaaaaaaaaaaaaaaaaaaaaaaaa

SEQ ID NO: 24346 - DNA, 2676 bp, Homo Sapiens
ctctctaggctgccgggcgctggtcgtcagcgccgaggctgggctgaggcgccgcggtaccatgaggcgccggtacttaagagattatggcatcagaaacccacaatgttaaaaaacggaacttttgtaataagattgaggatcatttcattgatcttcctagaaaaaagatctctaatttcactaataagaacatgaaggaggttaagaaatctccaaaacagttggctgcttacataaatagaacagttggacaaactgtgaaaagcccagataaacttcgtaaagtgatctatcgcagaaagaaagttcatcatccctttccaaatccttgttacagaaaaaaacagtcccctggaagtgggggctgtgacatggcaaataaagaaaatgaactggcttgtgcaggccacctgcctgaaaaattacaccatgatagtcgaacatatttggttaactccagtgattctggttcttcacagacagaaagcccatcatcaaaatatagtgggtttttttctgaggtttctcaggaccatgaaacaatggcccaagttttgttcagcaggaatatgagattgaatgtagctttaactttctggagaaagagaagtataagtgaacttgtagcttatttgttgaggatagaagatcttggcgttgtggtagattgccttcctgtgctcaccaattgtttacaggaagaaaaacaatatatctcacttggctgctgtgttgacttgttgcctctagtaaagtcactacttaaaagcaaatttgaagaatatgttatagttggtttaaactggcttcaagcagtcattaaaaggtggtggtcagaactatcatccaaaacagaaattataaatgatggaaatattcaaattttaaaacaacaattaagtggattatgggaacaggaaaaccatcttactttggttccaggatatactggtaatatagctaaggatgtagatgcttatttattacagttacattgagagatttcatctactaaagagcatttggtttttcaaaacatccctgaactgtataatttacaaaaaaaaaagtctcgtctgagaactgtgaactgtggaagaaatcaaaactattttttcttttaaaaagccacgtaatgaaaccactaatgaaatcccagcaatctgcttcacattgaagtggaaaaatatccaaaaggagcagcttcaatttcattgaggtgaaagtgcactatgaagattgttcacctttgctgcatttgggagttatatggttatttggtaacattaagaactactggattttaatgcaatcctgcataaaaatataatttatactatgtgaaaaaataagacaggacttaccactaggaaccaccaagaccaatcatcattaacttttttaagattgtgttttattaaaaaaaaaaaacacttaaatgtgtgcagctattttcttatgttgaaaagactgaaagtttaaaacatgaaaaaaatcaatattaaacattttttgttcacactgagatactgtgtatgtaaaatgccttaattattaataagccaatgtgttatgataccaatatctgttttaaaaaactaaaaccaaccatgcttctggcatgataaaatcatggaattaaatcaggggtttacattcttgtagagtgttcttgaaacactctctgcaccatttttaaaacttgagaatagttttagtatctctgatattttttgccagaatcatcatgtcatgtatgaatgtgttatccctatctaaggaaaaaggtgaatatgtttttgtatgaatgtttaactggaaatgtccatggacttggctaatttatatttactttttattgtacatagatttctaatatttttcattcctgtatcatttaaacttccttcatttgagtaaattcactaaatatttctatttttttgcttttttaaattctgattttatatgaattctaattctttttcactacatatgttttaaagagttacatacagtgatttagaatggtttacagttaatgctgatcttgtattttaaattccaacactttgtgtcactacctcctctaatggttagtatgatatgctagcagactgtatgaggtctttttttaaaataccacttttagtgtcagtgaaccaaattctggaatgtcttaacagctctaaatcttacttgtcttgaaaatgattggggtttaataccactgctggtggttcacacatcatcccatccttaatatgcctgacaggcatctgagcaaaggtttttagtaattgaatttctctgcagtagtccttcaagcacttgaatgtaaacctttagcatttattcgtttaatgactactgatacgaatctcaagcagatttcttgctcttaaaagttatgtttcactgagttctggttttgtgtagctatattttatatagctagatattcctcacagtgaacatgaattgtaataattggttatttccttaagtctttagattataataatttcagattattgcacgtctgtgatttgagaggtgagttatttaagaggccagttttcaggacatgggaatttgaattgtaaacctgttatctctgtgaaacttttaacatgataaaatataacctttctttgtgcttaaaaaaaaaaa

SEQ ID NO: 24347 - DNA, 2343 bp, Homo Sapiens
gctcctgctaaccccatcactgtggaaatgaaaggcctgaagacagatttggaccttcagcagtacagctttataaatcagatgtgttatgagcgagccctccactggtatgccaagtatttcccttaccttgtcctcatccataccctggtctttatgctctgcagtaacttttggttcaaattccctggttccagctccaaaatagaacatttcatctccattctggggaagtgttttgactctccttggaccacacgggctttatctgaagtgtctggggaggactcagaagaaaaggacaacaggaagaacaacatgaacaggtccaacaccatccaatctggtccagaaggcagcctggtcaactctcagtctttaaagtccattcctgagaagtttgtagttgataaatccactgcaggggctctggataaaaaggaaggtgagcaggctaaggccttatttgagaaggtgaagaagttcaggctgcatgtggaagaaggtgatattctatatgccatgtatgttcgccagactgtacttaaagttatcaaattcctaatcatcattgcatataatagtgctctggtttccaaggtccagtttacagtggactgtaatgtggacattcaggacatgactggatataaaaacttttcttgcaatcataccatggcacacttgttctcaaaactgtccttttgctatctgtgctttgttagtatctatggattgacgtgcctttataccttatactggctgttctaccgttctctacgggaatattcctttgagtatgtccgtcaggagactggaattgatgatattccagatgtgaaaaatgactttgcttttatgcttcatatgatagatcagtatgaccctctctattccaagagatttgcagtgttcctgtctgaagtcagtgaaaacaaattaaagcagctgaacttaaataacgaatggactcctgataaactgaggcagaagctacagacaaatgcccataatcgactggaattgcctcttatcatgctctctggccttccagacactgtttttgaaatcacagagttgcaatctctaaaacttgaaatcattaagaacgtaatgataccagccaccattgcacagctagacaatcttcaagagctctctctgcaccagtgttctgtcaaaatccacagtgcggcgctctctttcctgaaggaaaacctcaaggtcttgagcgtcaagtttgatgacatgagggaactccccccctggatgtatgggctccgaaatctggaagagctgtacctagttggctctctaagtcatgatatttccagaaatgtcacccttgagtctctgcgggatctcaaaagccttaaaattctctctatcaaaagcaacgtttccaaaatccctcaggcagtggttgatgtttccagccatctccagaagatgtgcatacataatgatggcaccaagctggtgatgctcaacaacttaaagaagatgaccaatctgacagagctggagctggtccactgtgacctggagcgtattcctcatgctgtgttcagcctactcagcctccaggaattggacctgaaggaaaacaatctgaaatctatagaagaaatcgttagctttcagcacttaagaaagttgacagtgctaaaactgtggcataacagcatcacctacatcccagagcatataaagaaactcaccagcctggaacgcctgtcctttagtcacaataaaatagaggtgctgccttcccacctcttcctatgcaacaagatccgatacttggacttatcgtacaatgacattcgatttatcccccctgaaattggagttctacaaagtttacagtatttttccatcacatgtaacaaagtggaaagccttccagatgaactctacttctgcaagaaacttaaaactctgaagattggaaaaaacagcctatctgtactttcaccgaaaattggaaatttgctatttctttcctacttagatgtaaaaggtaatcactttgaaatcctccctcctgaactgggtgactgtcgggctctgaagcgagctggtttagttgtagaagatgctctgtttgaaactctgccttctgacgtccgggagcaaatgaaaacagaataacttatttttcgttaaagtttgactgaaacacgcttctaccaaatacagtataaataattaggtagtcttaatgcctttcctatttttttttccttttcacacaaaatgtacacaaagatcgcgtaaggagtatgtatttttaataaaaatttaattgtattttttcaatattaaaaaaaaaaaaaaaaa

SEQ ID NO: 24348 - DNA, 4555 bp, Homo Sapiens
attgaaaaagaaatgcctcctgtgattgaaattattttatagctcttagcccgttctaccaaagatcacattagcagattacccctccctcctgtgatattatctttcttaaacctgaaccaaatatcaaaagatacaagtttcatgattaggatgaaatatatacatagggattttggtttattgaagttattgaaagacctagaaattttctttttgagagaaagggtaaagaggtgagggttcatgtcacttaacccctacccttttgggcaaattttgtctcaggtagtgtttcattccctaaattaatacctgtgcttccttgcctctcaccttcccagttacttctttggggtattactgtggcacattgtacacccagaaaaggcacatacagtgattattttgtgggaaatacttgattcttttgaaatatatttggagggggtagctagctagccactgtcaaaactaatgctgtatttacaggacaaaaacaagtagagttggacacctcagtaagagacagcattaactaaaagtactgactgccttttaaaggaatttttaaaactattctcttgcaataagagatccgcatttattaccactggatgtcttccttttttgtggccaccaatatagcagctctctttagagggattccctttctgctatgccttgagccaaactggctgcttttagaacaaaaaccataagtatggttttactcgaacttctctttgtttttattgagagaaatattgccttctttttggtactccagctgctaaagagtgctgagatatgttaaattattttttaaaagaaaatctccaaatacttatttaacttgtcttctagattcatgttgcttatattttaactattgagcaagtttattataaggaatgctgccatatagagaaagctgaagagaaaccatgggcagaaggcttttttctgtcttattacactggaccttcactctggtaagggcatcagttacttttctggaataaaaggcggagttagagcacttatcagatgctgtttcatggcttgttttagttaatttatcatgcagataactaacatttgggtatctttttgttttaggtcttattttctgactgttaggcctatcttacacataagttctactatcagtatacttggcagcatgactttttttttttttacagttaatttaatgaaaatcagcaccattgtaaatgatagtaattgtaacaacatagttactgggtgaaggagtaggggagacactcagtaaccatctatttacctagacacttatgcaggggtacatgctaggtggctttattcagattcgggtacattggaatcacatcatgactttgagtctgatggctgtgtagataaagatttaagcaagtgccttgtgtttgctggaaaatattaaaactcatttgggtgaaagcttcccagatgatgataattaatagcacttctgcctttttcctggagtaacttttagattgagtcacatatgatagtataaaagtccaaaattttctgggtttacctttgttttatttttcatatatatattcactgtctgcctggaaatagccttggtttaccttatttttttgtatatgtaaaactattcatatttgattttattccaatattatatatgatggaaaagccagaattgtctggcagaatttaattcttccttggatctctagttctgtttttaatatcaggttccttcatcaaattttactactgtagctctgtgatataatttcatttcttgtcaattatggtcacatatagacaagtacttggtcacaattagctcaaaagaatccccatttcttaaggtgctcagtcaatcacctttattttgagatggtagtttttcaagttagtattacttactagctttcttgatgaatataaaaatgttgtctccatcatacagagctgagcctcttgtggtatattaagataagtcccattcttaatcacagaagaacatggatattttagtttttggagtacccagaattgtaaagattttgtttcattttgttttaggatagcttctctgcctaatactataggatatgtcatgttcgttattgtagccacctccctcagatgtttttcactatttttaaattatataatgaccagtagattcacagtagcatgtacttgacaagtgccatggatatttaagaagaaggtaaataattttaatattttttgctgtaattttataggagcagtggactgtaagagaaatatctataaatcagagagtatttaggaaactttgtattttataggtggtcattaaagtgatcttcaggatataagatagtttacacaaactttattctcctgataggaaatttttattcattttcctaccactcagcacttttgttctgccttgtactgcttatgaggattaatgttttaaatttgctttatttgtgcttttcagagagttgtcataattgtggcagttgtgtttgtggcactgtaaatgctgaaattcatgggaaacttaccaaatgactgcttgagtgttatttcccattaaattgggtagctgtcacaataaccagaagaaatcttgtggcccttttgaagaaagccatgtatgttttgttacctaggttcatagtattttaatttaaaggcaaagagaagcattctacttatttgtcttataaaccattaatcgttttttgtgcagaagagagcttattttgttatactgctttgtataatggaaataagtcacattctgggggaaaaaaactggaattgtttgtattttgtttttttggggggggatctttatgtgaaaaatcagagctacttgttaccataagcccttactatcaacaagataattatttgtaatcacttttttatcccaggttggaattgctttccccttctaagttatcttcccttaataatatttatgataccaggacagtgagggtataagagcaaatgtagtgaggtattcaaaaatcctgcatatatggactcaaaagttctttagttatttgaattatatatagctatattattttattagcttgggttgtcagaagattgccaattttaagagtaaagaggagagagataagtaataaaaatagaggaggggaagaaaatggctcccttactggtcttagtaatcttctatatagttaatgagctaaaaaatgatacttaaagttccaggtttggtaccgctagcatagaaacattgcctttcctacacattcctcatcattgtttcctcagaaaattattttaagagtttgtgaaaccagattaaatatctatattcagtttggcctaatttttaaaaataaatatttatactccagcttttgtgtatttggtgtacatcaccacttatgcaaatcaaggatcagaaaactggaggttagccatctccattatttccttttgcacattgggtacagtgggtggcattagtatgcactagctgcaaagtcacagcaccttatggaaataagtatgtttattataataaaaaaaagttaagctgcatctctgtagattatttactttgcagactgtaaagctgccctatcttttccagcagaatttactcttccattcttaattcttttttgaaatatcttaaataatttaacattcctttataacttcttaacagtgtcaaaactggggtagaagggattttattttttcccaaaagggttccatctttgctatctgttgatcagccttagaaaatctaagtatgatcaataaattttaatggttgatggcatcctgtgtcagctggagtagttggttgtgaatattaaaacctagtactattttccctcagtaacatgtaattgctacattttttataagaaggtatggttagaaaaaaatgtgaaagatcacttaaaccaaagccagttacaaggagtaatctctcctgttggtttaccttcacctcagaactacaagaatattacaatacatagtgaatagttgtctgtaacatttctaccagttgtttcagtagcatattggtcttggcatttcttggcactgtggttctgctgtattatttgtgatgtcttattgtttgtgagcttttgttttttttttaaagaaaaaacaaaaactaagtgggactatgtatgtagatgtgtgtcagtaccaaaaagttattttctcaaatccctaaatttctgatttccattcaagtcttttaaactctttcctgctgaatagcaaagaacttttattttccactttcctatattcctaaaaagtgtgaacaatgcgtttcagttgactgtattgcatacttttttgctgaagactttttctgtaaacacaattgccttgttcagttttgttgtaaactgacttaccataagatgcactgttgataatgctttctgatgtgtgtttgataagagtgataaaataaaagcttaaaaataaaaaaaaaaaaaaaaaaaaaaaaaaaaaaaaa

SEQ ID NO: 24349 - DNA, 2057 bp, Homo Sapiens
ttcagaaggaaaccttggttagtccttgctgggtaacacaaagtggggtgagacgacagaagccgaattcatggaaggggggtcttctccccaaaactctgtgtggtgggaaaccagctatacctccccaagccccagggcctaaagagaagaccccctaagccaaagatgtggccacttaaaagcgtctcctgcctcctacccaactgagtgcctgggcccccagcttggccaagatgggcagtacgttagggtaagaaccccatgcttcaaacttaaggactgaccatcacctgcgtcccaagtaggacccttcctcccttctcggggctgcccctgcaccctgccttgaagaccacccaagcggcctccagtgtgggcctggtccagacattgcagatgcttcaaccgtgatgtcgccccaggcctgccaggggtgtggtggaggggaaggccacgtgctccagggagaagccctttctggagaagcaaggctgtcctcccagggctgccactaccagagacctgggggagctgaattccgaacagtgatggtgacactcagcacctttgccacagccggggggaaccggcttctgcctctgggatgggctctcatcaggaccaccgtgcagcccagccagggaggacatgagaagggccagtgggggcctcaatgaaccagaacaagccaagctgaatggggtctgtgtgctccagggccctcttcagccccctcccccaaaggtctgggtccctgccaccaacctactgaaggccggcccccggctcacctcacctgagcacctgcaccaggccccaggcacatggctgccctgaactcagatcacctagaccttgtccctgccccacctttgccccatcctagccccagaagctccaagcttcaccgcaggtgagaaattgtgctcaatgggcagaaactgctatacccccagggcatggcccacattttggcatgagggtgtctttccagagagcttgggttggctggagagaggctgtctttcccattccttgtccagctaggaataaaggggaaatggtcctagcctggcccctacacacccaggtcccacaggccccctccccactggaatttcaccaaccaacaaggggaaagtacgctgttacagcatagcggtcaggcccagcaggagcttggcacatgatggggaggtggccagctccaggccctgcccgaccccatcatgtgtatttggtgtatggggtgtggggggtcacaccagaagctggcctggggtctcttctttgctggacacagctccctggcccctgcccccagcccctgcagcccctgccggactgtggaagccacatatgggaaaagtcctggcagacaatgtggcgggatgactgggggcttctccctctgaacctgggtccagtgtagcctggctctgagagaaggtggtgagcatgtggagaaggttccatagtccactcttaggggaaccagcaaagcctcatggcagttggctccatctggacctcccatggtcactacaggatggtggagcagggggcatcttttagcctccccccgccaccacatccaggccctctcaggcacctcctgcctcagcccacacctgcctcacccattgcccccctccccccacctactgccatcccactcctctgccagccacttcccagccgccccaccccactccatccaccaaatcacctcctgacttaatcctttctggaaggagctgccgcccaggaaccggtattgcctagagcctccaggaggggccctcctcaggcctccagtggccccatgcccacctgcctgaccctccactgcccctggaagcaaagtgcctatcagcagcgttgcgtcctctggggcccccggtcgggggggagggggtgtgggctaaccttggccaccaccacaaaaggaatgtgccagaatgctgaaccttcttgttaatgctatgaccgtgccttgaataaacaagtcctcccaacctcaaaaaaaaaaaaaaaaaaaaaaaaaaaaaaaa

SEQ ID NO: 24350 - DNA, 3633 bp, Homo Sapiens
ggagccgtgcgaagaccccaaagggctaccacttggcggaagctctctctactcacaaccttagggttgcagtcaggggtcaccagggcctggctcagcctgggcagtggctggtcactgcggcctgggaaagaggtcctcggggtcctctgcagtagccctcacacgtggggaaggatttgcagttccctgggggccctgcttggtcctctgccacccccgagagcccagagtcactggagctgctctaaacatagtggcaggcagtgtccggcatgacctcatcgcctccacgtcccccacaacacccaccagcagccgccttgcctggcgccagccagtgacccaccctcttggctgggctgtggactcaggtgtccggctgtcatgtcctgtgagtcggggctgggcggggagcctcctgaggtgctcctctccctctgcgtggcagggaggaggctggcagccctggcccagtgtccagatgggacaaagtgggggtagggaccacagccagggtggcgtgatctggagccgcagggctggggggacttgccagggctgtagaggggatggtgtgggtgtggccagctgtgctgagggaggggcatccgatgtgtgtctgtgcatctgtgtgtggcctgtgtctgtctgtctgcctgggtgtggggtgagggggactctagtgctggaggctgcccagggccttgagagccaggcaagctggacgttcccaggaagagatgaggacccataataggtccaggaccaggggtcctgctccgtgaagtttggagggtccccaaggcttctctggccactgagcttgggccccagcattctccaaaagagggcaggcagttcatgagtctaggggcattcctctgcctctggaaccccacctcagtctgtcctggactaggtgggctatggcccacccttgggaaggagcctatctgtagcccccaagccccagtcagaaaggcagagtttgggggcaagctttctctacaagggtggggctggcctgggcactgagtggacactgtcctcctgcctgccacctgcccctctccctcagcttggacaggaaccccggcctctgagtgaggtccgcaaaggatgctgggtagtccccctccgtggctctgggtgggagcttggcttggcgcggctctgggccgggatggcaggacctcccagccactgcctgggcacagacctcccaggatcccaccagcccagcccctgcggctgcaagagcagcgaggctgggaccaattaccgagtcccgcagggcctggaccctcctgctcctcaagggtgaaggtgggggttcctgttggatgcagtttcaggtggagggggctctctggcctcccgaacctcggctctctccagttcagatcctaccttctgcccacagctgaacacctcttcctacagggagcccccgacctcccagccactgtcctccagaggccatagcatcttggtctccttctgtctgctgcctcggtaggcttcctttgggacccgtggaggcatgtctgactcctcaggagctctgtatttagtgggccttgtcctggggtggcggctccaggcctagtgagacatggcagaggccagggcagggagaatgtgaagctggggcgagggtctgtgacgaggccgcctgacgcctcagcaccaggtggacacagttgtgtgcatgtccctcttggccaatgacaggtccggttcaggtggcccttgcccagggacagaggcttctcctggctccgtgccttccagctctcagtcctggtgtgcacagcgtcaccgggcttccgatagctgccggcctcaactctgggagagggcaggtggggcggcaggaggtgcctgtgctttcctaggcatgagcaggcatgagaggtgcacatgctcctgctcacctgggcggcgcctctcaactgttaggtgtggggttagggttcacctgacgatttgccgcagtccagcggacccgagagttgcatgcagagctggggttgcggtgcgagtggggaagggtctgaaggtgtgggtgcagggggctgtgctggggcctgcaggctggggtgtgcggtgtgagtggggtgcttttgtagtctaaggggtgatgtgccagtcgtcgtgtggtgtcaggtgtcagtcgtcgtgtggtgtcagggtctcttctactcggtgctaagggccagcaggaccgagaggggtaggggcttctctgggtcgagggccacagggggctggtgggggtgggagtgctgaatgcacagggtgatgctgggcttcgggtagcagatgtgctgtggacagtcggggtcgggtcatctgcggcgagcggggcttctgtaggtgctcccagggccctggtgatgtggaagctgttctcaaattctggggtgttgtgctgtggtgggcatgtacctagggtgttatcaagggctgtgcccacttttaggggcactgggcaagagtcggggtgtcagagcagctgcttgagctccgtgggggccattgtgtggcccttggggtgtcctgccctgggggcggctgcagggccgcttgtgtccctgggtgttgctgcctgctgtgcggccttcccagtgatgtttgtgtgtgtgtgtgtgttgggggggttccatgggaagcaggctggggggctgggctgctccgggtttctgaggcaacagcagggaggggccaggaaactgcagctcaggaaggaaggccggccttgcaggagggggcctggggccagcttgggctgagcaggcgccagacattctgtgctgcggccccggcccccactggctgggagctcctgcccaagttccgctggccccacccttgtctccacctccatgcttgtatggctgcctttattcagaccgtggtgacttgggcttgggtctgtgggtgacctggtcctgtgcttatgtgagccccagtccatttgtggctctgtagaggcccagatggggctctcagtgtaccctgcaccgtggggcatgtgttagcacactccggtccccagggtccctggagggcagtgtccactctgactaccctgtcctgggctggcccagcctccttctcccctgccaggctggtaagtcgggagagggagaacatcctcaggggtcatctgtctcccagccacggaggggcactgcagggccggatgcctgaagctgtgtgtttctttttgttgcttgtcctggcattggtgacagccagctggggctgccacataggctggagggggcaggcctgtgttctgggggctcatccaccccttcttgctcagggacaggcaacatctatccatccatttgttattgagcacctgttgtgtagtagaccctgttttaggggttaggaatttggcagagaacaaaacagacaggtccctgcctgtgggaagcttccattatggtgagaagagacagacaatcaacaaatccacaaacaggtgtggtgactcatgcctgtaatcccagcactttgggaggctaaggtgggcggatcacctgaggtcaggagttcgagaccagcttggccaatatagtgaaacccctgcctctacttaaaaaaaaaaaaaaa

SEQ ID NO: 24351 - DNA, 3395 bp, Homo Sapiens
gtgggtgggggccctcgcccaccacacaattcagacaagagctttgtggccctgtgcaagaaaggacctcattattctttttaccttacagaatgttgctgaggcacagtgcatcgccaaccaagttcagctcttctacgctactgatcggaaagagacctacgggttagtggagacctttaacctcagaccaaatgagttcaaatatatgtctgtcatcgctgaattggagcaaagcggacttggagcagaactgaaatgtgcccagaaccaaaataagacttagaactgtacaggttggcccttcacctagttgactcagccctcgatagtctagagcccaccccctcctcaggaactcaagagctcagcatttataatgagcagttggtaatgagttgccctatgtgcttgtcgcaagcagtcacagagatgagccctattacttgatattcaggaacaaaggtacctgaacattctgataattatctcagcatacttgaggtttccttttttaagtgttcgaggttataacaagagacagccaaggacctacaagacagttgacttgattttgcacagtgtaacagcgcagttgcattctggccactttgaccttatagctcccaaatgatgagtttgtcatctttatgaactcatgacaggataataagcttgaagacctgctgtagttagatatgggctttaatccttcccatgcaccagtcagctgaacaaaagcataagccaaacatcctgtttaaactgtagaataaccagatattcccatcaggttaaagacttcatctagatgatgccccccagagatgcctttagtgtaagtagctggcttggggtatcagcaaatttcaggtatagttagataaacaggtacagggcctgcatactattaaaccatagtttgtggcacccgcttttctaactccacctgttagaagctatgtgtttgaaggaatgaatcagtgcagtataaataaaattcttttgtaaggagaagattaatcctggtttgcatgatttttttaaaaacaactctaaacatgatacgaaaaagtggatgaaagcaaatgttcccagattggatgtggggaaaatatagcaataatttttttttaagtctggcttacaatgtttgttatacaaaataatgaaatctgagttatgtactgtccattgtgtcagggctatgggctgattttatcaaaactcatcttgggactgaaaaattgtttggaatgccagaaataagaaagttgttctccagagctggaaacccatctttcgtttgtagtgtcactgttgtggctccaagctcagtgataggaaaggacggtggttacacaccagccttctgaacccaaggcccccagtattgttgtcagctgcctttaccatggcatttctttctctttctttttttcctgagatgaagtcttgctctgtcttgcccaggctggagtacagtagcgtgatctcagctcgctgcaacctctacctccctggttcaagtgattctgctgcgtcagcctcctgaggagctaggattacaggcacatgccaccatacctggcttatttttgtattgttgtagagacagggtttcactttgttggccaggctggctggtctcgaactcctggcctcaagtgatccaccaccttgacctcccaaagtgctgggattacaggtgtgagccaccgtgcctggcctgacatttctttattgatctaacatgctccactctgctgctcctgcctaagatctggttatatgacactgaatgtggtgagtgggaatttaagcagtattcgcagtttgtgtgtgtgtgttttcttccttccagaagaatttttataggttgggcctgtccctaagctctttaaatagggtggacatcccactattctctgagccgtgtctattttgttgcacctttgagtctatgtattgagagagacagatagtatttttttaaactggggaagctgctatcctttcactatttctctaaaggttgagctgttaactaatgtaaattctggacctgcttctggtcctggcagtttatcttttgagaaacttgagtcttatctgccctgccattttcattaaatgccttctgaccttctgaatgttttgggtcccaagaatttttgacatcagatggggttgtttttattggtatccagttatgtttgcttgtctttccagatgggcccagttattagccatacatagtacattgatacacctccaccagcgggtgaggaaatgatggaaaaaggagtaagaagtggccattcgttttaatcattcctcctggatttgtcctcagtccccaactgccaagtaggatgtgtccatgtataaatgtgtggggcatgactaaagtaccacgtagctgttctttatatttatttacctagaaagatctggcaaagaactcaaagaaaattgtaccatttaatcagtaaatttgtcccctggtgctagcatggtgttatagaaagtggacaggctttagagttaagtgaatctgggttcatatgttagtgttgctattcattagctctatactgttgaacaaattgcttaaactatctaattttggggttttttttccatctaaaatagggataataatatctacctcataggattattgtgagaattaaattaacttcactatagtagaaaatatcaactaccatccttttctctacttcccttgcccctcattaaagactaatacaagttagcatttcagatgtgtagatcattctttattccagttaaaagaacaaactttatctcatcagttctgaaactttaagatgcagtagcatcacctaaagtgcttttaaaatgcagattctcaggcctcaaccgtacaccacccccccacacacgtactaaatcaagaatatgtgcagaaggtactgggaatctacttgttaatatgtgctccaaatgattctgatgtaggtaattagccagccacactttgagaaccactgccttatctattctttacaaaaatgtacattgccaggtctttctttcctgtggatgctaactataggatatttaggttcctctgttctttgtctcccatagtggccccctttgcaaactccaaatacattatatttatttattcttgtgtcttttttcccccactagactgtgagctccttgagggccaggacttatctctgttcgcagtgccaaggacatggcctggaccatagaagatactcagttttttgttgaataaataggtaatatggatttcaaccaaaaaaaaaaaaaaaaaaaaaaaaaaaaaaaaaaaaaaaaaaaaaaaaaaaaaaaaaaaaaaaaaaaaaaaaaaa

SEQ ID NO: 24352 - DNA, 887 bp, Homo Sapiens
gatcaacaatgctggggtgatgatggtccctcagaggaaaaccagagatggattcgaagaacatttcggcctgaactacctagggcacttcctgctgaccaaccttctcttggatacgctgaaagagtctgggtcccctggccacagtgcgagggtggtcaccgtctcctctgccacccattacgtcgctgagctgaacatggatgaccttcagagcagtgcctgctactcaccccacgcagcctacgcccagagcaagctggcccttgtcctgttcacctaccacctccagcggctgctggcggctgagggaagccacgtgaccgccaacgtggtggaccccggggtggtcaacacggacctctacaagcacgtgttctgggccacccgtctggcgaagaagcttctcggctggttgcttttcaagacccccgatgaaggagcgtggacttccatctacgcagcagtcaccccagagctggaaggagttggtggccgttacctatacaacgagaaagagaccaagtccctccacgtcacctacaaccagaaactgcagcagcagctgtggtctaagagttgtgagatgactggggtccttgatgtgaccctgtgatatcctgtctcaggatagctgctgccccaagaaacacattgcacctgccaatagcttgtgggtctgtgaagactgcggtgtttgagtttctcacacccacctgcccacagggctctgtcctctagttttgagacagctgcctcaacctctgcagaacttcaagaagccaaataaacattttggaggataatcaccccaaaaaaaaaaaaaaaaaaaaaaaaaaaaaaaaaaaaaaaaaaaaaaaaaaaaaaaaaaaaaaaaaaaaaaaaaa

SEQ ID NO: 24353 - DNA, 2295 bp, Homo Sapiens
acgaccactacatgtacttgaaccatggacagcagacgatcccgaacggactgggtatgggggggcagcacaattactttgggctttgggtggatgttgattttgggaaaggacacagcagagccaagcccacgtgcaccacgtacaacagcccgcagctgtcggctcaggagaacttccagtttgataagatggaggtgtgggcggttggagacccctcagaggagcagttggccaagggcaacaagagcatcctggatgcggaccctgaggcccaggccctgctggagatcagtgggcattcgcgccacagcgaagggctccgggaagtcccggacgatgaatgaggagccgcctgagccttcctggagccaggacctggattcctctgggtagagggcaccgcctgcagcccctcttccctcccacatggtttaactgtaatagcgtaccgcacgggtcacagcctggtagtcccacatgtgccaagaagacgccctctgaagccatgtcctgactcatgggtggatctcccagaaatagatgttttttaagttttcttttttgccctacagggtcaccctcaggatctctccaagaaatcttgtgtcaaattagtaactcagtcttatactttgttcttttttaccaacgaaatcctaagcagctgagacctttcagacccccgctggcattagggaattccgctggcattagggaattccgctggcattagggaattccgctggcattagggaattccgctggcattagggaattccgctggcattagggaattccgctggcattagggaattccgctggcattagggaattccgctggcattagggaattccgctggcattagggaattccgctggcattagggaattccgctggcattagggaattccgctggcattagggaattccgctggcattagcattgctgggatctcaacttctctattgaggagggggttcctcccgctggggttcatatggcctcactcaggccatccctgttagaaggtggtacctgatggtctgttctgacgggtgagggacagaggcatctggatgaaaatctcgacgctttctgggaacagcttccaatggcatgggagttctgtatttaaaagcatgaactgtgtataaaatggggaaatggaggcaggagactttgaggtaacatggtctggtggtggcatgagtcctcagaaggtatttgtaataaggttccacacccagctctctcagctgtttttaaatgaatgtgtgtgaggaacagatgggaaagttgggagatctgtctacagagaagcaaagttgtggttctcttgctaacttcaaggtgagggacattgggcaccctaagtttgggaacttggttgataaatacgtatatggtccattccataaatcagtggtgagtgactggcctgggttctagacctctgggaaccagcacctgagtcacagctgtctaggcctcggtgctggcctgggttctagatctctgggaaccagtgcctgagtcacagctgtcagtgcagccatttgcccagggctgctcccgagggggatgatgggaaattcagcagtgtagactcactttaaacaagctccggtgatcctgaaatgctgaagatcgtgtaggtgggttgtggggtcagcagagctgccatctgcccacgtctggaaaacaacacacggtgagtcaccggttggccatgagatctccccacttaaaggtgctgtgagcttgtctctaagatatatacctcttccttttgtcttttgctgtaagctttgaccttttgcagatctgatgaaaatacaacctcttattgtatagtttgccttgattataagccatagtaaatcgagctgttcgcatttttgcaggccttgcattttttactgggaggttcatcaaaccttccatttagcaatagccctgactcaggcagaatgcctcataaattagccttcgaaagaaaagtgcacgctcagacagtgtgtggaggggcaggagcgtgatgcagacaaggacttagtcatgactgattttccttagccagtttgtaatggcttatggggaacattgtgagcttcctacctgacatgttggcagaagtagaatattaggatcctcaagcatctctaccgtaagtccaaagaatttaggtccctattgtcactttgttttgcaatgttttttataaaaatgcaattaaatacctcactattaaactgccatgatgccttcagtttaaaaaaaaaaaaaaaaa

SEQ ID NO: 24354 - DNA, 2000 bp, Homo Sapiens
cagctttctcactgagaaggtcctagcttacccctgtgtgctggccttggattcagccccgagagaggggagagaccattcctcctgtggagtgggttccttatcaccagaccggccactctcagaactggcgtccactgtaaatccaggtgccttacgtgtggctctgtcccttatgctgcaggggaaagctgcattgccattgttcccacctcctcactggcagaaagatgccagggctgttagcactgtctcctcaccttctgtttctcattgtggctcctcaaatgggatttgcatgttcctgtcaagcgtaacaacaatcccttctctctttgacagaggcccaggtgggacagtttctactatttgatatttgagtattatctgggatgtggttctggagctgcccagagctgtgcttagtagagtgtgtcttggaaacatgcccctgggcacactgtatctgctacattagtgggctatctcttatctgcagtgttcgcttttgctagaaagaggatgtggaggaaggaggaggtgggcaatctggcttgagttgtgctgtatcctcttccttgttagcttgccttagtctcactggagaccatttgcggatagtgcttggtccatgcccagcaggacagggctttgctgcttctgaaagtctggtgttctgtatctggggctgtgggttcctgtgtctagctgctcaggaaatcttgagaagcattccactctggggtgtaaaccagtatgagtttgaaattcaagcgtttgtacctgagttggggagagaattgcaaggcatactttctctgaaagtaacagaaccattcaggctgccatgttattaaggaatctgaactgttgatagcagttaccttgtgggtgatacaatgggaggcggcaaaaaaactacctgcataggagaccctgccctttgtcaagagctgggagcacatttcatcagagtagcaggcccacctggtgccagagggcctgcccctcctgcttctgttcctttgccttgcagtctcctggagagagcctctcttttcctgtacagcctttgggccaaaatgcccttctagcttctccaaagaagatccgagtttatttcattctatgttttaagaggtaaaaggacataacaagtgaaagaagttttgggctaaagtaggctatgtctccttatgtattactcaatactgttttgcagagaaaacatttttcaagcatgtgcttcctgaagacacctcagtctttgggccatttgatttccaatacatagggtggaagaatgtgattttggggctgaccataaactggaaatttgtgaaatggcagtgattgggcaatcttcagtttattttttcagttgaagtggaactcatttctggaatggatttaataggctgtgtctaatgtacaaactgggtgagtcctgccttagtgtgtcctgccccaccggtacgcttccaggatactcttttcccctctgtaaagtcactttcttctgatggccagtgtcactatgatgtcagtgaggtctggggatgaggacagtgtgtcctgaaattcacaggactgactcctcaccccagtgcacgaggattcctgtggcatcaggtgctgctgtacctggtgtaggagcctaatcattgaaccattgtgttactcacattccatgtcacagaacatatcagcctcaagaaggatttggtggaggtggatttaccactggttttacaaaggaccgtgtaaagtcattgaagttgtgaaagtctattttttttcctgtaaatctattttttacagaatataagaaacatcaatgacctgatctgtccttcctcctccttcccgcttcccccaaaatcacattccagtttttattgtctttgtgtccaaagtaaactaggtgacttatttgtataaaatgttattttgccacatgagacagtaataaaagaaagattttcacagtaaaaaaaaaa

SEQ ID NO: 24355 - DNA, 2136 bp, Homo Sapiens
gagcttagctaacattgccttttcactctatttttctcagatattgtaagcattctgtttttcaatattgtagttaattttttggctttcaacagcagccctagtaatggtggagttgttaattaatgtgtatattgtactgaatttctgtcagttaaggggttcactgctttggtggaaattggtggaaattgctagcaggttccacgatgtttatttttttctccatgttgtatatcattaccatttcacatacgcgtttctatttttcttcctctcctcctgatctccttaaaaatgaatctagagttggtggctttttccccctcctctttggccagttccacagttcagttcttcctgaaaacagggatgatgaacttgtaggatcaggacaaatgtgtgtttttcaaaaacttaaggctgggtgtgaaacaccttctgtggacaaggatttgtaaacttctctcctccctccagctgcggccccagcctaactgatagttacttgattcagtgtgctagacacttaaatagcatctatgtctctttcaagggaatttgtcaaataatgctgtttagctaattgttgcaagcaattgcatattaacagctgtgattttgttggacagcaagtattatggccaaagccagtttcttggcatttcaaaaataatgcaataaaaactagttgaggttagctgaggctggaaatgcctttttcatggtaaatgattcacttctatatttttctttctttttctttttttttctttggttttcatcctggattcatcccctgatcttaaatcaaaacgtcagatcaatgaactatgaactaaagtatttttcttaagcctattgagtgattaattttttaaaaaatgtttaaatgcatatgcttttctttcagcacaaacaacagcaaaaacttttgtaataactaacttacctttgcatgtatgaagaactgagtcatttatttccctaacttactcctctttcaagtaacaggtggcagatcataaaatgaattctttattgtatctacacactccacattctttactgtgtcctactactgtatcttggctccctgctgtattaaacaccatcttaagcacttgttcctgcaggactccttcttgacattttgtctcccccttcaaagtcactcaaagagtgggacttcatcaaaagaaatgaattagtctctatcacaccgaatactaagatttatttcctctgatggtacatagatttctctctccactaagagggtcactctcatagaggaatgtcttgtcagttttatacttgctgaggctagactgacaataaaaatgagctgggcagttaaattagcatttgttactatattggcctataaaggatcaggttgatgataatacctctaaaaatatgcaataataaaacaatagttatgaaagaaacttgaaaggtttgcaaggtttctcctatccctgttaaaattatcatttattatctctttgtcagtgttagtaaggtaacccatgacagaataatttgagtgatagttcatcatgcagaggatatgatcaagatattacctaatggttttatcctgaaaaaggtgtatacttttagggcactgttaacaatgcgagtgaaaccaagatggtgcaagttccctttgcagatggcgtgggcacacttgatttttattatgagtgaatgtaatctttctgtattttaccagagttacagcaattacctgaaaagtttcctaacattttaataatgttagggatttcgttttggttttagttgtcctcaagagacaacaggttcacagtaatttccatgatgttgggtgtggctaagctggggattggttctgttccccctgctcccgtgtagagaaaagctatatttatactgcattctttctcaactttcaggtaaaacaaactatgatttaaaaaaagaaaaaagaaaagacaggtacttttacttcaaagagtgctttgctacatttttatttaaaccaaaaatcaaataaaataaggaggggggctgggtatactttaaacaaaaccagtcctgaaatgctgttattctcaaagtacattccgaaaaaaaaaaaaaaaaaaa

SEQ ID NO: 24356 - DNA, 2489 bp, Homo Sapiens
gggggctgttgtggtaactggcatccatcggagtagaagtgctaaatgctgtgcattgcatggaacaattccacccaacggagaattaaccctcttaaaatgccaggtgtgttcctgctaataagcactgataaaagcacaaagaaaacctaactatttgccattgtacaatggcatcagagcagccacactgcagatttcttggttgatgcccaagagtttagtgggaggaaatcactaaattatttttatctgcattttgaaggggtcaggctatgctgggaattgtttttcattaggccagagtcccacagttggatcgagctatagctctgctcaggtcatttgttggtctacatcgggacctagaagccacagagttggtgagtgcagcctgtccttgggcgctatcagatcaccccagtccccagaggggatgctggtggctggcatagtgatggagaactggccacaaaggaatatctttccagaggtttgttgtttttgtttttgtttttgttttttttggtggtggtggtggtggtgttttttgctgtaacaggcaaaggagcagaacactcagaattaaatggtctgttgtctcataaaaaccaactatgtaatcccagcactttgggaggccaaggcaggcggatcacttgaagtcaggagtccaagaccagcctggccaacatggtgaaaccccatctctactaaaaatacaaaaaaattagctgggcatggtgatgcacgcctgtaatcccagctactccagaggctgaggcaggagaatcacttgaacccggaggcagaggttgcagtgggctgagatagtgccactgcactccagcctgggcgacagggcgatactccatctcaaaaaaaaaaaagacaaaaacaaaaacaaaaaacaaaaacaactatgatgctcttaaagttaaaaaataagcacagtggctaagagaaataattcagtttagctagctctcagaccactgcagactgctgcccactgatccctgcatttctctcttgctttactgtggattggctaattatttcctgatttattcatttattatctaacacacttggagtgcctgctatgtaccagtactaagaaaaagttcctgacttgggctctttatatgcgaagaagggtggcaaatctatctgttactacggagccacgtgccaggtgctaaggtggaggtgtgctcagtgggtccagagagcagagagaaagggcttcaggtgagacctggcagaggttcaggatagcagggaatctcctaagtgtcccaaatgcgctaatgtttgagctagatcctgaaagaaaacaaggagttaaccaaggtgaagaacaaacgagtggaccaggattccagagaaagaacactgtgcaccaagccacagaggcgtgaaacaaaaggctctcagttgtctagtgtggcaagtggcaggggtgcatggggggagggtgtcggagtggtgccctggagacagggagagctgcgacagattcctggggacggatccttctgcagctcaaagataggagaggcccttagacatccctcaaggccatatgtcaatcaaaataattaaaagtaaaagaaccggaaggcaggcttatatattccaacatccatctagtttttcccccaaaaaaagcttttgataaaataagatgaagtgccaaaaagatgcatgtgttcaatagcgcagcagaaagtgaatagagtaaaagtaataaaaaatactcggccgggcatggtggctcacacctgtagtcccagcactttgggaggccaaggcaggtggttcacctgaggttgggagttcaagactagcctggccaacatggtgaaaccccattactactaaaaatacaataattaggcaggcgtggaggcacgcacctgtaaatcccagctacttgggagactgaggcaggagaattgtttgaacccaggaggaggaggttgcagtgagccaagatcataccattgcactccagcctgggtgacaaggcaagactccgtctcaaaataaataaataaataaataaataaaataaaaaataatctctacaaaactgagttattgctaattctgggtagcacagcacaggagagcgtgcttgggtttggagtctgacagaactgagtgcaagtcttggctttactaacttggctaatgccactgtaccagcactttgggaggccaaggggggcagatcacctgaggttaggagtttgagaccagcctggccaacatagtgaaacgccatctctactaaaaatacaaaaattagccgggtgtgatggcacatgcctgtagtcccagctacttgggaggctgaggcacaagaatcacttgaacccaggaggcgggaggttgcagtgagtagaggttgcaacaagctcagatcgtaccactgcactccagcctgggcaacagagcaagactctgtctaaaaaaaaaaa

SEQ ID NO: 24357 - DNA, 3913 bp, Homo Sapiens
gggggggcctcagggaataaactgtttcttgattttcagtcaatgaaaattattaaagagaatgctgatgaggacagtgcaagtgatctctctgattcggaaagaattcccattcctccttctcccctcacaccaccagatctcaatcttcgagctggagaaattgatccagtatactttgatcttcaccctggtcagggccatacaaaacctgaatactattatcctaatttccttccatcccctttcagctcctgggacctacgagatatggccctgcttctgaacgcagagaacaaaacggaagccgtgccccgagtgggaggacttcttgggaagtatatcgatagacttattcagcttgagtggctgcaagtccagactgtacagtgtgaaaaagcaaaggggggcaaagcaaggccccccactgcccctgggacctcaggggcactgaaaagccctgggagaagtaagctaattgctagtgctctgtccaagccactacctcaccaggaaggggcttcaaagtcaggcccttcccgaaagaaagcttttcaccatgaagaaatccacccatcacattatgcatttgagacttcccctagacccattgatgtgcttggtggtaccaggttttgttctcagaggcaaacccttgaaatgaggacagaagaaaagaaaaagaaatcaagtaagagtacgaagctgcagcgctgggatctgtccggcagtggaagcagttctaaggtggaaaccagcggtcacattcgagttcccaaacaggcagctgtgattctggactcagcagattcctgtaaggcctccaaaacacaagcacatgcacatcctaggaaaaagggaaaggcagagagctgtggtcatgccactgtatcgagtgagaaaaaactgaaaacaaacggagtaaagcaaaacacatataaactaaaataaatatctaaaatgctgaattgccaagacctgcaggtacctcaatgttagagcgcttccaaaagtcaaaatactgtgaattttaaggaattttacaaatactgacatttaagtagttgactggcatttttgtccacctttatttctaccctgagtggggttattttcaaagggaagtgtctttcaataagcctttctttgtattgtcagtcttaggcaaatgagagccctttagataaaaattatgtaaaatatgtgccatataaaggaataaaatggcacctctccagggaaagtgtcagtgaaacctcagctacagtagccggtctgtgtagagcagctagtggtgttacctccccattttcacatgcacgtaagtatatgagatagtgcagactgtttcaaatggtgtggaatcctaaatgtttaaaataaggtccttcttgcccactccctcgcttacttttttataaactcctcaagcaaaatttctgttcattttacccttaggagaagctttagttcttcctcaagtcagggagtagtgagtttgtattttgagtagtcatttctcactaagctggttgctttctagagagacagtggaatctagtactttaatacattttctctgacatggttttttttttcttttttgaggggcattttaaacttagaggtggtggtaaaacctacttttgagttctccgaactgaggttaaaataacttgcagaattttccaaagtcaatgggcttagcatgattactgctgtttggtggggctgagaatgaaatatttgacattctggaattgctggcatgtaaagcttctccagagaggcaccccagggaaatcactctttacaatttgtaaaggaagggcctgtaaaaggatcaaaacacatggacctacattcagtgtaatagttacaaagttactgatttgggttccacaccctgtggtccttagtcaaaaataatgatctgtttcagtttgcaagagcaggattttattattttgcttggggtgaggggcgggagagtggaatatgagtaaggttgctgaatgaattctaaactcgcttatctggtcttcaggcttcccaactctctccaagccttcttatttcactgcagttaaataacatcttcttgttcctatagttgtgctgtgagttttctgttcatatttgcgcagtgtattttaatacggcccatgtcattatagttgattttatccctttaaacaattactgtatttgtttttgacgtagaggtttcaattttttcaccttgggggcaaatgaaaaacttggcatttttcatttgggaacatataatagcttgtaaacttttcagacagcagtaaatgtctgaaaaaatatcaaaaacagcataaagacaagattatgtagctctaattatacgtatataattataaaaaacaatgtgcaagggttatattttaaggtcttttaaaatctgattttgatcataccaaatgacataatattttttatggtagccttttactttcaagacttaattttcagacttgtacaagttccttcttacattctttccctctcacaccatcctactggagaaagcatacttttatgctaagatcttactttaagctttttatgtgaacaaaagatgtacatatagtaagtattacttccgtagtcctcaaatttactataacttttgtacttagtatatgttttatatttggaaaacagcactacgcttagttttcctgtagttcctgagtgatgtctgtgtgttccttgcctgcccttttttgtgagcacagattagtctgttatccatggctggcacttcacttatgatcctttctctgctagatttttatgcagctctctatgaagtttcatggcccatagatattcaaaagcaagatattctatacatatgtgtatatgtatatatactccttatgttaatactaaagtgtttatgctgagttgctgcctttccccgtcatgtatccatgtgcatgctcttagagaccttgaatggttgagggtaaagtgatttattagtaattctacttgccttgtgtatgtctgagctgaaaacaatcgtgattaagaaatttagaggtggctgggcgtggtggctcacgcctgtaatcccagcactttgggaggccgaggcaggcggatcacctgaggtcgggagttcaagaccagcctgaccaacatggagaaaccctgtctccactaaaaatacaaaattagccgggtgtggtggtgcatgcctgtaatcccagctactcggaagtttgagacgagaatctcttgaacccgggaggcggaggttgtggtgagccaagatcgtgccattgcactccagcctgggcaacaagagggaaactccgtttcaaaaaaaaaagaaaaagaaagaaattgagaagtaacgcctcataatatttgttcccagctttttaaattgaagctggttgcataatctggggaatagtcataatttcatgtgttatacagtttaaaaagcctgcaaaagtgactttgcttgtttactttctgcctcagattgactattttaaccaatattgtcacgactagatcatagctcctagtgaataacatgaggtgttttaaagttaggtctattacagaattaacataagcacaattttaattttatgatatctgatatgcctatctaatacatcttaatgcattaaatgctgcagatatgaatcttgctatttttcaagtagacaacattagaaagttgaatcatgaactcattcaattcatcaagtcaaaagcactgagtgttttgctagtctagtgacatgggttattgtatttccgagaagtgcctctcatttctggggagttgtttacatataccctgcatttaaaccaattaaaacaatccaagtttctttaaaaaaaaaaaaaaaaaaaa

SEQ ID NO: 24358 - DNA, 5038 bp, Homo Sapiens
aaaagagaaaactaatttgtggtattagaagcctggatagtggttatttttgagaagttagacatgctgatcaggtgaggcttcaagaggcacttaggaagtgctcataatgttctatttcttgattatgagtgctggttacgtgagttgatggactttgtggaaatttaatgagctatgattatgatttatttacttttctctatgactgttacactctagtaaaaagtttgcctaaaataagaaagtagcaaagaaagaaataatgagaagggttagacgaaataaaatttgctgattattggtaattattgaagctgggtgataagcgagggatctttatgtgttctctacttttgtgtatgtttgaaaagatccataatgataattaagataaactataggaatagaaagcagacaatttgttcctggatggggatgacagagaggagcaggagaaaggaaatatagagaataaaaggaaattttgtggtttaagataaatatattgtcttgattgtgatgatgctttcagaactaaccaaatagtcaaataatgcaaaaaacaaaaacaaacaaaaaaccccagaaaacttaggttcaacttattccaactgctgtcatctacctggaagaagaccagacactagtaacaacttaatacttgctaaatgaattaatgactggggtgccatttggcatattattggtctacattttttttaactatagaaaatattgagcatgagtttcttacaggtaagttacagattatttgaaagaagtatgtacatgtaatcagaggtccacactcagggatgctctgagataagctatgtcagatgaataaggcactgaagcagcttttctggagatgaaaggcagccagccagcgttgattcccaggcttggtttattagcatcatgacctgggcaaaactttcatcacctggtgaggataatttattcctctccctagcctcatcaaggtataattgacaaatggaaattgtatatatttaaggtatacaacatgatatatgtatacattgtgaagtgattgccacagtcaaactaatgaacataaccatcacttcacataacgatcttttgtgtgtgtggtgagaacgcttaagatttactctcaacaattccatgtttacaaattattaactataggtcccatgctatatatctccagaactaactcatcttacaactgaaagtttgtaacctttgaccaaaatcctcccattcccccttaccatagctcctggtgactattattctactctgtttttttaattctgcctctttagattccacctataaatgagatcatgcatgtttgtctctctgtgtctggcttatttcaactaatataatgtcctccagattcatccacattgtcacaaatgacaggctttccttttttaagctgaataatatttcattatgtacacacacaccccccacattttctttatccattcatccattgacagatgcttgggttgtttctatatcttggctattgtgaataatgctacagtgaatgttcagatatctctttaagataatgatttcagttcctttggatatatagccagaaatgaaattactggatcatatggtagttctatttttagtttttttttgtttttttaggaacctccatactgttttccataatggctctgtcagtttacaatctcggcagcagtgtgcagtggtttcttttcttcacagcttcaccaacacttgttatcatttgactttttgataatagccatcctaacaggtttgagatgacatctcatgcttttgacttgcatttccctgatgatttgtgatgttgagtacatttttatatgcctgttggaaaaatgtgtggtcttctttggaaaaatgtatattcaggtcctttgcccattttaaaagtaggctatttgtaggtttttgctattgagttgtatgagttccttttgcattttggatattagcttttcttgatgaatatatggcttgcaaatgttttttcccattccataggttatcttttcattttgttgagcatgttgaaacttttcagtttgacgtcctactcatttatttttgctttatttgcttatggttttgttgtcatatctacaaaatcattaccaagacccatgtcaaggagctttctcccatgctttcttcaaggatttttatggtttcaggtcttatgtttaagtctttaatcctttttgagttgttttttcgtgtatggtgtacaagaatagagatttaagctttaaagagagaaataagacaggtattctagattgaaatgcaaattacacctgcatttttaagatgacactttaagaaatagacctcttgcagcagaacacttcgtgttcctggaacctgtagtgcttgtttattctttttagatatttaattgacagccaaatccagaagagatagctgctgaatttgtcactaattctgagtctgattctctcgtttctttgcataaaagtagtgttaatgctctgtgctcaaattagagcacctaaaccatgtttctgaaatacagtgtatatgaaattaaagtgtaagttgcagctagtataaaaaaagcaaatcattttattgtggcagaataatagtgacatcgtatgggtgggcaaaaagccacaggaccctgattaggaaaatgattttagtcatgaaaaaagtatgctttctgagagaatggtccttcatcttttataccctagttaatttttttaaagggaagaaagccgatgtgcatttttacagttttatatgaagagtaagctgatgatgggtttcttttaaggggactcaacatagagttatcagatttggtaagtccattatgggcttaatgtagccttcactgctgagctcttattatagggcacttgttttcaggaggtagctggaaattggggggcttatatcaagttcagaaatagacatgactaatttaaaatgttagaagtcaggatactttttagtaaacattgtttttaaaaatctgttgtacgttttgggattctaactcatttgtgtttggtaagaattcactggtgcctacatatccagccattttactaattttacatacgtcatatttagatggtgtttacagtaactgctgttgctttaatttaggtcttgtactgcataggtgccatcattggaacatcaattatttagtgttaatatgcttagatgctagtaccagttgtgtaccgagtgtataactggctgatagaaaagtgagatgtggaagtgtcataaatatatggtgttcagcttattttggaattaggacaatggtttttttgttttgttttgtatttttcatgtatacttcctagatcaactctcagatctttaatttgtgcatagggcttcctgaggatgttgctcttactagaggtaattgatcagttttcattgatggctccctcataaagtggaagtttaaaacctaatctgtggaagccacgaaacagtttccctcagccagtcatggtggctcacacatgtaatcccagcactttgggagggcgagacaggcagatcacctgaggtcaggagtttgagaccagctgggcaacatggtgaaaccctgtctctactaaaaatacaaaaattagcctggcctggtggtacgtgcctgtaatcccagctactcaggaggctgaggcatgagaatcgcttgaacctcaggaggcagaggttgtggtgagctgaggttgcgccactgcactctagcctggttgacagagtgagactctgtctcaaaaaaaaaagttttcctgctctcatttgctgtttcatcctaagaaacttgagaaatagactactttaaatattacagtgtatataaatgtgtaatttcataactctgcaaaagaaaacccagaaaaaataattttttaaactttctttttggggagggaggagttagtgaccccaatctgttattttacaaaatgggcaaacattgccaatctttctgaagtttgaaatgcagaatttgaagtttctcactgccctgcgttctagggaaagaaaaccattctatactagaaaggtgttatttaaaaagtttgatacccagaaaaattaattatttcattagttaccataatgcctgtgagttttttgccgctttgatttaactgacattgacatgtctttgtgttagtgttgcagcttctcagtttttatattctacttcattggttgtaatttagtctcagatgatttcctataggatgtaatttcctgcatagtatatgggttctacttagcctgataaatgatctttccaacctcctggaagcactatatgccaaagatattctgatattttctaaagttttaaggaaaattattgggtatgtagttattagtccatggatttattttagtaattgtcattgtttcaccttttctcaagtttattgttcagcttaaggatattttcatttaggatatatagcccagacactgggttataattataatcaatatgtaagtatggttataattataatcagtatgtacgtataatcaatatgtaagtaatcatttgttatcaacctcctcattcctgttcttaatagctaacattttttgagctgttatactactgtgctaggcttctttcttaaattcctacttcacattaattatctcatttaacatttggctctgaggtatattctattaatatttccattttgcagatgagaatataaagtcgtagaagtttaaatacatgcttatttctcacagtaagaaatgctgagaccagcattaaaactcagctcatctggctgtagaacctgtactcttaagtactattttatgttgcatcacataatggtacatgatctttttttggttagtgtaatagttatgatgcttgaaaattttattgtctaccctttgtaatttattaaatatggatgtttccaaaaaaaaaaaaaaaaaaaaaaaaaaaaaa

SEQ ID NO: 24359 - DNA, 2844 bp, Homo Sapiens
ctaacttccaagcttcccatttctgtataatttaagcatgaaaatgagaacactgagatttgataggcatgtagaagtcagagtaagcaagagggcttgagttcatcgatgaacttcagtaactatccttgacttagtattggtggaaaccatttgtgaatttacagactccaaaaacaaaaagataatttagagtctcaaagtaagatttggggagatgtccattggagacagaagtggagagagggagaagttcatttgttgacatatttatgtatggtgcacctactgtgtgccaagccatgttagagatacagtgggagcaaaaccagatgtgttttctgccctctgactccagtggttgcagaattagcccaggaactagaattggatggagtcacacaaaccaaggaaggggattgtttgaggggggcactcagtcacatgtggctgaggccaaagagaatgaagatatattttaaaattctggatttggcaaaatttaggctagtctttacttttcataaacctctctcatgttagagcagcaaagaaaaaccagtttgccaagaggtcacgagattgggcagtgaggaatggggagtttagtttaaaagacaacactagatacttttggaagtttacctattctgtggttcccttttattgactaaatggtgcccttcattcatgaagcaagtatctatttagtgactactatgtgtcaaaagctatctaggcccagaaacttttaagtggaaaacaagacaaagaccctgccctgacagatttcaatcatgtatatactgtatgtatgtttgtggaaggtgacataatagacaattgcagatagtgataagtgtgtaagacaaggataccacgagcgtaatagacagtggggatggaggaacctttagaaggttggttaagttgaatgataaggagccattcttttgtctttacctgaatgacttatcattcagccctttttgagttttgggttgcttgcagagtttaaccttgcctgtaattgaaacttaattttgtaatagcataacttcatgtaagaaaagcaaagcaatacattacagaattattttactgaagaacttgtttcagagaaagaggctgtttcacatttattagcacatttggattatatttaggtgttttattttttttttaaacaaaggagtttggatcataatacaagagaagcacagggcaaagacactgcataacctcaagaactaagaatggaaggactggccaggcctggtggtgcacacctgtaatcccagctactcaggaggctgaggcgagagaatcgcttgagcctggggggcggaggttgcagtgagctgagagaacggcgggcggcagagcgagactccatctcaaaaaaaaaaaaggataaaggaaggacttaagcaaaatcttccttgtaagtagaaggatgttttgacaagaaaagttgcaatggaaaaatggttctcatgtacacgagtatgtagaataagcatcgtgtgtggattggattcagatcaaaacattgcttttatgtttgtgtctttatacggtgggagtataccctggtgccccaggatgaagacttgacctgacccatgtatttttagattactcacagataacaaaaagtattttcatcatgattagttgcgaaaacagttttatttcaataggtaaaacgtgcagtcctatgtaatcgtcagaaggtaatcttaattatagcttgggtgtgctttaaactgcaagctggcagtggagggcacgattcctctgatttcagctttctccttatacttttctggagctgtgagctgcaagttaactcagtgggattaaagtgtagactggaggtacaaaaggtgaggagtgaggagatagggtagttcttccttggctggctggcttcatgatccctgggccccgcagataattaaatcgactttttctgtctcaggcatttgtatgacctctttggaggttccctgctgggtagttatccttgtatctgatggacccatctcaatttaaaatactctgccaggttcggaggttcatgcttgtcatcccagcactttgggaggctcagaggtgccattggcttgagcccaagagtttgagaccagcctgggcaacctggtgaaacctcttctccattaaaaatacaaaaaattagccaggcatggtggtatgtgcctgtagtcccagctactcagggagctgaggtggaaggattgcttgagcctgggaggtcaaggctgcagtgaaccttgattgtgccactgcactccagcctggatgacaaagaccctgtctcaagaaaagtctgtaattctttcctaacccttagtatccagcctcagtcctgaggttttctttacctctgggggctattttatgccggctctctcctgagtgtcacacatctggtcctcaggaaacattctcacatccctggcctgaaaaaaacaatttcagggagatcgcatggcagcagccctctctgggctccccagctaaatggttgtacgaaacacatttcaaagctctctgaagggcttccttgaagttcctttcactggtttcaaagtagaaggtagtaactcctttgtccaagaaggctgaattgagcacttaacaattctccaaagaaatttcttcattggtctctatcctagaccccttctgtatccttgatatggctgaggattctaaaaaatgaccagtcttacatgggagggctgggatataaaaaataaaataataaataatgataaaaactgaaaaaaaaaaaaaaaaaaaaaaaaaaaaaaaaaa

SEQ ID NO: 24360 - DNA, 1937 bp, Homo Sapiens
agcatcctggatgggatgagtagtgtcaacttccaaaccacgtggtcccaggcccagcagtacctcatggataaccccagctttgctcaggaccatcagctgcagaacatggacaaggaagatgcactgatctgttttgaggagcacatccgagctttggagagggaagaggaggaggaacgggagcgggcccggcttcgggagcgacgccaacaacgcaagaatcgggaggccttccagaccttcctggacgagctgcatgagacagggcagctgcactctatgtccacctggatggagctatatccagcagtcagcactgatgtccgctttgccaacatgctgggccagccgggctccacccctctggacttattcaagttctatgtggaggagttgaaggcacgattccatgatgaaaagaagatcattaaggacatccttaaggaccggggcttctgcgtggaggtgaacacggcctttgaggacttcgcccacgtcataagctttgacaagagggctgccgcactggacgcaggcaacatcaagctgaccttcaatagtctgctggagaaagcagaggcacgggagagggagcgggagaaggaggaggcacgcaggatgcggcgcagggaagctgcctttcgaagcatgctgaggcaggctgtgcctgctctggagctaggcactgcctgggaagaggtccgtgagcgttttgtgtgtgactcagcctttgagcagatcaccctggagtcggagcggatccggctcttccgggagttcctacaggtgctggagactgaatgccagcacctccacaccaaaggccgaaagcatggcaggaaaggcaagaagcaccatcacaagcgttcccactcaccctcaggctctgagtcagaagaagaggagctgcccccaccatctctccggccccccaagcggaggaggcggaacccctcagagtcaggctctgagccctcttcctcacttgattcagttgaaagtgggggtgctgcccttggaggacggggctccccttcctcccatcttcttggagcagatcatggccttcggaaagccaagaaaccaaaaaagaaaactaagaagagaagacacaagtcgaatagtcctgagagtgagacagaccctgaggagaaagctggcaaggagagcgatgagaaagaacaagaacaggacaaggacagggagctccaacaggcagagctccctaaccgttccccaggctttggaatcaagaaggagaagacaggctgggacacgtcagaaagtgagctgagtgagggtgagctggagaggcggcggcggacactcctacagcagctggatgatcaccagtgacccaatgagctgttctctgcctcgggtctgtgtgaggccatggctcctgggccaccctcaccgtctgcctcagacttcttccttagtctggtctgtgtccactttttctaaagtaaccccacccccagcacaccattgttggcacctctcaaggttgctcttggtgttcaagggtcccctactccctggactagtgcagtccttgccctcagccccagaccagagatgggtggtatatgccatgtggggtgggtgatgccagtagataaaagtgtgagagaaggggtctccagggaagagtcacaggctgttggacgcagcctgggtggcagagggcagggtcatcaccctctagcatcagtgcctgctcctgcctgccctggccctgaggctccaccacttcttcctccacccaggacctaatgtacgtgtgttttgttttttgttttttaaataacaatatttataacatgaaaaaaaaaaaaaaaaaaaaaaaaaaaaaaaaaaaaaaaaaaaaaaaaaaaaaaaaaaaaaaaaaaaaaaaaaaaaaaaaaaaaaaaaaaaaaaaaaaaaaaaag

SEQ ID NO: 24361 - DNA, 3483 bp, Homo Sapiens
agaaaatgttggaggatttagaagatttgacttctccagaggaattcaaacttcccaaagagtacagctggcctgaaaagaagctgaaggtctccatcctgcctgacgtggtgttcgacagtccgctacactagcctgggctgggccctgcaggggccagcagggagcccagctgctccccagtgacttccagtgtaacagttgtgtcaacgagatctccacaaataaaaggacaagtgtgaggaagactgcgcagtgccaccccgcagcccagtggggtgccatgcacaggccacaggccctccacctcacctccagctcaggggccgcaccccgccgctggctaagccttgtgacccatcaggccagtgagtgggcaaatgcggaccctccctgcctgcagcctgcacagattctggtttgaggtttgactctggaccctggctgtgcccctaggtggagacagccctctttctcacctaccccctgccgcacagcccagcaggagggaggcggacagccagatgcagagcgagtggatgcacttcccagctcatctctggaagcctttgctactcaagctcctctggccgcggaacaattcctctgatcatgtttggttttcttcttccttattttattttgtagaaaccgggtggtattttattgctctgcaaagatgtccagaagccatgtatataatgttttttaaacagaacttcattccccgttgaactttcgcattctctgacagaggcctagggctgtatctctccctgggctgccaccagagaaggtgcttggtgttcgcctgccagcccagagccctggaggagccggctgcacagagaggcttttcttcccagctgggcctggtggagcccggggcagggggagagtagagacactcccttgtgcagctttgagcctagtttagctggggccagggaggggtgctactgttttccaagtgaatgggtctcaaagacttggtgaccccagcctcatcttctaggccttttccacccaaccaggcctacctgggagagggtgaggttcagcacatcacacaccatccccactgtcattcagggcctgggtctccagctctgtaaccagtcctgtcccatttcctcagtccctgggcctcccagccttcaggctgtagggctgccttactaaaattgaaaaatccacctcttaacatctctttcactttggttttgctaacactgctctctgctgccctcccatcctccctgtatccattcatgccctatctttcattctccactcctaatccctctcctttctggcatcctggcctctcgtggtcctcagcccctcacccccagtactgcagatctcacagtttgccttccagaagccagcctatctctagcccatggttttggagttcctctcgggttatctcccacgcctgacctggaaccagcaagcccctttcctgccttcttacccccaactctagggatgggactgttacaatacttcaagatcactctttacacctcttcaaagcaaagtcatgacaatgcagggctcctcattgctcccatctgcctctgctgcacacacaggcaccagcagggatgccacaggagtgcccacagggtgcaggactccactgatgagagatccagccaaagagctgcccccaggggtatgagggcaccagctgggttctccagggagcaggagttggacctccatggagccactaggcctggcctcctctacacatccccagggctatctggttaattccatcaagctcagagttaaaaggcatatcagcctggagtatttgggagagactggctgcagatccccgccagccaagatgcaagccactcgggacctgatgtcggcagctgtgcctctactgccctgaggacttaccagagggagccctactggccttcccccaccacagcagccctgcctgtgaagctcttgtttctgacatttcacaggcagagaggtgccatcagttcgcctccattccttgccaccatgaccagcctctccctgaactctctcttgctcgggacctgcctgagggctccctgctgcagttcgccgtacttccatctgctgggtgcctccatcgttggttgggtggggatggggcattttctgagctaagctttgtcattagtttgtgaagcacctggtcagcaacctgccccagacctggagggtctttgtggactgaaggtagacaccagccagcatggtggccctgttctgggggagcagggtaaggcaggaggaagtgggtgagctccgagatgatgagcacatgaagcctgtggccccttcgtacctgcaatatgtcaggagcctcacgctcacccaagatcctgcaggggccaggctccatctcactggctctgagggcaggacagggtatcacacatttctcaccaggcctcctttcctatgggcattggtgcctcccagaggtttcttgggctgctggctggtgagagaggacccttaaagaagatcaagccaagctgaccttggaccctgtccagcacagcttctggcacaggatgcttggtgaatgtaccctttctttccctccctgcagctctgagggagcccctgaccttgtagtgggtggaggaggtaaggggcctccctccctaaatctgcctcttctgcaagctacttggagacttgcctagttgtacccacccctccaggtccctggtgctagagcttctgagaagggcctttccctttcctctttgcctgctatataaggcaggctcctgtggctctgctggctcagtgtgggctgcaggaggactgcagactcagctgcaattctgaggggggtttgggaggcttgtgcgaggtctcaggcctgtgtggggagctggtgcctcttcctgcccgtatctttctcttccaagggcagtgctccaaggcagggactggagaagccaaggggagagtctaaaagggctagagcatttttaaaaatagacacagggtcttgggactggggtttcggattgagttgcaagcagggagaaaacctgaaggtcggtgcccctatggggctgaccagtagagaatttcctttactgtatttttgtgtctggtcttccctttctggcttctaggacatccatgccaggtgaggtgcctgggtccctgttacaagtcaggagccctgtagggagacccctccttttgtacaagtacctgaatgctgcgacaagcagatttttgtaaaattttatattagtttttaatgtcagtggcgactcggttcctggggctgcagccagcctgggacttttgtaagaatttttgggtgactcacttagatgtcgtttccttcttgccccctcttcctctctgtaatctaagtgcattaaacatctttgcagaagtgaaaaaaaaaaaaaaaaaaaaaaaaaaaaaaaaaaaaaaaaaaaaaag

SEQ ID NO: 24362 - DNA, 3272 bp, Homo Sapiens
tttttgcataccgtatatgtgttgcttttgtgatggaggaaacattttgtttttaaatgtcgtgtggtctatcagtgtacaattcattgtatgcctgtaatgcacctagtacctactacctgagtactccagcccaattaggggaaggcagatcaccaagaaatgtaacacagtctgtataaagaattagaaagaactggttgtcttcttgggcggtgttgcagggttcatctttactttttaccaaaactcaaggaagtagcacaagttggtttggcagtaatcagtccaaaccagagttcacagtggacctcaagggggcaacaattgagatggcttcaaaggataaatccagcaaaaagaatgtatttgagctgaaaactcgtcaaggaacagaactgctaattcagtctgacaatgacactgttattaatgattggtttaaagttcttagtagtacaatcaataatcaggcagtagaaactgatgaaggaattgaagaggagataccggattcaccaggaatagaaaagcatgataaagaaaaggaacaaaaggatcccaaaaagcttcgttcctttaaagtatctagcatagattcttcagaacagaaaaaaaccaagaaaaacttaaagaagtttcttacacgacgccccactttgcaagctgttcgtgaaaaaggttatattaaagatcaggtatttggatccaatctcgctaatctgtgtcagagagagaatggcacagtaccaaagtttgtgaagttatgtattgaacatgttgaagaacatggtttggatattgatgggatatacagagtaagtggcaacctcgcagtgatccagaaactaaggtttgcagtcaatcatgatgagaaattggacttgaatgacagtaaatgggaagatattcatgtcattactggagccctcaaaatgttttttcgagaattaccagaacctctttttacatttaatcattttaatgattttgttaatgcaattaagcaagaaccaagacagcgagtcgctgctgttaaggacctaatcagacagttgccaaagccaaaccaagacacaatgcagattcttttccgacatctcagaagagttatagaaaatggagagaaaaatcgaatgacctatcagagtatagcaattgtttttggtcccactctattaaaaccagaaaaagagactggtaatatagcagttcatactgtgtaccagaatcagattgtagaattaattcttctggaactgagttccatcttcggacgttgattcttactgaagacaacctgtggaatagaagctggattccatcagatttcaaatgtttatacacaatgtattttattttttggaccaagcagtgactctttgattttgcactttttttttgagggatcagaagggaaggggagagtcgagatgtgtgttaggccctcatatttgctgctttgttgcaagttgatataactgcgtgtaattatgaattcattttatcctgaatgtttgcatttcatactctgaatttcagtaaaaatcaaaacttaaaattctaaccagtcatatacactggataatttggtaagaaaactgtattttttttccctgaaattggataatgtactttcttctcaagattcatgacttgatagaacaatactttcagttatgttgcaaaggctcttgggcattttaaacaaaatgaagtatatccattttgaaacctgtgtatttctttttcggggtttctgcatgcagtggcagtcttaagtgccaaaattcattataaccccaaaataaccccttgatgaaggcttgctgtcttttactgtgttacacagcatccttactggatatcttagttgcttgtttgggcagcacactaatattacttaaaacactgtgatatactggagttttagttagcggaagtcagttcagggcattttagggctgtcttgctatactgaattgtagctaacaatcctaattatatctagtaccatactgagttattggtatgaccctgtggaaacacacattattttatgtaaatataggctaaagacttaatgtcctttagcttgtgtatataattgtgttgtatagtctcagagtacattctaaccctacatttctaatcattgttattggtaatcttttctgtgaatattaggtttcctccagaaatagtccgttatttgggaaagttaactgtgtgcacttttagatattaactacatttacaggcaaatcactgtaatgagaatggtactggaaaaatactgaatagacttgctaaatggcacatgcactacaagaggaaccttttgggttatttaatatgtacagaaaacattagaaaaaatttattacagaattctaattccagtatgaatagtggaaacccatctgtaaattagatggatgttggatggaaaatgacattgctaaatttgagaatttctttttacctactaatgtagattgctttgtataataaaacacagggtttggaaggttttgttacagggagcatggtctgttgaagatttttaaaatgtatttttctagattaacttctgtacatgaaatgtctaataaaactataagaggtttagagatttttccattggaaatgtgcattttggtttctaatttttttgttttttcatttactggcatactgttatacctcatttttaaaaatcaactgaatccaatatttcctgtggcaaataacactttcctcatttcataccttttctcctctcttccatgccaacatttctccacccacaacgtacactttttatttctccatcaatatttgaaagcgagtgatttgtgaccaggatttttttttcttagggttgcatttataatttacagattgccttccttgggaacaagtatttttttgtatgatctgtctaaaaacctctcacctgaattttgtggtagaaagtctgtatttgttgttgtgagcgtgttaaattgataacaaaccaaactacttgatagctaaagcagattgtttcgggtggggagaaaaagccctaaatcagaatgtttatatttgcctaaagatgtccttaataatacaatatgctttagatcttgcttatttagtgattgtataccaggaaaacaattagactcaaatcagtgatgttcttgttcttggtgttcatgaacatatatcaaagattaaaaaaaaaaaaaaaaaaaaaaaaaaaaaaaaaaaaaaaaaaaaaaaag

SEQ ID NO: 24363 - DNA, 2345 bp, Homo Sapiens
gagcagaaaccaccccagtggcagagcctactaagctggtgctcccgatgaaagtcaacccatattctgtcatcgacatcacgccattccaggaggaccagccgcccacccccgtgcccagcgctgaggaggagaatgtgggtctccatgtgccctgcgggtacttggtgcctgtaccctgcggctatgcggtgccctccaacctgcccctcctgctgcccgcctactccagcccggtcatcatctgcgccacgtccctggacgaagaagaaacaccagaagtcacagaagatcgccagcccaattctctgagttccgaggagcctccaaccagtgaagatcaagtcggtcgagaggacagcgcacttgcccgctgggccgcagacccggccaacacagcctggatgagaatccagaggaagcaatttacgatgacgttccaagggaaaactcagactctgaaccaggtttgattttgtctggaattgatttgaggagattcagctcagcagcctttccctctggatgccaaagtgactatttagtggacggcccagacgttttctgtattcatgttttgtatgttgcttctagaatggcttattgatgtgtggtggaatattggtgtttgtgcacatatgtgtgtgtgcttataacccttgaaatagggcagtttaatcttacttatcccaagcaaacagaggagtaaaggtacagaaaatgccggcaaagaggtaggaaacacagaggctgagaagcagcaatgtatatcgaataaatgacatcagtgagaaagtagagagaatcaggcaaaggtaatagtcaaagaaataactaagaattctctacaattaaagaaaaacataaattctcagattttagacatagagattcaaagcaagatgaattacacgttgatccatacctaggccgatgcaatggaggccgcggagccccaggcccagggtgaatctcccgagagcaaccggagagaaaacatggctgcctacacaggaaccgctattccactgacccacaggctgggggcgggttctcaaagcgaagaaggacgtggctcttttaacctgagcggccacgtccagcaaagtacagtcctttagaaagggcgatgggccgcaggaggcagagcgggggagcttgctgcccatagaatctaaggaaatagttaatgatgcactcgctgcagggaagagcacactgaaccacggaggaggtgacgggggcccggagggagtggggagcccgggaagtgtcgggcgtgtggagagtcgataccagcaccgctcaagacagcgctgatagtgccgattgagtttcagatgcagccggagccccagccagtgccgactgaagaggagggtgaccgttcatgccgtgtgttctgaagttctgaagtcggcatttttcagggggaggatcttgttaccgatttttttttttttttttttttttgctatggattggtccagtttgcgttttatgggtaactgctaagaaaataggaatagattattttaactttgaaaccagtagtgcaaaacccaatctggtaaatgcaagaaaatataaaataagaaagctttgcaaatcatatgagaaaagactgcaaaataagtacaaacatattggtacgcatagtaaagtgcatcctattgccagtaaaagaaatcctcagattggataaaatagcaaagctagccataaattcttgtgagagatacataagagtacagaagatttgtaagtaaatggatggaaaaagaaatataatgcaaattctaaccaaagtattgtcagtataactataataatacactaaatgttaagccataagcaaggaataattcatgaggaagatatataacagttctaaactcatatgcacctaacagcatagccttaagatatataagcaaaatataacaaggcttaatcagaaatatgtaaatacgctgttggggtgagagattttaagaaaactgtctctgctattgacagatcctggacataaaatcagtaaaccggccaggcacggtcgctcacgcctgtcatcccaacactttgggaggccaaggtggatggatcacttgaggtcgggagttcaagaccagcctggccaacatggtgaaaccccatctctactaaaaatacaaaaattagacaggcgtggtggcgggcgcctgtaatcccagctacttgggaggctgaggcaggagaatcacttgaacccaggaagcggaggctgcagtgagtcgagattgtgccactgctctccagcctgggaaatgagtgaaaactctgtgtcaaaaaaaaaaaaaaaaaaa

SEQ ID NO: 24364 - DNA, 2345 bp, Homo Sapiens; identical to SEQ ID NO: 24363

SEQ ID NO: 24365 - DNA, 2560 bp, Homo Sapiens
ggcacgaggcaacctccccgccgacccgcggtccaggcctcggtctctctcttcggcggcgagccgcggcccagaccccggcagaggacacttgtcggcacgttctcacccctgtcatctcagccccctgcctagctccaccccaggcttgggaacccggcccctgacggcccattgtccgcgggcccagcccccgcgctgaacgcacgctcgcccttgcccctaaccagcgcgtctaccccggcaacgcgcagtgacctgggatgcagccctcaggctgggcggccgccagggaggcggcgggccgcgacatgctggccgccgacctccggtgcagcctcttcgcctcggccctgcagagctacaagcgcgactcggtgctgcggcccttccccgcgtcctacgcccgcggcgactgtaaggactttgaagccctgcttgcagatgccagcaagttacctaacctgaaagaacttctccagtcctccggagacaaccacaaacgggcctgggacctggtgagctggattttatcctcaaaggtcctgacaatccacagtgcagggaaggcagagtttgaaaagatccaaaagctgactggggctcctcacacgcctgttcctgcaccggacttcctgtttgaaattgagtactttgacccagccaacgccaaattttatgagaccaaaggagaacgagacctaatctatgcatttcatggtagccgcctagaaaacttccattccattatccacaatggcctgcactgccatctgaacaagacatccttgttcggagaggggacctacctcaccagtgacttgagcctggccctcatatacagcccccatggccatgggtggcagcacagcctcctcggccccatccttagctgtgtggccgtgtgtgaggtcattgaccatccggacgtcaagtgccaaaccaagaagaaggattccaaggagatagatcgcagacgagcgagaatcaaacatagtgaagggggagacatccctcccaagtacttcgtggtcaccaataaccagctgctgcgagtgaagtacctcctggtgtattcacagaagccacccaagagcagggcttcgagccagctctcctggttttccagccattggtttaccgtcatgatatccctgtatctgctgctgctgctcatagtgagtgtcatcaactcctctgctttccaacacttttggaatcgtgcgaaaagataatctttctgggcctggtgtgggggctacctcaactatgtgccttatggtaacttgttctgtacctcctatgcctcatgtccagccaggttgagcctaggggccagttgggggaccacaggacaattttcatatggcctaaatgtatccattgcctttgatgatgttcccagccatactccagtcaacggggactactagtccctcactcttaggttttaggggagtccttccatctgctccttcttaaactgtcctagggagttggcttttcagccagggccaaaggaaaaagccctgctgcatttaaaaacaaagtgtccaagctgtcagtggtgtgtttacaatctctcctggcagaggttggccctttctctaatgccttctggaaggcggaaaatgtgggaactataaatcactaggcggttgccttgttttgacttgagacacccaagaggaacagtcatgtttctcataaaaatcagtgggatcatttttgaattccatcagcctttgtatgtgagtgcaaaacattttaacagttttctcaaatcaacaaacagccttctcctatagctgtacttgcccccctccccaaaaaaccatggatgagaaagaaaggagtcaggggcctgataaaaaatacagacttaatgagcaactcaagatgagaaaactgctctttttccaaaaattaccaactgctgattacagctgaaatggaaccaaatgtttgttttctgatttttttttaatagctgtttaacaaattagtctttgctgagtaaaaggggaaatttctaaacctagtgcactgtttggccagtgtccacagcctcttttctggctgtgttttagagaaagggatttgagctataggctcgcctcctgttctcattctcacaaagctgccttgactgtggcctgcaaccacgagtgccatgctttcaggtcttctgtggcctactggccttcaagacagaggcctgccccagtgtgccacagatccatgtggatggagcctccttcagaggggtcacaggtctttgagactcagcctgggctttaatgtgtaggaaaagccttctggccacccagagagccggagccctgcttgctgtattctctgctcccttcttcctgctgggttttagccataatagggcccggtacgatttgggagtgacatttctgtaaagaagaggaaaaatcatttttctataatttgtaaagttgtgaaagagccactaccacagtttttacattgattattggaacatttcagaataaataaagatattttcttaatgaaaaaaaaaaaaaaaaaa

SEQ ID NO: 24366 - DNA, 3407 bp, Homo Sapiens
gtccggggtctccagtagggctgacgctccggtgctcgcacaatcccccgcctcggctggcaacgggcgtccctccactccccgagtccccggcagccgccgccaccccagcgcgccccgatctggccccctgccccgcgaagatggctgccgtacgccgggcccgcagttattgccgctgcctggtgcgcttctccgaccgagaactctgctaagctccgctgcagagacaggcaggagtagacacccggacacccagcacccctcctccggggggcggtgcagagggggcacggagagcccctcgagcgcagcaggccgccccgccagcatggcagaagctgaggaagattgtcattctgatactgtcagagcagatgatgatgaagaaaatgaaagtcctgctgaaacagatctgcaggcacaactccagatgttccgagctcagtggatgtttgaacttgctccaggtgtaagctctagcaatttagaaaatcgaccttgcagagcagcaagaggctctctccagaaaacatcggcagataccaaaggaaaacaagaacaggcaaaagaagaaaaggctcgagaactcttcctaaaagcagtagaagaagaacaaaatggagctctctatgaagccatcaagttttatcgtagggctatgcaacttgtacctgatatagagttcaagattacttatacccggtctccagatggtgatggcgttggaaacagctacattgaagataatgatgatgacagcaaaatggcagatctcttgtcctacttccagcagcaactcacatttcaggagtctgtgcttaaactgtgtcagcctgagcttgagagcagtcagattcacatatcagtgctgccaatggaggtcctgatgtacatcttccgatgggtggtgtctagtgacttggacctcagatcattggagcagttgtcgctggtgtgcagaggattctacatctgtgccagagaccctgaaatatggcgtctggcctgcttgaaagtttggggcagaagctgtattaaacttgttccgtacacgtcctggagagagatgtttttagaacggcctcgtgttcggtttgatggcgtgtatatcagtaaaaccacatatattcgtcaaggggaacagtctcttgatggtttctatagagcctggcaccaagtggaatattacaggtacataagattctttcctgatggccatgtgatgatgttgacaacccctgaagagcctcagtccattgttccacgtttaagaactaggaataccaggactgatgcaattctactgggtcactatcgcttgtcacaagacacagacaatcagaccaaagtatttgctgtaataactaagaaaaaagaagaaaaaccacttgactataaatacagatattttcgtcgtgtccctgtacaagaagcagatcagagttttcatgtggggctacagctatgttccagtggtcaccagaggttcaacaaactcatctggatacatcattcttgtcacattacttacaaatcaactggtgagactgcagtcagtgcttttgagattgacaagatgtacacccccttgttcttcgccagagtaaggagctacacagctttctcagaaaggcctctgtagagcctcaagtccagtcctctatcacttttgcatgaattaaagtatatagcgcaaaagagcacctaagttataaatgtgtgtgtgtgtgtgtgtgtgtatatatatatatatatatatatatatatatatatatggaattggaacttattttaaattgttggagttcttttaagaagaatataaattgattattttttttatttaaagggatagttgattcctggggtgttttgaaattaagttggaattaagttgcttaagcatatttatgttgtgagaaaccttaatatgaggtttatcatgccctttttcaagcagatttatgagcagatttctgtcacataagtcgtcttctgcttgagtatcctaatatttcaatgcatcaggggagcgctccactggataagcattttatttcccgcatggcatagtgtttttgcactaaaggctcaaagtgtgagaacctgttctggatttgtttgaaattatttcaccaataaagatcataaataaatgtttctttcaagaaaatatatttggatggcctttttaaagtaacaggatatttaataagagtcctagatagccagcggagactttaagaatcattgcctctagctgggtgtggtggcatgcacctgtagtcccagctatttgggaggctgatgcaggagaatagcttaagcccaggaatttgagtctgggagtttgagtccagcatgggcaacataacaagaccccatcccttattaaaagaaaaaaaaataattcctcatttcatcattggtctttatatgtagccacaaacactgacctcatgtaggcaccttaccaatatatgacattaagtgagagtgaatcccttaggactggaacacttcaagctcaaccaactgactcagttgtcattcttcacaaaagaatagtagaggatcatgtaaacctgagcctaactcttgttccagtatgaaagttgggggagagcaccagccacctaggaaaactgtatgttacctttttactcaaaggagtcccccctgcccagtaacagtcctattagtgtttaatttcagagtttgtgtctggtagacctctacctgattcagatttggttttgttgtttcaaccatagttagagacaaattctcatgtactttcagaaatcaatatctgcagccactgttacttttaattgacattaagagacacttcataggttcccacaattcagtatgggataggctttttaaaaagcacatacagaccaggcgtggtggctcatgcctataatcccagcactttgggaggctaagacaggcagatcacctgagctcaggagtccaagaccagcctgggcaacatggcaaaacaccgtctctacaaaaaaaaaaaaaaaaaaaaattagccaagtacagtggggcacacctatagtcgcagctacttgggaggctggggcaggagaattgcctgagcctgggaagtggaagttgcagtgagccaagatcgtgccattccactccagcctgagcaacacagtgagaccctatctcaaaaaaataatgatgatagtacacgttatgttaaaggtgaaatgtgcatacagaaggaagagagttggccaggtgtggtgactcacacctataatcccaatactttgggaggccaaggcaggaggattgcttgaggtcaggagttttagaccagcctggacaacatagcaagacctcatctcttctaaaaattaaaaaaaaaaaaaaaagg

SEQ ID NO: 24367 - DNA, 3327 bp, Homo Sapiens
caaaggtcatgcttcacctcttcctccatctgctgcacctaccactgattctacagattccataacaggacagaattcaagacagagagaagaagagctggaattaatagaccaactgcgtaaacatattgagtaccggttgaaagtgtctctaccttgtgatctcggagcagctctaactgacggtgttgttctttgccatttggccaatcatgtgcgacctcgatctgtcccaagcattcatgttccctcaccagctgtacctaaattaacaatggcgaaatgcaggcgaaatgtggaaaatttcctagaagcttgcagaaaaattggtgtacctcaggacaatctttgttccccttccgacatccttcagctaaacctcagcgttaaaagaactgttgaaacgctcctttctcttggggcacactcagaagaatccagttttgtctgtctctctctgcagcttctgggttttgtggcattttactgtactgtgatgttaactctctgtgtgctttattactggctcttccccgctcgctgaaagattgcactccggtgactttctgcctcattcctgtgcttggtaaaggaggtttgtttctcatccagaattatttacataagtgctttttctccctgctggccctcaaagagctaacccataaaggaggtaaatcctttctttatatttgcagatgagcaccccctcacattagtaaacatttacgattgctaacaaagagtaaaagaccagcattttttctcctggtcatccgtccattctcctggcctgtggccttgtttctcttaccataaatgctgaagcatttttactaatacagttctgaacttgtacttcgaatatgacatgtagagctttatttccaagtcacacaatacaactcccatctggccatttttccgtgcctcagcacaagtgttgaattgtggagtgactgaacctttgcagcagctgctcacgaggagaaccgtcgtgccttttctggttttggccgcacccggttacttagatttctgctttgaactgtgtcctgagatcctgaatccccgctttgtcggtaggcacaggtccatataagcatttgcggtctggacatttcaaaggtattggccataattttaataattttagtttggtcagaatgttcagtttgaagatcacccacattccctagactgctcttctgagcccagtctatacgctgtatgtgctgcacacgagcagatgggctggagctggcctctcagggtgggcaccttccagattgtgtttgttatgtgtgactgaggttcactcccagcattctgtttaaaattggaatttatgtgatttctaacatattcaaaccttcttaatagtgaaacagtagcagaagtattagggaagcagtccctgttctgtgctcaaggcagtgaatattgtctagctctttcagaatgcgtagcacttagctgctagacgttaatgctggaaactataattgcggttagattctagtttcataagtggtgtttctgaatattcaggaaccttctgaactctgttaacaaaattgggataaaggatgaactcaagtgtgaagagagattgtgaggagcataatatccggtttagaattcagcctgagggaggagcataacatctgggtgtagaattcagcctgaggggctcactggtttggttttcttccatatgaaatgggacagctattttcacaggtcaaaagactgttcactattaatgctgaaacactcaacactgtgatgatgaaaacttcagttttctgtgtcagtaggtgcctttcagactttggggaattgggttggttatatttttaagatgtctcagagttgaaacacctgttaaaaaacacacacaggctctcatgtggtttaggggttgtaattgtacattctcttgagaacacacggcactccctctagtccagctgggaggtgagggtgccccagaaagcacaggcttctgagtgtgaacaccggccgcgcaggtcctagggcgctgctgagaggaagagaccagggaatcagccttggagaaagcacgtctcttccgacagcaaaacactgggcaggttcattttaagtatcatttatctagacttgcagttgcactcaaagtatttctacaaagttgctagtttttttagatcaaaagattacagttacctcattttatcaaaataagtattaaataaaaagtaagcacaagtaccaataactgcctcaaaaatacttgttatatattttattgtaactggttttataaaatttcctagtaatatcgtctcaatgaaaagcaaaaaaaaaaaaaaaaaaaaaaaaaaaatccaactagttgttttaacaaacatatataatccttttttagtggcaccagaattctatattctgttctttgtaagagcaatctcttttcttttggaatatttaatcttaacagaaagctagtgataaatgctgttcttaagatttgcctttttctctcacaagaaagggttaacctaacaaattaacgatgcacacattaaggaagcgtttaacttcctcaagcaaacagtgtcaacacttctcacatgttggtaatcaacatgttcctgcctaagcttacatagtagttccctggaataattcaggctgttaaataccaggatattaaatcctttacattttcaaatactgcttttaattctgtaattcagatttttaattcagacaggcccttccatgaattattcaaattagggggaagtttctcaagagctcaggatacactgagtttcttgccctatctggtctggaaaccctggttttcacagtcaggattataatgcagatagcgtagaactcatgcaggctgagttatgttttcaaactatctttcattcttgtggtagggaacttaccctcaagtgtagtatcttttactcttgagccatctggtagcgtggaattgtttttctatttttcacctgcctattttatagacctgtattgaccttttattcatcagggataaaggatgttgctttcaccctgcggtattgttttccctctgttgtatgtatagatatatgctacttgtcaattttccaattttgaaaatgatctgtatgtacttttagttgtattaataaagtgacagtgagtgtcagacaccaaaaaaaaaaaaaaaaaaaaaaaaaaaaaaaaaaaaaaaaaaaaaaaaaaaaaaaaaaaaaaaaaaaaaaaaaaaaaaaaaaaaaaaaaaaaaaaaaaaaaaaaaaaaaaaaaaaaaaaaaaaaa

SEQ ID NO: 24368 - DNA, 4116 bp, Homo Sapiens
ccacgatttctagtggctctcatttcacgccgaagtaggcacagagcaggaatgcgctataaacgaagaggagtggataaaaatggaaatgttgccaattatgtggagactgagcagttgattcatgttcataatcataccctgtcatttgttcaaacacgaggctctgtgcctgtcttttggagccaggttgggtatcgatataacccaagaccgcggctggacagaagtgaaaaggaaactgttgcctatttctgtgcccatttcgaagaacaactgaacatttacaaaaaacaggttattattaacttggtagaccaggcaggaagagagaagattattggcgatgcttacctgaagcaagtgttgcttttcaacaactcacacctcacttacgtttcgtttgacttccatgagcactgccgaggaatgaagtttgagaatgttcagacactaacagatgccatttatgacattattcttgatatgaagtggtgttgggttgatgaagctggggtaatatgtaagcaggaagggatttttcgtgttaattgtatggactgcctggatcgcaccaacgtggtccaagctgccatcgcgagagtggtcatggaacagcagctgaaaaaattaggtgtgatgcccccggaacagccattacctgtgaaatgtaatcgcatctaccagataatgtgggccaataatggtgactccattagcagacagtatgctgggacagctgctctgaagggtgactttacaaggacaggagaaaggaagttagcaggagttatgaaagatggagtgaactcagcaaacagatattacctcaaccgatttaaggatgcttataggcaagctgttatagatttgatgcaaggcattccagtgacagaagatctttattccatatttaccaaggagaaagaacatgaagctttgcataaggaaaatcagagaagccaccaggaactaattagccagctcttacaaagttacatgaagttactactgcctgatgatgagaagttccatgggggctgggccctcattgactgtgaccctagcctcattgatgctactcacagagacgtggatgtgctgttactgctttctaactctgcctactacgtggcctattatgatgatgaagttgataaagtaaaccagtatcaacgactaagtctagaaaacctggaaaaaattgaaataggccctgaacccactctttttggtaagccaaagttctcctgcatgcgactgcactacagatacaaagaagcgagtggctatttccacacattgcgagctgtaatgcgtaatcctgaagaggatggaaaagatacccttcagtgcattgcagagatgctgcagatcaccaagcaagccatgggatcggatttacccataattgagaagaaacttgagaggaagagcagtaaacctcacgaagacatcattggtatcaggtctcaaaaccaaggttctttggcccagggaaagaattttttaatgagcaaattttcatctctaaatcaaaaagtgaagcagaccaaatccaatgtaaatattggcaacctccgaaagctaggaaactttaccaaacctgaaatgaaagttaactttctaaaaccaaacttaaaagtaaatctttggaaatcagatagtagtcttgaaactatggaaaacacaggagtgatggataaggttcaggcagagtctgatggggacatgtcttcagataatgactcataccactctgatgaattccttacaaattctaagtctgatgaagacaggcagctagctaactcattagagagtgtagggccaatagattacgttcttcctagttgtggtattattgcctcagcgcctcgattgggcagtcggtcccagtctcttagcagcacagatagtagcgttcatgctccttcagagattactgttgctcatgggagtgggcttggaaaaggccaggagtctcctttgaagaaaagtccttctgctggcgacgtacacatattgactggctttgccaagcctatggatatttactgccacagatttgtgcaagatgcacagaacaaagtgacccacctatcagagaccagatctgtgtctcagcaggctagtcaggaaagaaatcaaatgaccaatcaagtttcagatgaaacccaatcagaatcaacagaacagacaccttctcggccatcgcaattagatgtctctctttctgcaacaggcccacagtttttgtcagttgagccagcgcattcagttgcatctcaaaaaacccccacctccgcttccagcatgcttgaacttgagacagggcttcatgtaactccttctccttcagagagcagtagcagcagagcagtctctccctttgccaagattcgaagttccatggtccaggttgctagtattacccaagctggattaacccatgggataaactttgcagtgtcaaaagttcagaagagtcctccagaacctgaaatcattaatcaagtccagcaaaatgaacttaaaaagatgtttatacaatgccagacacgaataattcagatttagcttttagccataagaatccttccatggcttttatttaaaaatatgaaattttcacctcttggggtattttaattgtactgtctgaacccagggatcacaaattctgttcattggaaagggttttaaacggagtcggaacctgagtagatttccaaattttacagccaggactacagaagtgcatcattctagaatgtgtagacctgagtagcttatacactacagagcactttgcttatttgaaagtaattcagcaacaggtcactttgggatataacctgaacctttttttggagtggggtgggtagactacagtagacacaagggctggacatgcagatgcttaggggattagcgtttttcataatttgttctgtttgtcagttcattcctgtgtgttcttacctctacaaagtaaattacacatttagtttttagtgactttaacatgttactgaagcatttgaatataaagctattttagttttgatggcttaactgttccctgaggagttgagggttattgacactagagaaatgaattctcatttgatcctaattttccccgtattctacttgaacacattaaaaatactctgctgcctatacaatgtaaacctaggagcattaagacttgtcacacagtaaacctgatacatcagaggtgaataccagcacctattaggtttcattttgctgttttcaggaatgtaagaacacccatattggctactggaaattctagaagtcagtcaggttttaatttattccaggaggggcatcctcgacatcttatgtagatgatccacaacttcaaaatttagtctgggcctagtgcagtggctcacacctataatcccaacactttgggaggccaggagttttgagaccagcctgggaaacatctgtctctacaaaaaaatacaaaaattagctgggcatagtggtgcatgcctgtgtttctagctacgcaggaggattgcttgagcccatgagattgaggctgcagtgagctgtgatcgtgccactgacctccagcctgggggacagagcaagaccgtgtctcaaaaacaatttagtctgaaacacaattgtgctgaatctgtctgactataactctgaccacacagaaccagggctgcccctgtaatccccacagtaagaaagttgtatggcatattccaacaagtattggttcgtctggtgtctttagagctttactctgttgaagtgactgattctcaactgaacattatgtcgttactttgataagcattccacttttgttatttattagtgctatcttttttttttacgtgttaaatcttgtgattattaaaataaagtaccattgtaatttaaagtgacaaatgggtatgagaattccttgcataacagattaaagaatttgtaaacggcagatttgctataactgaacacttggtctagctgttgccagtatgttactcctttgaaatatactcatgatgtaaaaaggaaaaaaaaaaaaaaaaaaaaaaaaaaaaaaaaaaaagg

SEQ ID NO: 24369 - DNA, 3178 bp, Homo Sapiens
caaattttgagtacttgccgtgctgtggaaaacaggaggaggagctgaccagagacttataggaggatgaccaagtgccactgaaggcttgctgaagaccccaagcaatcagtttcccttccttaagcagacctcaagtccagtgcctcaagggataaagctagttgtgggaaggaaaggcaaaggggcagactgtcttgtggctgctaatggctgagggagctgccaccccagttggaggtctgcttagggtcatcctctgtccaggctccacacaccctgggacagtttctggagctgtccctccttgcctagaccctggctggctcctattcatcactaactctagtgatgctccttccaagaagtcttccatagtccccagtcctcctttccagtcctggtaggtggcccttgtcctgtgctaccctttccctgtcagcatctgcatcacattactgtcatgaacctcccgtgtccctctcccctccccctctcccctccccctcaccgcccccccccccccccccccgcaaccccttaagagcagggactgttgtttaatctctgcatctccaggatgcagcgagggcctgacatgtggagtttctcggggtatgtttggtgaataaatggcacagggagggggctgctgccaccactgccactctatgctctctcagatgtaaacaggttacccagctgggagagaggacatctgctggctggtgtggcgtccagcactgatgtgtctaccttctctgaaggtgggtccaggagacctttgacccaggggatcctcatcacccctcacctgggaaagctgacacctggtggaagcttggtcctgaggcagggagggagggaagtgtggtcctgaagctgccccatcctcaacccatcccctacagatgccagaggggacccctttctcaaggccgcaatcaccccattcgtttatatagaactttatggcacataagtatctttgacatatgtgaattgagtccgcccaacaaccctgcaaaattggtatgaccaccatcccattttgtggatgaggaaattaaaggctcagagaagtaaagaaatttgccctaagccacccggctagtaagtgacagacccacgacttgggcttaggcctgactacaagttcagggcactttgccactatgctgccctttggcccagctcagctgtgctgaggaaggccaaggtggtggtgaagtttcagggtcctgccacatacccatgccttcctcatcttcccgggggataaagggtacaagaggggaggagagagacacagatcacccatgggtcagcagtgtagtgaggacccaggacttcacagccttgtgtggggaagggaaggaggaagaaatgtgggtaagcctcaggccaagctgctgcactgtgaggccacttggactcacacccacagcctgggctcattcctggctggtggccggtatgaggtctcaccctagttccactcctcgtgggggctggcaaaggcacaatcctcggcctgtttgagggtaacccagccacagcaccccaagccagtgcctgctccctccctcccctaggagtgctggggaatccgaggtaaggtcccttgtcctttgtcgtgtgagtgagattctgggctgtgagaggcgcagagtcgcctcatgggcttacctttgagatagaggcctgaggggacagccgggccttaggcagtgtcagaggtgaggcagtggtggtagaccggggaaactcctgtcttcaggactggcattgagctgagcagcagaggtgggggcctttctccagggcttttccctaaccccaaattctcaccccagcagcttcttcctgtgccctgggaaaggggatgtggtctctgtgctgcctaaaagggtgcttaggctgggggtgggtcattcgaaagcctggggctctagggactggggagagtgtgggaaggtgctgagtgaagagcagggaaaggatcaagaagggggcatgggaagggaggggagtgagaaaggtgtcaggcaggagaaaaaaaggggcttgaaggagaagggaggagggggaagtggggagggaaggacgagtcagaagctaaggagcatgatgcaggccttagctcctggccaggctgtgagagatcagcgtgggccagggcaggtgtaggaactgaggatgctgcggctctgctgctcctggggctgtggggtgccatagcaggagggccttctcctaccaggcgccttgtggagcagggctgccactcattgtcagcacctggttgaggggcaggcaggagctggtggaggcctcccactggagggagaggacagaagtaacagggaatcacaggactgcagggggcttgataagggtctcctgtgtatcagacatggaaccagacactttgctgggacatggggttactctgcggccaagttactactactgaagcagaaacacttcttggggtggacagctggtggtggcaggtgaatttggtgaggttttagcttgagctgtgggaagacccagaggtctgcggctgctactgatgacccagactcctgccccctcaggtgactgcaaggagcctgacaagtgctgctggagacacaagcagtgcactgggcacatcatctaccctttcgcctctgactgtgtccgccacagcctgcacctacactctgtcaaccactgcaactgtaattctaggctgaaggactcttcagaggatagcagcagctcccggggcgcgggcccaacctgctcccatgtcatcgagtccccttgctttgagctcacaccggaggaggagcatgtggagcgattccggtatggctggtgcaaaagctacagacctgtctctgtggcagtgatccaccatccactctaccatgagtgtggggcagatgatctaaatgaagaagaggaagaggaggaggaggaaagcaagccccccatcccgacacaggtggggcccgccaccgcctcccctgacctaggcaccagcatggccactggtacccctgactccacagcgcccatcaccatctggcgctctgagagccccacagggaagggtcagggcagcaaggtgatcaagaaggtaaaaaaaaaaaaaaaaaaaaaaaaaaaaaaaaaaaaaaaaaaa

SEQ ID NO: 24370 - DNA, 2661 bp, Homo Sapiens
attgtcagtacatttcagtcacccccgcccagccctcctgatcctcctgtcattcctcacatcctgtcattgtcagagattttacagatatagagctgaatcatttcctgccatctcttttaacacacaggcctcccagatctttctaacccaggacctacttggaaaggcatgctgggtctcttccacagactttaagctctccctacaccagaatttaggtgagtgctttgaggacatgaagctattcctcccaccaccagtagccttgggctggcccacgccaactgtggagctggagcgggagggaggagtacagacatggaattttaattctgtaatccagggcttcagttatgtacaacatccatgccatttgatgattccaccactccttttccatctcccagaagcctgctttttaatgcccgcttaatattatcagagccgagcctggaatcaaactgcctctttcaaaacctgccactatatcctggctttgtgacctcagccaagttgcttgactattctcagtctcagtttctgcacctgtcaaatagggtttatgttaacctaactttcagggctgtcaggattaaatgagcatgaaccacataaaatgtttggtgtatagtaagtgtacagtaaatacttccattatcagtccctgcaattctatttttcttccttctctacacagcccctgtctggctttaaaatgtcctgccctgctttttatgagtggatacccccagccctatgtggattagcaagttaagtaatgacactcagagacagttccatctttgtccataacttgctctgtgatccagtgtgcatcactcaaacagactatctcttttctcctacaaaacagacagctgcctctcagataatgttgggggcataggaggaatgggaagcccgctaagagaacagaagtcaaaaacagttgggttctagatgggaggaggtgtgcgtgcacatgtatgtttgtgtttcaggtcttggaatctcagcaggtcagtcacattgcagtgtgtcgcttcacctggctccctcttttaaagattttccttccctctttccaactccctgggtcctggatcctccaacagtgtcagggttagatgccttttatgggccacttgcattagtgtcctgatagaggcttaatcactgctcagaaactgccttctgcccactggcaaagggaggcaggggaaatacatgattctaattaatggtccaggcagagaggacactcagaatttcaggactgaagagtatacatgtgtgtgatggtaaatgggcaaaaatcatcccttggcttctcatgcataatgcatgggcacacagactcaaaccctctctcacacacatacacatatacattgttattccacacacaaggcataatcccagtgtccagtgcacatgcatacacgcacacattcccttcctaggccactgtattgctttcctagggcatcttcttataagacaccagtcgtataaggagcccaccccactcatctgagcttatcaaccaattacattaggaaagactgtatttcctagtaaggtcacattcagtagtactgagggttgggacttcaacacagctttttgggggatcataattcaacccatgacagccactgagattattatatctccagagaataaatgtgtggagttaaaaggaagatacatgtggtacaaggggtggtaaggcaagggtaaaaggggagggaggggattgaactagacacacacagacacatgagcaggactttggggagtgtgttttatatctgtcagatgcctagaacagcacctgaaatatgggactcaatcattttagtccccttctttctataagtgtgtgtgtgcggatatgtgtgctagatgttcttgctgtgttaggaggtgataaacatttgtccatgttatataggtggaaagggtcagactactaaattgtgaagacatcatctgtctgcatttattgagaatgtgaatatgaaacaagctgcaagtattctataaatgttcactgttattagatattgtatgtctttgtgtccttttattcatgaattcttgcacattatgaagaaagagtccatgtggtcagtgtcttacccggtgtagggtaaatgcacctgatagcaataacttaagcacacctttataatgaccctatatggcagatgctcctgaatgtgtgtttcgagctagaaaatccgggagtggccaatcggagattcgtttcttatctataatagacatctgagcccctggcccatcccatgaaacccaggctgtagagaggattgaggccttaagttttgggttaaatgacagttgccaggtgtcgctcattagggaaaggggttaagtgaaaatgctgtataaactgcatgatgtttgcaggcagttgtggttttcctgcccagcctgccaccaccgggccatgcggatatgttgtccagcccaacaccacaggaccatttctgtatgtaagacaattctatccagcccgccacctctggactccctcccctgtatgtaagccctcaataaaaccccacgtctcttttgctggcaaaaaaaaaaaaaaaaaaaaaaaaaaaaaaaaaaaaaaaaaaaaaaaaa

SEQ ID NO: 24371 - DNA, 3551 bp, Homo Sapiens
gtccaactttatcacgggagttgggattctggcactgattgatgcgttaagagataatgaaaccctggcagagctcaagattgacaatcagaggcagcagttggggacagctgtagaattggaaatggccaagatgcttgaggaaaatacaaatatccttaaatttggatatcagtttacacagcagggaccacgaaccagagcagctaatgctataacaaaaaacaatgacttagtgcgtaagagacgagttgaaggagatcaccagtaagtctgcaaaggtgtaatctttggaagacttcagaagatcaccaagggctcatgttggtgacatcatgtaaaattttcctgggtagaagggaaaagactggaaaaatttttttagtgacatgcattttttttttagttgttatcaaattgtaaaatcagtaatgtgatattttatattctgaaacatttctactttctgctaaaatcaattttaatttagtttaattgaatgatttatgatgaatcttgggcaaaaaaatacaactgtaaaaaatttcacaggtcatttgtgtagaataatttgaacattgtgaggaccaatcttttttaaatcaaaagggatgttgctggtatcagaattgttattgcttcatttagacataaaacacttaagtgttttcttcactccgtgacctggagagttttccattttttaaaatacatgaacttggcaagggtgtgatttttctttatcaagagaacaaaatgccagaatgttaaaacagttaactcaaaatctagtcatctgtgtaggagctaaagcaggtctccagggagagagggtggtcgtctgtgcattccaggttactgcacttgtctgatgtgacgtagcaacacccaggtcttcttaaaacaaagtcatcagctttgccaggttacatactttatttaaaagtatagtgaggtcgaagttcattccagtgtttcattttaataatgtgggcattattaaatttttgtggaagctaatagtaaaaaataaaagctgttttcaccacctccctccccaccccccaaaaaaggcgtacagccaactcttagttatttagggtaagagaaaaaagaaaactgttaaacaatgaaatcaaagataataaatatgatagatttccagtatgaggcacttgcaaaacagtcatttaaactgatggttactgtaagtcagttggaagctggcatgtatgtaaattacttggtgttacaccatatccgaagaagttcctatgtgcagtgcagaatttcataaacagtatttaatcactgctacaaatcttccaaccaagaaggaaaactgctattcttcataaatctaatttttagtatatgcttcctttcatcttatacttttatcaatatttataaaagtcatttctataataaaagcagtctttcttgctcaaagtattaaggtgaacaattgaatagagtactgtggtcgggagactgatttgagactgcagagctgatgctgggtagagggtctggacttgtattcatgttctgtctcagggcagcccctggagcaggagatggcagaggcatttacagctgcagaaaacagggaggaatggaatctgaggtagccctggcctcaaaattcaggcctggctgtatcatttacagagatttttctggagggaaaagtctcatttctgaggaaggcaaggtggctaatcattattaattttttttaaactttttgggccgggcgcagtggctcacgcctgtaatcccagcacttttgggaagccaaagtgggtggatcacttaaggtcaggagttcaagaccagcctggccaacatggtgaaaccctgtctctactaaaaatcaaaaaagtagccgggtgtggtggtgcacacctgtaatcccagctactcgggaggctgaggcaggagaattgcttgaacctgggagatggagattgcagtgagctgagatcgtaccactgcactgcagtctgggtgacaaagcaagactctgtctcaaaaaacaaacaaacaaacaaactttttgaaattgaattgcaatatgtctgctactttggcttgggctggacagtttatctaataagcaaggcagcttcttgtgtgctatggtaataagccttcttaacaggctaagcttccctcataagaactgtggtgtttctcttttttttttttgttttggtttgttttggttttttggttttgttttgttttgttttttaaatcagtatccaatgttttataggggccaaaggttaactttgcactattccctgtcagttaaaggccactgatatttttctaagttagcaaggctcacttgcttgctttcttgcctcccttgcctccatccctctcccttcctaccttctctatttacctatttctctccctccctctcttctcctctctttttttttccccgcatatgcagctttttgattgtacttgattttatagagactgcacagttccagcaagattgggagtcaggcatggagcaggcatctcaggctaccagaaagaattggtcacctagactttcagtcaggcatcctcgtttgcattgtcctgtaagtcaattagttgataaatagttcccccttcatcccttaagttttgtttttgtttttgtttttaatataggtaagtgggactctacctaaaattttgcatcatacttatgggtaatatctttttcatatattatttatcaaagtatgaagttgagtattttgcttgtaccatttcaattctgcattatagtagttcattgtataactgaaagaaatgatttcttcataagtgacattaaatatgaacattcatccaattgaatttacaaaatctttccaaaattataagggagaaaaatcgggtttacttcaatctttaaaaatctggcacctcttagtaactttcagtatttctaaattgctctaaaattttataataaatagattagggttttgcaatagtcttaatttttaagccaaaggttttctgagaccttaggttttgtagtctaaccagcttatgtggttatttaaaagaatattctttgtgtttttaaattgctatttttaaaaaagctttttattacccattttataaaatgttatactcatatttgtctgaatttttccagtattcctacatgaaattgtatgtattaaaaactcaatattagtggcaaatattaatactattaaaatggattttggtgctatattcttgtagctaaagcctagtagaattctcaagaataggtgaaatacactttcaaagttgcctgtcatttaaaagaccaaataagcattttgtattaaataaattagcagatggttagagacttcaaggagagttagcttggtcatttaattgcgacttcatgttatttgattgaaataacccacatccttgctttgtataagatattcgctctggagaagttacatgtaaatagaattctataaattgttttccagttgaaaaaaaaaaaaaaaaaaaaa

SEQ ID NO: 24372 - DNA, 3831 bp, Homo Sapiens
gtgatatttgtaaataaaggtagaaatattagatccatttctgcagaacttactgtacagtttagttggagtgtagcactgaagaactgtcagctcagcgttgactgaggagatagtgaaaatagcctatacacagcatcttgtgaaaagtactggcagccgtggttgcagcaaataatagggcaaaaaaaataataatagggtggtcggttccctttcatctccctcttctgaaaggaaaaaattgaattggaacgttcaagtccagtttgtgttcagtcataaaactgggccagttgttaaccttacagaatgagtcatgtggccagaccttcaagtccaaggccttcagacactaaggatgggaaaatgggtatttttctttggagaaaagctggaaatataaacatggcatttttaggtaaagtttcttccactagttgaattttcatgcagatatttttccttaacgttggtgccagtcaagcaaagagtattatgatggaaaagaccagtccaagccccatcgctccggagtgggagccagtgttcttgctaattgtttctttctgcactaaccactcagatgtctaatttaattgttttgcagtcaaatactggatttgtaaccttcagggctgacatgctgcccagtttgcttcatcgggagaatagcaacaggtagacacatctcaaggctaaatctgctcatgtcgccactgctctcataatgacacacatgcagtaagaagacttttgtaaggggatttgagtacacccaaatgaaattgtgacaggatgtttgtatggttaacatctgatatcagaatgttaaaagtgccttctgtcttaaatctcaaaccaaatattttgtgtgttgaccttgggcagaagaagtgtccttccctcctttcttcaccgtcaggtagaaaacctgcactctgcagaagggtcctgtgtgatcacttaatcctctggttgagaagcagcagtaatgtttttgcttccaacctgattaatcattttatgttgaaaatagtcaatgagaccagtatctcttgagtgctttatttgccttctctttgaagggaggggacgggctctgctctgtaaactcaaatgtgtagagtcagcaacaattccgtagcttccaactgactcagaattgatgcaacgtaggtcttctggcccgaggcaggtatcaagtccaaatcataatgaacttttcaccagtttcaaccagtttcttaaaagagagcttaagtcaagatttcatcaagacttgtgttttcccatgaatgtgaatctttcaatggctgttggagtatgtatgtactgttcttgcattctgaagtagttaaagaactctagaaagtactgattggccatctggtgtctatggagaaagaagtcctcacgtttgagggctgtacagtgaggccatcttgtagcagcgcatccagctctaccaaggcagtcctctggttcttttttctaagctacagtggaaatggcctaatggttaaaactgtggtatacatgacatcggttgtgctaaacaagttcctcgtgtcccaatatccaatggtttttcatcctattttgtatcaatcaacagagtatagttaaagcttgtcttgatgttgcattcttgcaaatgtcttcaactcttacctgagaaaacatggcaaaatggtcagccagacccttccagtttttcctttgcttttctaagcctcggggaaaccactgtttcagttgtataaaaacttttgccacattcctatggcccagtcgaattaataccctttttctcactgagagaggaacacgtactgcctgtcataacagcattgtaatgccagtgtctcagtaacagaatcctggtgggtgttaattgggtgttttttgccctggagaattcagattcctttctatacctccgattctgcccagaagagggggggaatcaccagtgttacaaaattagaagattgttttgcctgttttagactgaatatttgaacactgcagcattactagccaccagtgttaaaggacagatgaggggaaacatttgtttttagcagtaattccatgcctcatcttttttaagtgatttgttccaaatgaagccatttattgacttgatgttcacaaatatcatttgaagaaataacaggaattggggttagatgataaattctagggaatctaggtgatttggaggatttcatttgttttgcattacagctagttgctctcactaaaggtaaatttccggtgaaataactcaggtttaactagctgtgtgcccagaatcactgttccttcatacatgtgtcctctccttaaattcattactttcaaatgatgttcaaagcattgactattttcattcaaagaaactacattcggccgggcacggtggctcacgcctataatcccagcactttgggaggccgaggcgggtggattacctaaggtcaggagttcaagaccagcctggccagcatagtgaaaccccatctctactaaaaatacaaaaattagccaggcgcagtggcacacccctgtaatcccagctactcgggaggctgagggaggagaattgcttgagcccgggagacagaggttgcagtgagtcaagatcatgccactgcactccagcctggccaacagagcgagactgtcccccccccaaaaaaaaaagagagagactgcattcaaagaggaccaagactacagtgaaattaaaactgtttgctggctgggcatggtggctcacacctgtaatcccagcactttgggaggccgaggcggttggatcacctgaggtcagaagttcgagatcagcctgaccgacatagtggaaccctgtctttactaaaaatacaaaaattagctgggcatggtggcggcacctgtaatgccagctcctccagaggctgaggcaggagaattgcttgaacccagtaggtggaggttgcagtgagccacagttgcgccattgcactccagcctgggcaatgagtgaaactctgtctcaaataaaaaaataaaaataaaaactatttgttgacttttgtttttcatttagttttggaaaagactatttgcaaaagtacagagttatcttcagcaattacttcacaacttagattggtaccaagagtgacaggagatcttgtcttggaagatcattattagatgccaacaaggagacccactgtgatttctggtaacctatttggggaaaaagacctaatgacctaatatgcaatttctgtcctcgtgtctttttctctaacacacagtcatgggtgaaacatttcagacacctcaggcagcacttatggtttctaattgtgagaactacccttccatcaaacaaaaagggcaagggtgggagccccggctacttggttaaacattttttactacaaattcgcccagaaaaggtgaaatattttgttataaaactgtattaagcatggcctaagtatttattaggtatatgatctgtgtagtatgttccatcagaaatatttcttactagtgctttaagctccagagtaaacagtcatttaaaatggagttcactgggcaggtttcccctttaatctagatagaaatactctttatcagagatttaaggcactgttttgctaactggtaaataaaaccaaatgtaaatatgtaagaatgtttatttgttgcacataacttttttggtataaaataaatgtagaagttacctgtgaaaaaaaaaaaaaaaaaaaaaaaaaaaaaaaaaaaaaaaaaaaaaaaaaaaaaaaaaaaaaaaaaaaa

SEQ ID NO: 24373 - DNA, 2572 bp, Homo Sapiens
gaggttttggagagacccccatcactgactcctgctccctaaccctaccctcactttcgtccccgctcttcccagtgaaggatggtatgtagactcctgtacagacatagtggcttgcagaccctgacccagcccctgtggtcttagacaaatgtttttatttttgtcaccagccacccctgtcctgccgccttctctcgactccagagacctgttgcctcatctcttttggggaagagccggcagctcctcctcatcccctgccttaagtccagttctttgcctcaggggtctcgtttccttggccttccagggtccccaccccttttctccctgcctgattctctgagctctgggctccgtctgtattgggttgaggggcaaggattactgccttttgtaggtacttcacccctcaccccattttagcttccatagtctttgcaccaaatccaaattcttgataatttagatctcattttgagcaaaatttgctggccctctaataaatattttcaatataaatctgagcctttgactcagacatttttgccaaggagagtagaattaggaagtacccatatacatccagccaggatccacatggaggacctttctgatggctgcaatgactaggccattcctctgagtaactcacagtgtccttttgtaggcccttcttttccctgaaagactggttggtacttaccttgcagagcacatcctgggataagatccccagtgtctcccctgggaggctccccctctgtgtagcaccagccctgggaatgatggagcctagtgatcggggtttctcctgctgtcctttctgcaaaagttcacttgtttacccaccgcatgctagagaggagctcattggccaatgcttaccttgtccccaaaggggtgggttgtggagctcacttaggcagggcctctggctggggccagggttatgagataggcctgtatgaaatatgtcctgttctgggggtctgtctcttttcttctcttcaaaaactttgtgtcagagagtcccttctgagtcacataaatacctcactatcctggaaaacagggcctggatggtgactggggtcattgcctttgtggacaggatggagtgtggtgtggtctgaggagcaggttggggtgggggagagggaaaggatttgggatcttagttgctgccctaggttaggggctggggagtgtttattttaagatcctgccatgtttttaatcactgtgatttttttttcattcccctttcctaaaaaaaatttttttcctccaactctctaagcactaagggctgtgcctgagaatggtagcattttggtcttttgcttcagaactgtggtatctttgtcttttttcattattattattattattattattattattattattactattgttttttaaaatgtcaggatgaattgtcagacatatggccatgtgtttgtcctctgcttctcccctgtgggaagttgtctccatgctgtgaactgctgtggggtgtgcagctgactcagtccctctgagcagtttccccactgtgtctgtcccatcatgcgctggatctgctcattctcctgctgtgggggtatgcccacctcttacccccttgacaccatagggctgctgtggctgggcctcaccagcactgtcttttgtgtgactcatggcatcctcgttcatccccaccgtgcctagcaggccttccttttcaccacctcggaacgcttgcctttcctccctccacaacaggacgctgtgcctcagtccttcacctacctcgccactctgccactgtccccattggtcctttctcctaaactggtctttgtgctctctttgttttttcttatttccctcttgtctctcattttttcttcccattcccctcccatttcagcccttaacttttctctttcccatctccactcagtattccaatggcaaaccctgatgatgtaacacctgcgatgagacatcggactctccggaactttctcatctgacacgtctttttcccagggttcgtacttctcctccattggtcccaggctaactcccctgttcctctgtggtgtctgtcagtccgtctgtcttctctttcctctgcccttcccacagggcagtatctgctgatggattcagtcctggtgtgtgattgttgtgatttgttcttccgtgcgcaaaaggaagagggctttttgagtcccttccaagtgagattgtaaatgtagaattttccactgttggatctagatttttttccttttttttgggggggtggggttacagagctgagaccttgtgcatgcatgtagaaaattgtaaaatgtaaattttttttaatatataaaaagcttgtttctacagtttgcagtggatctaaacattacggcaattttaggatttttttcttaaacataggaactaaaactgtacaaattttttttatataaaataaagacatttgacttttgtgggaaaaaaaaaaaaaaaaaaaaaaaaaaaaaaaaaaaaaaaaaaaaaaaaaaaaaaaaaaaaaaaaaaa

SEQ ID NO: 24374 - DNA, 1526 bp, Homo Sapiens
aacatcatacatagtaggtgaatcgttttgtagagtgaagaatgctaatgtaaagcaaatagtcacccacgttccttgtaaatccaaatgtttctatattgtagctttgcttaaaatggggtcggccccaactgcatcctcctctttggcgggctggggagcggcccccagccgggacgggagggcagcgaccccgaggcctcgtggacgtgggagagagtgtggtgggaagtcttgagcggaggaggggatctgcccttctccactcctctcttggatccgcctcggtttcctgtccccccaccacccgcctgccccgcggaagaccgcccagtgagccagcccccaccttccaggcgccttcgccctggggatccaaccaacttgtatcgagtgggcggggcaacggctccccatttttcccgagccccgcccacagagctcttagccaatcctatgcagagagcatctcctggcaggggtctcttcccaaccagaccccacccaggcacattagcgaccaggcttgggcttccccagcgccccaccaccaccacgtgcaggtggagctctgggatgctatgttggggcggcaagcggtgggccgagggccgggtaggctagcacgggaggtaagggtggtatgggatggggcgggggcggtctagggcaataggagagcagagaatgggggaacttgagggtggggggagggcaccggagccttgccaccatcccaggactttgggcaagtcacccgcactccctgggcctcggtttccccatctgtaaaatgatggtaataatacttcacctacctcataggggaggttgtgaggccaccatcacctgacctgggggtcaaggcaggaggactccgaaggtgctacccgtgagcaaagtgtaattaccgaatcctgactgcaaggcccacctgcccctcccccacagagcctccagagctagctgaggccaacgcaggcccatccgtctcttcactctgtcgcaggccctttcatgggcttcgtctgccatctttgtgggtgccctagacttagtccttatcttgtcctggtttcctttcttgtgaccatctccccatgaaagtgctgtacaaattccacccgccccaggacccccgcacctgccctctggcaccagatgccagggaagggacagaggaaaacagccacaaacaagccaggggggctccccggagccccaggggtggggattggtggccactgtttgtatgttcttgagtgcaagtgttttataaaaaataaaacaaaaacccaccatcacaaaaaaaaaaattttgcagcgaagagaaatgaagaaaaactgaagaaaaaaaaaaaacaggaaaaaaagaaccatacaaaatttttccaccacacataccctctaagccagcaagatttcctctttgcaaaatcatatttttgtgggaatgggccctgctttttgtggcaaggcctgttctgattaataaaggatcgtgaaaaagtaaaaaaaaaaaaaaa

SEQ ID NO: 24375 - DNA, 3605 bp, Homo Sapiens
cggacgcgtgggggctttttaattttgtttgagaatgcaaatgtatactgtaagtctacctttactatctactatgcctacttcaccatctcttaaggactcggcatttgtccacagtcagactgcaagagagggtaggtcatgaacagtcacccgtgctggctgtagcccccacagaggcaatcatgcccaatagattcaagagaagctaagcggaaatggagggtggaaggtgtgatctgtgggactgtctgggcctgttactcatcctgctatcaatttcttattaattaatcttgatgattcttattaattaatcacatttgcaggaaattcagatgaggcaagaaaattttattggcctgggtaagactgaaagcattccaaattaggcttagactgtgcaaagggcttagctaagttatcgagcttaaaacccgtcaattaaacaaacattatttgaacagttactgcatgccacgcactgtgttgggcttagtaataaaaaaaagaaaagataagtgcttgttctagcataaattaaaaggtccaagggaatttaatctggaagagaacatatgccaatttttaaactatgacagcttttttttttctctttccattcaaatagtcctggttcattcccagaagggcacaaaatgaatgaataaataaataaatgaataaagacaaaagccaaggtgtatgctctcaagttccaaagatgttatcaaaagctgaaatcatttgtttggtcattcagcaagctaattgagtctctgttatataccaagcactggggataccatggcgaaaaacaactttgttccttcctcctagaacttacattttaatggaaatagacaaaacacatcttcttaacggatggtgacctataaccattaatgttgaaaatggaagagacttgcttccaaaagattaaaaggagttgttcttttctccttcagaaaaataccagatcatttcctaaaatctccagtcccaagtattacatcgtggtttccctccccgactttttattttattttattctatttttttgagatggagtctcgctctgtcgccaaggctggagtgcagtggtgtgatctcggctcactgcaacctccgcctcctgggttcaggagattctcctctgtcggcgtcccaagtagctggaattacagccatgcggcaccattcccggctaatttttgtatttttggtggagatgggttttcaccatgttggccgggctggtctcaaactcctgatttcaggcgatccacccacctcgacttcccaaagtgctgggattacagcgtgagctacctggcccctccccaaattttaacatcagatctcaacatatttgttgagaacttgtttagatcatcactatcgagtaaatttatgtcagttctttagagcatttgcttcacacacagttcaaccatttaaccagaaattaaaatatcacccttttcagccctcccatgaagaatttctaggtcataaacatgaataatactcagtatatgtataatatcatatttaattgttgcaacttttcttggcgtgtttaaatcctcatgtctttgagggatcccaccacaggtgaaggaagtaaagaccacttctcccccagtctctgctttctgcagtgctcactcatatcctggcatttagcatggtgtgttgaaattaggtttacttcttgtctctccaagtggctcctctcttaaaagacagaaactagggtttagtcatcatttgtgcttcctgctagaaacccacagccttgaataatggcttcctgcctccttgagtcactttaatatccctggtgcataggacctggcatgcgtcaggctgctcgggaaatgtgggaactggacacccagaacactgctgtgctggggctatttggggcctgctgtcaggcagaaagacgttttgaattgggctttctgcccttgttgagttttctcttaagtaaagtccaaagtccaaggggcagatggccagatgcactgcccagtaaggcaggaagccaaagaggcagtgcccagccccacaaaggctgcccgactccctgggacagtagtgtggagtcccagcccaggctgacctcacaccggagcttcctagcttcctttctttgctcaatgcagggcttcttgcaccccctggaaagctaagagatttttttcaaccctaaaagagagtacctttcactgcattggatggatgaacatcagtgccctaactttatccatcatgtaggtcagggaggactgggcactatttggcaggatgtactccagaatataatcaaagaattttctgtacatatttcactaaagacaagtttttgggctggatgtggtagcttacacctgtaatcccagcactttgggaggctgaggtgagagggtcgcttgagcccaggagttctagacaagcctgggaaacatggcaagatctcatccttacaaaaaataataatggtgtgtgcctgcagtcctagctacttgggtggttgaggcaggaggattgtttgagcgagggaggttgaggctgcagtgaactatgattttaccactgcactccagcttgggcgacggggtgagaccctgtctcaaaaaaaaaaaaaaaagttttctagaataagcaggatgattgtttaatttgaagatggaacaggaaactagagtgcatttaaaatactctgtcttcattttaacatgttgaatggaataactgcatatcaccatgagtttgttttgcttttcatacagacttgtatgtgtcatttgagtggtttccagattggagcgaggttattctgatctaaatgaacagcatttttttccttagcctctgtttgccactctgggtatctctcctatgggcaaagccattagaaatgcataaaacctcgagacatggtttttggcaaaaactccatgactttaaactagctcttttactactgacctttcacagagaaaaaatatttcccttgaaaaaaactgggcttgtcattttttcccttgtagctttaagcagagacataagtgccttgcattacacatagtaaactttctttaaaaaaaaaaaaaaaagattttggagactaccagggtaagattccaacttgtccaaaagctttctggccttacatattttattataaaaattctcaagtctggtaatcttctatgtcagagctagtgatttcaaaaggtttcacaattccccaagacaaaagtgattttcgttcattataataaggttaagtgatatgtgattcatagcaattttgatgtgaagaagggaaggacatcattgacttaataatagtatcagtcggtgcaacagttggcaacatgtgccttcacactttaccataaagagacgggtttgagggtttgccttctaaagtctgcaacttcaagaaaaaaaaatcgacactgtggattgactttcccggtcactatataaagcaaataaacttaaaacactttgtaaccatgtatttactctgccaggtgcctatattccaataaaatgttcatccttgaaaaaaaaaaaaaaaaagg

SEQ ID NO: 24376 - DNA, 2656 bp, Homo Sapiens
ttgaattcctttttctactgggcatcaacacgtatggttggagacaggctggagtaaaccatgtactcatctttgaacttaatccgagaagcaatttgtctcatcaacatctctttgagattgctggattcctcgggatattgtggtgcctgagccttctggcatgcttctttgctccaattagtgtcatccccacatatgtgtatccacttgccctttatggatttatggttttcttccttatcaaccccaccaaaactttctactataaatcccggttttggctgcttaaactgctgtttcgagtatttacagcccccttccataaggtaggctttgctgatttctggctggcggatcagctgaacagcctgtcagtgatactgatggacctggaatatatgatctgcttctacagtttggagctcaaatgggatgaaagtaagggcctgttgccaaataattcagaagaatcaggaatttgccacaaatatacatatggtgtgcgggccattgttcagtgcattcctgcttggcttcgcttcatccagtgcctgcgccgatatcgagacacaaaaagggcctttcctcatttagttaatgctggcaaatactccacaactttcttcatggtgacgtttgcagccctttacagcactcacaaagaacgaggtcactcggacactatggtgttcttttacctgtggattgtcttttatatcatcagttcctgctataccctcatctgggatctcaagatggactggggtctcttcgataagaatgctggagagaacactttcctccgggaagagattgtatacccccaaaaagcctactactactgtgccataatagaggatgtgattctgcgctttgcttggactatccaaatctcgattacctctacaactttgttgcctcattctggggacatcattgctactgtctttgccccacttgaggttttccggcgatttgtgtggaacttcttccgcctggagaatgaacatctgaataactgtggtgaattccgtgctgtgcgggacatctctgtggcccccctgaacgcagatgatcagactctcctagaacagatgatggaccaggatgatggggtacgaaaccgccagaagaatcggtcatggaagtacaaccagagcatatccctgcgccggcctcgcctcgcttctcaatccaaggctcgtgacactaaggtattgatagaagacacagatgatgaagctaacacttgaattttctgaagtctagcttaacatctttggttttcctactctacaatcctttcctcgaccaacgcaacctctagtacctttccagccgaaaacaggagaaaacacataacacattttccgagctcttccggatcggatcctatggactccaaacaagctcactgtgtttcttttcttttcttctggtttaattttaattttctattttcaaaacaaatatttacttcatttgccaatcagaggatgttttaagaaacaaaacatagtatcttatggattgtttacaatcacaaggacatagatacctatcaggatgaagaacaggcattgcaaggaccctctgatgggacggtactgagatatctcggcttccgctcagcccggttttgactggttgaaaccggacattggtttttaaattttttgtcagtttatgtggagaatttttttctttccttcatacccagcgcaaaggcactggccgcacttgcaggaaaagtgcaacttaaagcagtaccttcattcatgaagctactttttaatttgatgtaacttttcttattttgggaagggttgctgggtgggtgggaaatatgatgtatttgttacacatagttttctcattatttatgaaacttaaccatacagaatgatataactcctgtgcaatgaaggtgataacagtaaaagaaggcaggggaaacttacgttggatgacatttatgagggtcagtcccacatacctctttcaggagacaacttgcaccagtttgaccttttcttttctttgtttttattttaagccaaagtttcattgctaacttcttaagttgctgctgctttagagtcctgagcatatctctcgtaacaaggaatcccacacttcacaccaccggctgaatttcatggaagaggttctgataatttttttaactttttaaggaacagatgtggaatacactggcccatatttcaaccttaacagctgaagctatgccttattatgcatccacatgtatggtccctgtagcgtgacctttactagctctgaatcagaagacagagctatttcagaggctctgtgtgccctcactagatagtttttcttctgggttcaaccactttagccagaatttgatcaaattaaaagtctgtcatggggaaactatatttttgagcacatggaacaaattatacttcctcattcatattatgttgatacaaaagaccttggcagccatttctcccagcagttttaaaggatgaacattggatttcatgccatcccatagaaaacctgttttaaaattttagggatctttacttggtcatacatgaaaagtacactgcttagaaattatagactattatgatctgtcaaaaaaaaaaaaaaaaaaaaa

SEQ ID NO: 24377 - DNA, 2823 bp, Homo Sapiens
gttgcagtgagccaagattgtgccattgcactccagcctgggtgacagagcgagacttcgtctcagaaaaaaaaaaaaaaaagtaaggtggatatgtgcagtggctcaggccagccagcctgcaggaccacctttgggaggccagagcaggaagatcccttgaggctggtccctaactcctgacctcaagtgatccgcccgcctcagcctctcaaggtgctgggattacagacatgagccaccacacccggcaaatgtactgtattttagttgttgataaatgtgaaaataaatagaacagggaaaggggataaatagtgggtgaagcggtggaggctgcaattttcagcaggacagggagggcagggtccacggcaaaagtgacagttgggccctagaggaattagaatgtgaggtgaggctgggggacggaacctgtggagcacagaggctactttgaaaccatggaggtgcagcgtgtcgtggaggaggagtgtatcctctgaagcacgccgatctccagagattccttccttactccctctttgctccagccagtggaagtatggctggtgtgagagtttaccttctgaccagaactgtctcaagaatttaggaattcttgttgcaagaatgttgcaagtgcttgtaataagtagaagaggaatagaaggaaggaattaagagctggaagctccctggtggggattctgagcttgtataacacagttaacattgttccccttgaggatattcttcatttatcagcatcatgcagaatgtcaccattcaggagttgaattgtgaattcaattaagtagtgatttgggtgttcctaggtagatatactcacaatatggtagagttgaaaaaatgatggagataaaaacaattttggagggaagtgatctgaaaatacagagcaaagttcttgttttccatttagttaccaggtattttgtaaaccttatgcatgacctttgtatttacagaacaaatgaagcatccattaacttcgaatgatcagatgctagggtgtgaggaattttcaggccaaaatgcactgggttattgtctcctattgacagtgtgatattacagataacctctaggagatcctgaacatattcaggctaaaccaggcaaacaaacattcaggatgttaccagtgtggaaaacccctaggaggtaagtatggcagggaatcagtctgagaaagagggtaaatcgaatgaagctattttggttataaaagtgctgcgaatgtatgagagtacttcaaaactactctctatgctacaaaagccaataagtttagttatgcagttccttttgtgtcattacatttcaatagagtttatttagttttgtttctgtttcacctatgaaatgtgtattagtcaggattctccagagaaacagaaccaatagaatatatgtagatatataaaaagggatttgttataaggaattagattgtgcaattttggaggctgaaaagtcccaccatctgccgtggaaaactggtggtatagtttcagtctaagcccaaaggcctgagaaccaggagaacccgtggtgtaagtcctgacttctgagacccaagaaccaggagctatgatgtccaatgtcccagggcaggagaacatgcatgtcccagatcaacatgagagagataattcacctttcctctttgttctctgtaggccttcaatagattggctagtgcccacctacattgctgagggcagtctctttattcagtctactgattcgaatgttaatttcttccgcagacattctcacaaacacacccaggaataatgttttaccagctacctggctatctgtttagcccagtcaaattgacacatgaaactaaccatcacaaaactcaactcttattttaagatagcagctttaaaaaaatttactatacacatttaattaaatttattttcagtttacctctcagttgtactacttactagctgtgttacaatgagtacaacatttagggtttctgcaccttgatttagttctctagaaaatggtgagtactactattgtctacatcacagaattattttgaggattaaataaaattaaaattataagggctgaggacattacatggcatataatacataattattacatattagctataattattactgttgtgtcatcattattataattaccatcattttctcacagaagcatttcagggctgttattacaaaactctttcccttgtgtttccaatatgccaactatttcaatcaagaaaattaatagcctatggaaagacagtggcctttgtcatcactacgattgattctattaaatgtattaaaagtaatggcaaaaaccccaattacttttgcaccagcataaaatcactaggtgcatgaattttgcataattcttttaatttctcagaaccttgatgtttctcatttgttcaaccaggtagatattattaatcccttcaaagagatgtgaagaacaaagttcagaaatgttaaggacggtaaacgatatcatatttaagggcttggcacttcgttgactcgataaatagtagctactactttgagctattattccctttcatgaaaatcctcctactaaaactatgtgcttcttccaacagagacagccaaaattaagactgatggagaaatttcccccagcaataccacttaaaaatatgtattttttactttaattgcctggtattaagttttctgcaggaatacaaataaaattgcttgtatggctttgagaaactacagttaaaaaaaaaaaaaaaaaaaa

SEQ ID NO: 24378 - DNA, 842 bp, Homo Sapiens
atttggtgattggcagcctctgaaatgttagattaatttgatctagttctaaagtgctttagtcatatatgaatttaaacctagtaccatccaaaaccatgtaatggattttaagaatctgttaggccttcttagcctttatacatgtccctacctgatttttactgtccttcatgatcctgttcttgaaaacttcagtttgtatttgagaatcctttaaatctccttccaatttgttttctccctgaagtaatataaaaggaagtatttaagtgaaagtttaagagttttaaaacattctttaaaattaatacagatagttagctatttatcttttaaaaataaactaaggtaaaaaacgtgacactttacatatttcatatttttcatatagtctggaggtatacacagttgttttgtttttaaccacggtattgaaacctttaaaaggtaattaagcatttggtcaagtaaatatagaacatttgtataaagaaagaaatgaaattgtgcttaatgttatatactgttattatttgcaggctggttttaattcttaatttgattagcaaagctaaaaaagtggatgttgaagttgaaagttttaaagaggtacaaaatcttacaaggacataaattattatttggttgaaaaatagcctattagatattgtatgtcccttcctctgtacaaattgtaaaatacttaaaataactatgaagaattcatataggaagtgtgatactattgtaaatgtgtatttgagaatatgcaaaaataaaaataatattttactgttaataaatgtttacttgtatatgaaaaaaaaaaaaaaaaaaaa

SEQ ID NO: 24379 - DNA, 1795 bp, Homo Sapiens
gtgtgctcctgcaccactgatcccttccacaacatggactgtctgtgatgcacgtgtgcaggatgctgggaatgcccaggtggaaagacacacgtgctgcccccaggaactgactgactggtgtttgatatacagaggaaagtcacctataggaacctgagcacctggtatacagagcttcgggagttcaggccagagatcccatgcatcgtggtggccaataaaattgatgcagacataaacgtgacccaaaaaagcttcaattttgccaagaagttctccctgcccctgtatttcgtctcggctgctgatggtaccaatgttgtgaagctcttcaatgatgcaattcgattagctgtgtcttacaaacagaactcccaggacttcatggatgagatttttcaggagctcgagaacttcagcttggagcaggaagaggaggacgtgccagaccaggaacagagcagcagcatcgagaccccatcagaggaggtggcctctccccacagctgaggggctggggctaggggtgggtggagcccttttaaaatacccttcccttcaacaactctccagctctgaatggagaaactctctaggccatcccctcttctacctcctgcaacccacccatcctattagcctcccacattcaaggcccgtgatacagggatgaggtcagcaccagcaaactctggactggtggaagaattccccaccagatctccttgaagcagaattagggatcagcatcattaacaccttccccaccccctccccccaggcagacagtgaagagaatcagaaaacatgattatgtgtcactttaatacaggaaatttaggtgttttttggtgtttttgtttttgttttctttccaaagctcacctcggggacaattccttgggcttctcctgaggtaatgattacccccccacccacagctgagtctgtgaggccccatcctttccctacgttttctcccatcttttttcctcttcagtctcccagtcatctggtttgtttgtttctttgttcgtcctgagacggagtctcgctctgtcgccaggctggagtgcagtggcgcagtctcggctcgctgcaacctctgactccctggttcaaacgattctcctgcctcagcctcccgagtggctggcatcaccacgcccagctaatttttgtatttttagtagagacggggtttcaccatgttgcccaggatggtctcgatctcctcacctcgtgatccgcccgcctcggcctcccaaagtgctgggattacaggcatgagccaccgcgcccggccctaatcatctgtttttaaacaattgtttttgagcagatagctattcattccagatttccgtgtacccactctgtttcaggagctcttctaggtaaagctgagatcacaggaacagcaggtgacaggcctagctatagttaggaatacacaagcggtaaaatcgagtccttacagccataccacaaggtacgtccatttggactacaagaagagcttcctttaaagttcctatttcagcataaagaggctgtcctttttttttaggaatagtttggaccttgtgcctcctgtgggaggctgaggactgcaagaggagagctagcagatatgcctgttcacccctctctggtacttgtggcttgctagtatgtttttatgataatctcgggcattgtttgcattgtgtttattaatagggttttgtttttattgtttccttttttacagtaaaggctgaatgacataaaaaaaaaaaaaaaaaaaaaa

SEQ ID NO: 24380 - DNA, 3601 bp, Homo Sapiens
gcctagagggagaaaacttgttgaaattcagagatccccctccccctaccagtacacaccaaatcagacgcctctgaccagatctgaatttggctctcagagatttccattgtagccaggcagttggggcactttctgagtgctgcctccacctcactgtccccagcctgcctgcctccgtttccctagccctgggcctgtgccgctgtcaccatcacctgggcgccctctagtggatgaatcggattatgcacgagggggcttggagcaggattcagaaggggctcctgtccttccttgaaatgctggacgccgggatcctggaacagctcttcaggtctctgcattcctcctggcaacagccagagcctgggcgcagggggctactgttgtttgaaggctgaaggctgcagcctggtagggcactcaggagacctggcagttggctgcagggccaggtctaggggccagggcatgagggatgctctgggctggctcagccccgggcccccatgcggattgtgactgtgggggcatggccacatgatgttgaggggggatctctgaccctgaccttcttggctctgtgcatccttgaaaccagaaaggtctggaacaaatcagtgaacaatgccctaactcggggagggagccacatcctgaccccagcagcctcagaaggatccgtgtcagggttatggggcaccctgggggccccgagtctgcatgggtctccacgtgcaacttctgccggaaactctgaaaaatcccaactgcgggggtcataggacacaatcagaaatgctgatgccactgtgtgtggatccccgggccctgggggtcaggagcatgtagaaggtgggccacagggggttcataagagaatcctgtaaccgcccctgccccccaaacttagaagcccactggagggccatgggtgaaagcttgggggggtgtcctgtggagtgggtggtggggggtctttgggtttacatgctgctgggcctgagcagcaggaccccgtccacagctgatccctgggccctgctgctcagctgctctcttgagtgttgctgtggctgccgagagagcctgagtcgagcctctcttgtgccggccgtacgctgtcaggccacgctggtgagtttggcaaggcacagatgcccagagcagagaactttccttggggatttaatatgtgcgaatcttgaggtccggcaaatctttccctcagctagagagggggtttttgagaccagaatcacctcagcatcctcctgtccccagctgtgtccagcctgtctgcagggacatcctgagaggactaggctctcccctcatccacctgcgtaagtgccaccctgaagcctgtccacccatgcttggagaggcttggcctcaacctgcttagccagcagcaggcttgggcctggggtgcagtagagacccaggtggctgtggggtggttgcttcatggggtggttctgaaacgcagttggaagtgcatggacagtgccttacctgttctctgtgggaccctgtttagaaaccaggtctgagttactgggggtcatcgctacattctgatggcctagctgtgtggaggccacggtggagccccatccaaggagccagggccctgggtctagccgtgaccagaacgcatgccctggaggtgtttctcatcttgcacctgtgttgcctggtgtctcaagtggccacaaaactctgtgttagctctaggtgcccctgggcttcggaaccagggtttcccttcatctcagtgacccgggagcatctgggcagtgagtaaagagggtgatttacttgatgggtacgtttggtcctgcctaggagcccccccaggcacggtcctgggacctgaagctgccctcgttggtggaggggagggagagagcttcagggatgaggtggcgttgagctgggcgggaagggtgagcccctgcaaggtggggtgggtgtgctggggacgctgagcagcacggccagcaggtgggtcttcagctcggtacccggtgggacttgtggttggggctggtgtgtggccaggagaggggctggcagaagacaagggggactgtgaggcagctcccatccagcggttgaagcctgatggcctggctctgtgcctcagttctctcatctataaaatgagaaaacagtgccagcctcccagacctgtcatgaggatgaacgagtgaccacgtagcatgggctgggtgcgtgtcacctaacattaccagcctttgcaaggagagccctggggacctggctgagtttttcccttgcctggcccactgcacctgtccccacaggagccaaggaggtcctgctgctggcccggtagacggaccaatggagggtctcgctggacacaccggacttcaccgacatcgtgctgcagctggacgacatccagcatgccatcgccatcaactatgacccaatggagggccacgtctactggacggatgacgaggtgtgggccatccgcagggcatacctggatgggtctggggcgcagacgctgatcaacaccaagatcaacgaccccgatgacatcgcagtcaactgggtggcccgaagcctctattggacccacacaggcactgaacacatcgaggtgacgtgcctcaacagcacctcccacaagatcctggtgtcagaggacatggacgagccccgtgccattgcactgcatcccgagatgggcctcacgtactggatagactggggagagaaccctgaaatcaagcgtgccaacctggacaggcaggagctgcgcgtgctggtcaatgcttccctcgggtggcccaacggcctggccctggacctgcaggaagggaagctctactggggagatgccaagacagataagatcgaggcgatcagtgtcgatgagacgaagaggcagaccctcctgaaggacaagctcccacacattttcaggttcaccctgctgggggacttcatctactggaccgcctggcagcaccacagcatcaagcgggtacacaaggtcaaggccaaccgggacgtcatcattgaccagctgcccgacctgatggggctcaaagctgtgaacgtggacaaggtcgtcggaaccaaccctcatgcggacaggaatgggggtgcagccacctgtgcttcttcacgccccacacaacccggtttggctgccccatctagggcctggaactgctgagtgacatgaagacctgcatcatgcccaaggccttcttggtcttcaccagtagagccgccatccacaggatctccctcgagaccaacaacaacgatgtggccatcctgctctcggcgtcaaggaggcctcggccctggactttgatgtgtccagcaaccacatctactggacagacatcagcctgaaggtagcgtgggcccgaacatgcacacgtgcagcctatatgggaaaaccttccctctgtacctgcctcaaaggtttcagacatttttcttaaagcactataatatttattgtaacacaattcaagctaattaaatatgagcaagcctatttcaaaaaaaaaaaaaaaaaaaaacaaaaaaaaaaaaaaaa

SEQ ID NO: 24381 - DNA, 4164 bp, Homo Sapiens
gcggcagcctctggtgacgtgctgtccaccaggccttggagacaggctagcctggccacagaattaaacgtgttgccacacctgccggcttctgaactctgtccttggcttcctgcaccctgcgtcaccacctccgggggcccccagaccctaactaaagcagggaccctgtatctggcaccggacagcacctggctgctcaggacgaatgaatgacggcgtgatcctccacagcctgacttaaaggcaccctgtgtggccgcactgctccctctggcccaaccatgcctctgtccagccacctgctgcccgccttggtcctgttcctgggagccctggccaggccgtgtgcaacttcgtgtgtgactgcagggactgctcagatgaggcccagtgtggttaccacggggcctcgcccaccctgggcgcccccttcgcctgtgacttcgagcaggacccctgcggctggcgggacattagtacctcaggctacagctggctccgagacagggcaggggccgcactggagggtcctgggcctcactcagaccacacactgggcaccgacttgggtgaggccagggcaagtctctgtgcgcccctgtcccaataccctccttgctccctgccccgtctcctgacctctcacctgcgccaggctggtacatggccgttggaacccaccgagggaaagaggcatccaccgcagccctgcgctcgccaaccctgcgagaggcagcctcctcttgcaagctgaggctctggtaccacgcggcctctggaggtgcaccctggacccccaaggctcgtggggggtgcccaaggggagggcgggtgggcagctggggacaagcagggccgcagctgccctgggacccctgacattgcagatgtggctgaactgcgggtggagctgacccatggcgcagagaccctgaccctgtggcagagcacagggccctggggccctggctggcaggagttggcagtgaccacaggccgcatccggggtgacttccgagtgaccttctctgccacccgaaatgccacccacaggggcgctgtggctctagatgacctagagttctgggactgtggtctgcccaccccccaggccaactgtcccccgggacaccaccactgccagaacaaggtctgcgtggagccccagcagctgtgcgacggggaagacaactgcggggacctgtctgatgagaacccactcacctgtggccgccacatagccaccgactttgagacaggcctgggcccatggaaccgctcggaaggctggtcccggaaccaccgtgctggtggtcctgagcgcccctcctggccacgccgtgaccacagccggaacagtgcacaggctggtcttctatcagtacctgagtgggtctgaggctggctgcctccagctgttcctgcagactctggggcccggcgccccccgggcccccgtcctgctgcggaggcgccgaggggagctggggaccgcctgggtccgagaccgtgttgacatccagagcgcctaccccttccagatcctcctggccgggcagacaggcccggggggcgtcgtgggtctggacgacctcatcctgtctgaccactgcagaccagtctcggaggtgtccaccctgcagccgctgcctcctgggccccgggccccagccccccagcccctgccgcccagctcgcggctccaggattcctgcaagcaggggcatcttgcctgcggggacctgtgtgtgcccccggaacaactgtgtgacttcgaggagcagtgcgcagggggcgaggacgagcaggcctgtggcaccacagactttgagtcccccgaggctgggggctgggaggacgccagcgtggggcggctgcagtggcggcgtgtctcagcccaggagagccaggggtccagtgcagctgctgctgggcacttcctgtctctgcagcgggcctgggggcagctaggcgctgaggcccgggtcctcacacccctccttggcccttctggccccagctgtgaactccacctggcttattatttacagagccagccccgagctggagtttgtcggtttggtggacttggatggccctgaccagcagggagctggggtggacaacgtgaccctgagggactgtagccccacagtgaccaccgagagagacagaggttcctgctgcccatcctcactcccacctgggtgctccccttacactcctccagggaccccggagcttccaccttctcagggctctggagggggaggggagaaggtgtgtgacgccacctggccccacccccagaggtctcctgtaactttgagcgggacacatgcagctggtacccaggccacctctcagacacacactggcgctgggtggagagccgcggccctgaccacgaccacaccacaggccaaggccactttgtgctcctggaccccacagaccccctggcctggggccacagtgcccacctgctctccaggccccaggtgccagcagcacccacggagtgtctcagcttctggtaccacctccatgggccccagattgggactctgcgcctagccatgagacgggaaggggaggagacacacctgtggtcgcggtcaggcacccagggcaaccgctggcacgaggcctgggccaccctttcccaccagcctggctcccatgcccagtaccagctgctgttcgagggcctccgggacggataccacggcaccatggcgctggacgatgtggccgtgcggccgggcccctgctgggcccctaattactgctcctttgaggactcagactgcggcttctcccctggaggccaaggtctctggaggcggcaggccaatgcctcgggccatgctgcctggggccccccaacagaccataccactgagacagcccaagggcactacatggtggtggacacaagcccagacgcactaccccggggccagacggcctccctgacctccaaggagcacaggcccctggcccagcctgcttgtctgaccttctggtaccacgggagcctccgcagcccaggcaccctgcgggtctacctggaggagcgcgggaggcaccaggtgctcagcctcagtgcccacggcgggcttgcctggcgcctgggcagcatggacgtgcaggccgagcgagcctggagggttcctgtgattttgagtctggcctgtgtggctggagccacctggccgggcccggcctgggcggatacagctgggactggggcgggggagccaccccctctcgttacccccagccccctgtggaccacaccctgggcacagaggcaggccactttgccttctttgaaactggcgtgctgggccccgggggccgggccgcctggctgcgcagcgagcctctgccggccaccccagcctcctgcctccgcttctggtaccacatgggttttcctgagcacttctacaagggggagctgaaggtactgctgcacagtgctcagggccagctggctgtgtggggcgcaggcgggcatcggcggcaccagtggctggaggcccaggtggaggtagccagtgccaaggagttccagatcgtgtttgaagccactctgggcggccagccagccctggggcccattgccctggatgacgtggagtatctggctgggcagcattgccagcagcctgcccccagcccggggaacacagccgcacccgggtctgtgccagctgtggttggcagtgccctcctattgctcatgctcctggtgctgctgggacttgggggacggcgctggctgcagaagaaggggagctgccccttccagagcaacacagaggccacagcccctggctttgacaacatccttttcaatgcggatggtgtcaccctcccggcatctgtcaccagtgatccgtagaccaccccagacaaggccccgcttcctcacgtgacatccagcacttggtcagaccctagccagggaccggacacctgccccgcccaggctgggacaggctgcaggtctcaggatatgctgaggcctgggcgttccctgccctgtgctgactctgttgctctgtgaataaacaccctggcccatgagggcagccccaaaaaaaaaaaaaaaaaaaaaaaaaaaaaaaaaaaaaaaaaaaaaaaaaaaaa

SEQ ID NO: 24382 - DNA, 3620 bp, Homo Sapiens
gggaaaaggcatattcacaaggttacaataagtgagttttaggccttggccttcagggtcctggagtgtaaagactagaggaaaggagaccaagaaatcctaaccttacaacttagcaaaaaactgaatcttttttataagggtcagagctttagaaaatttttttaaacctaagctaaacaaagaatggcaaaagaaaatgccacttttatcgaagcctttatttttattacaactgattattttctgttagtgtagaaaactcagtaaaacaggatgtgttctagaaatattgtctaggagatataatcatgttttctgataaattgacagaaaaggaaaaattttgtatattattatagcattgtgtgcagtttgcagttagagccactatggatagtaattgtcattattcttagttgcttatcattttatttagaatttgtgagtttaagcttccattttaaggtaaaatcagttagtttgaacacacaataaataaggttaataaagcttatttattgatcatttctgtccacctacaatcattgccttttgcagggtgcctgtgagatataaaatttataactgccacatcctttcttaggaatttttaaatttctattttcttgtaatatgaatacaagaatacattcttgtaaatgaatgtattgaacattagttatggagtatttttcttagctacttgatattagatattgatcagtggaataaagttattgaacagcttggaacaccatgtcctgaattcatgaagaaactgcaaccaacagtaaggacttacgttgaaaacagacctaaatatgctggatatagctttgagaaactcttccctgatgtccttttcccagctgactcagaacacaacaaacttaaaggtactttttacaaatatgtacatttaatcccatttggggtgtgtagtgtgtgtgtatgggtttgtgtgtttatatgtattcatattcttatgggacatgaacccaaggttttctctggatggtggggaaaaaaatgaggtttttgttttttttttctttaatcttatatattttaatcatatgtataagataattttacagtaatatttttaaaacatatgctttttaaaaaatctcaaattgctgaaagttattaataatttgagaatctttacaaatatatgtacattaacaccattatgtttgcagccagtcaggcaagggatttgttatccaaaatgctggtaatagatgcatctaaaaggatctctgtagatgaagctctccaacacccgtacatcaatgtctggtatgatccttctgaagcagaagctgtaagttattttcttaatgtttacagaacatattgcattcttagagttagaatgacagttaggtttggaggagaccttttaattttaaataaaaatgtagatacatgatgatgatgtttttctgtttcttcatgaagactacgtcaaataaactaatgaacatattcgagcccctcctacacaaaataaagttacctcccactgttttttgcaatcttgcctggatacctaaccagagaactaggatgttgaatgctctgggggaacatcctaactcaggtataaaacaaattactgtatccaaaggaaaacagaattctgtgatctgtgatataaataaaatgtggcaatttcaagagctagaagaaaagaaaaaagacagttaaacattttatttcctgcaatgaaggagtcttcctaaactattatgtctgtataagtaagttgatgattgatcagtcttgatctaatgatatatttttataagtcatctgtgtggctaatatttcaaataactacagagttaaaatactcccagcatactgacttggttattattgccttgtgtttttcagccaccaccaaagatccctgacaagcagttagatgaaagggaacacacaatagaagagtggaaagaattgatatataaggaagttatggacttggaggagagaaccaagaatggagttatacgggggcagccctctcctttagcacaggtgcagcagtgatcaatggctctcagcatccatcatcatcgtcgtctgtcaatgatgtgtcttcaatgtcaacagatccgactttggcctctgatacagacagcagtctagaagcagcagctgggcctctgggctgctgtagatgactacttgggccatcggggggtgggagggatggggagtcggttagtcattgatagaactactttgaaaacaattcagtggtcttatttttgggtgatttttcaaaaaatgtagaattcattttgtagtaaagtagtttatttttttttaatttcaagtgatgtaatttaaaacctaagttgtgtttcaaaacagcaacaaaactgtattgtattttttttgctgtaattaactgtataatgtaaacctaattattttatcatggtttaaattttttgcatatttgctttatcttatgctgctgatttttttaactgaatttgtaagattttgtttatcaaagcaactattatgtggtgacttgcctatatcatgaattatttaagatttttatagttttttttaattagaatttatttcagatgttttgttcatgatactatccttcagggttatgtgcttatcaatgaaataaccccagaggagtgagggaaaataacgtgtagccagttatattcaggaataactactgtaaatgatgaacgtgttaggagacctccaatatttgctacttgccaatcctaatttagttacaagaattggtaggcaatcctacttaattttggcaaaagccccgtcatctaaatggcagaataactcagagcatgtctttgaagatgctgggcgtctaccaccaccttatgtccccaccctacccaacaaaaataagtaaaaagaatatggtgtattctacaaatttgtggcatgctcaaagtttatgatcacataaaggcaagaggatacttcatgaataatacatttcaatgcaaataaacagatggttcacttctactagctatgagcctgtttttgtatacactgagttaatctactcaggctgtaggtcccagcaatgttctagagtctggtctttccctttcctgcagcttcgggtccttggacctttcctgtttcctattacttggagtgtctgtcagttgagcaccagttgttctggtgtttcatttgattctacttgtagcataatcatttatacgagctattgggaggttccaaaccctacctagatttgtgtaggtgatgtatcaaatgagcaatataccgttcatctgaaaatagtagcacacagccatatataggatatcattttctaaggactgtttcttcacattgagcagagcaggcataaatggtggttatttagtctaagtcttttatttttttatacctgattttcaacataacacgcaatgtggatgtcgagtagtgttaagaatggtgctgctcctgacaagtgtatgttaactgtttacattttctatctgtagaattatttctctattactgaacttttcctaagtaaaatgtctttgaagtctcgttatttctgaaaaaaaaaa

SEQ ID NO: 24383 - DNA, 3088 bp, Homo Sapiens
aaatggacataatatatgaaacatttttagacatcagataacaggcagcataggattttgatccctgcaagaaggaaaacaaggtaaattctacaactgtcccagttttatccctggaggcagtatccatgtcacactcaggaaggggaaactcacacagagtccacgagtagaggagaaagagattcacgttcagggaggccagccaagttggctagaacatgtagtgtctggaaaggagggagctgtaggttgacagagccatggagatcgcctctttgtcaaatactcacctgcacatgcatgaaagggccaggaaagaaacattagaggttggctgggcatggcggcatggatcctgagccaccatggattccagattttaacaggacaccaaaaaaccttgtgaaaagttggactttttttttttttctattagggaagaaaatgctgaagaaaaagcacaattagatccagaaagtacactttttcatatataataaaactccatttgctctgtaggcaactacatttatttagaatctttggaaatatcttacacatacaaacattcagcagttttattcttcctggcttacttccctctcatgctaattccgattagtgatatcattactatactgaaatggcccaaatgatgaggccaaatataagagcactacttctttcacaaatttccatcttcatagcctctcagcttgtcagtaagttctgaggcaaaaatatctttttggaaaggcaattacgtattagtcatgtgagcggagacagaaccgattatgacaagtactagttctatcaatttagtgcagtaagaagtataaagcatcataattccttcatcaatatacttttactagcacgacctaaaaggataatgtataaagaaacaccacaacaatgtattatctcaaaatgtgtatttaatggccattccatcaaaataaagcagaatcccatttcaaaactattatatgtatatatatttttaaggtgcattttcaagttttatttgggtttcatttcttcttggcttgcctgaggtgttcttgcaggtacaattaacacaaaatgttctgagggtagtagcttttcatgcactgaagaatgagatcctaacaacattgcacatcttggatacattagaaattttaaaagccatgtgtaatttcagaaaacttaataccgtcatgaaagacattttcaacacaaaatttaggcactctatactttggaatagccataaaatattccaacaagagttaatgcactttgtgattacatctactcaaagataattctcaattaaaatctatacttattaaataacattttaaattagagcccattaaattttgataattactgtgaaatatttgcagcattgtgttgtagttaaataatgctgaactacttctattactgactctagtactcatccttcatggttttttttctttttcgagacagagtcttgctctgtcacccaggctggagtggagtggcacgaacttggctcactgcaacctccacctcccaggttcaagcaattttcctgcttcaacctccggagtagctgggattacaggcgcctgccactgcacccagctaatttttgtatttttagtagagacagggtttcaccatattggccaggctggtctcgaactcctgacctcatgattcgcctgccctggcctcccaaagtgctgggattacaggcgtgagccactgcacccggccatggtacttttaaaaacagaggactctatagcatccaccagtaagcatctctccctttttcttgctaatatatgaataagattgccaataatcaacttaaaggtattcttgtattttctgctgtagttgatttcttagcatgcaaaacttcagcaaatgggagtctccttggagatcaggaaacatcagccatgcattttcatcacatattcctaggctcaattcatttgctcactttgcagctaagtatgttgctcccttaggttcttgcagtccatgctgctggcctgactactatggaggtaaagggaaatataatcaaatatgtcacccactttgcataaggccaaggccacctagaccttgtctgacttgagacaaaacttgctgatctctgccgtgtggttctggggcttctacctccttttcctaagaccgaggggtgggaatgatgcctgccaactgaaatgccattaattccaggtgatcttcctggacttgaatgtaatttagcactgttagaattcagaacatgtatgctagttgttcctgctgagaataaggttcatttgctcagtggtatgcatttatatggcacagaaaacaattagtctttcagaatttttagaagattacagtctgtaaattgactcatcaaaatcaccaatgactagcatataaagatctatccagagaaatgaatttgagacttatttgaccataagtcatacagaagacagcacagtaatttcccataggagaatctggtatttcatcttggggatcactggtaaattaattacactgctaatgttttcttgcttacttgaagagacaattagcataagtaaatcatgagtgagatgacaagttgcttaacatttgtttctgtccattggatgagatctgaggttgctgttaagcctcggtgttagtaggggatagggagagaagagtataaggaaagagaagttaactccagttttggtaaatataatcagaaccagttggttaaaatcagaatactgggctgggcgcagtggctcacgcctggaatcccagcactttgggaggccaaggcaggcggatcacctgaggtcagaggttcaagaccagcctggcccacatggggaagctccatctctactaaaaaaacaaaaataaacccagtgtggtgatgcatgcctgtgatcccagctactcgggaggctgaggcaggagaatcgctccaacctgggaggccgaggttgcagtgagccgggattgcgccattgcactccagcctgggtgacagagtgagactccgtctcaaaaaaaaaaaaaa

SEQ ID NO: 24384 - DNA, 5178 bp, Homo Sapiens
gtccacaagtcctgggtctgggctctagccagatgggggtggagtggaggacacagggagtccctcatgcttgagtcccctggggccaccttgaggcagcctatcccaatgcatccccgccccactatccgggtggggcgcagaagagaggggagcccttctccgctcagtctccaggagactcagggcctgccagttctcaccagctgggaggtggacaaggtgatatggggagagatggaagaggaccgggaggagaggtggagagcggacagaggggctggctgttgagatgggtggacaggaggaaggacatctgggaggaccaggtctctccgctcctcttggcctcatgtgtctccgtcatgtgtggatgaggacatcagacctccctacctttccaggttttgtggggatcactgagatgaggcacgggaagccatcttgaattccctccccatcagtttgtgttctccctccttttctctcccggtaccttcctccttcccctccccttcgccccccttactttccccaatctctaataggacttcagtcagagctgcattgacaggcagccctaggcagccagataaggaacctcggcaaaaggtttttgagcatgaatgagcttaaagcttggcactagagcccagtgctggctgggttcgggcacgtgctggctaggacaggaagccaggcctggagcaagccctggtcaatggctacctggcctcaggaggtgaaggaccttgtcccaggctgggcagaggtcaggagactcagccccgagctagctggggacaagggctgccactgcacttagcactttcaggctccaaggcccagggcaggtgctgaggtgcctgtcttggagccgccatgcagccccgtccccacagctgtctaacggcagggggcagggaagttacaatcctaatcattcacattttctgacttggaggccctctcctaggtatcagcacatttactcctaactacacacagggaggagggaattattagcatcatccccactgcataaatgaggatcttgaggttaagcaactgcttagggtgcaatacacatggcagtgttcacaatcctttcagtggcctcatcagcagctctcaacaggcacgtttatagggaagaagtcaagagaaggggaagcctgaaagccacaggtgagactgggaaaggccaagagagggtcccagtcactcaaagggagccagaagtccaaggagggtcccccgaccccgacttgtacactggagaagggctgcccctacttcaaggccacagggcagctgcaggccacagtgtccacagcgtccttggtaaagtcgactatattcacatctgcattctgtgagtgcgggtataggtgggagtggaggagggaacttactttctgggtttacgggcacggtgtggtgtcagcccatttggaagcaaagcctagatatggagggggccagacgaacaggacctgggaatgcacaggaccccctgaagcaggccggggatctgagtgatcttgctgtatctaagctgacattggaacatgaacagtctgaaatcccatgagccccgctgccctgcacctgcgaccctcaggctagaccttggactgtctacaacacgagtcaggcccaacccgccctggaaatcatcgtaggaggttccagctcagtgcccagagacagcccccacatcccaccccatcaggtcagctcaggctggagcaggcatatgagcaacacccctcattccacccccatacacatgcataagcccatccgcctgcgccctgccagtctgaccagcacagtcctggggacaggagcgtggtggaggagctgcaggtgggggccagagaagcctccacagagagcaaaagccagggtcagccagagacaggacaccagaagagacaggagatcagagaccagaggaacagagaagaggccccagagcaaggcaaggaacggccaaggcaccaggacatggatgcagtggagccagggggacgtggctgggccagcatgttggcgtgcaggctttggaaagccatcagcagggcgctgtttgcagagttcctggccacggggctgtatgtgttctttggcgtgggctcagtcatgcgctggcccacagcacttccctccgtgctacagattgccatcaccttcaacctggtcaccgccatggctgtgcaggtcacctggaaggccagcggggcccacgccaaccccgccgtgacgctggccttcctcgtaggctcccacatctctctgccccgtgctgtggcctatgtggctgcccagctggtgggggccacggtgggggctgctctgctttatggggtcatgccgggagacatccgagagacccttgggatcaacgtggctccacccacgtcctctgctctccgactgttcccaagttcttccctccacctcgaggcctgcctcactcgccccttctccatttcgtaaccatctgtgttccaccttcttcccccaaatctcctccttccacacctgctgccagtctcctctcaagcaagcctcctgaaccactggccccaaccaacccactggtggggtgggaggagcaccactcacttctgcagggagcaagggtccagagcagatatggacccctctgcacaggcctcccgaagtcctgaagctgggcggcagtgaggtgtcacccccttccagctgaggagaccaggcccagtggcaggggtttctctgtctgtccgtgggcagagcccgcgtctggtccagagtaactccctctgtccaggtccggaacagtgtctcaactggccaggcggtggcagtggagctgcttctgaccctgcagctggtgctctgtgtcttcgcttccaccgacagccgtcagacatcaggctccccggccaccatgattgggatctctgtggcactgggccacctcattgggatccacttcactggctgctccatgaatccagcccgctccttcggccctgccatcatcattgggaagttcacagtccactggctggaccaattttcaaacttggataaagaaaaagacaaacagaaatagacacacacaccagcagagacagaaacagcaatagccaggactcctggctaaaacgggggaagtgagaggaaagaggcgggggcgggtgaggagactggccccaggccccagccacggctgcagagcctgggctcagccccagggagggcagggagagcaaggggcaaggtccccttaccttgtgggcttgggaaacacgactcgtggttctcaaatttagcaccttacagacagttgagggagacctgggagatcaagtcggcactggggaagcaggcagcggtcccagagccaccctgtggtcctgatagctcctgggtggggtgacgacatccttctcctcaggtcttctgggtggggcccctgatgggagccctcctggcctcactgatctacaacttcgtcctgttccccgacaccaagaccctggcgcagcggctggctatcctcacaggcaccgtagaggtggggacaggggcaggggcaggggcggagcccctgaagaaggaatcccagccgggttcgggagccgtggagatggagagtgtgtgaaacagcctacgcctggccgcgcccttgggcttcctgccttgcaggacctgcctggaggttctccctgggggtggcgggagggggaggcttgaccttttgtcctgaccaggtgggctggaggggacaagccctatccctggcattacgtttctaggtagaatctgggagtgaatttgtcccattccctctctgtagggcttccccacctctcggtgggacagagcagaggaaggcaggggatttaggatcgccctcccatcctctcacccactggaccccgtaggagtcctgaccccagatgcccaagtcttgggggagaaaggaatgggagcccagacagccactctgcttagacatgggagctatagggacctcagggagccccagcttcttacccacccaggaaacccttggtccagagaggacaggctttctggaggaatcaggccctgggacagcctctgagctcctgggggtgtttctctgaccttgggtgtggttttggggggtatatttcctccttcagactgggggcttcctgaggacagagactgctctaccaatagatctttgtttgttttgagacagaatcttgatctgttacccaggctggagtgcagtggcatgatctcggctcactgcaacctctacctcctgggttcaagggattctcctgcctcagcctcccaagtagctgggattacaggcgcctgccaccacgcccagctaattttttgtatttttagtagagatggggtttcatcatattggtcagggtggtctcaaactcctgacctgaggcgatctgcccacctcggcctcccaaagtgctgggattacaggcgtgagccaccgtgcccggcctctcccaataggtctttattcctcaatcctccaaatgctctggagaggcccccacccttgagaagaactgacacagagaagaacattttctcaggctcgtagagaggtgggatagaggaagggaggtttgagccagacaggcctttcccagggaagcctcctcccaggtgcttgccccagctcccaccccacagcccactctcaggcaggaacaatcctcagaggggaagtgcccatctagccattgactcatgacctgggtcaaagaagccgtctccaggctctctgtcagcattacaggatccccagaaagctgttgaataagccctaagggtggtaggaacccaggagggacccaggaaactaagatttgagattcagtgcctctgaaagactaccaaaatctaagttggtttaatagttaaaagctgctgtagatttattctgcccacaacttgggggtcctttctggatctcggcttctccagctgtaaaatggacacacaatcctcctccagggactgctgtgaaatcaagaaatcggaaaatactttcagaagttaaaatgctagaaaaacaaccccaataaatgatgattattgttaaaaaaaaaaaaaaaaaaaaaaaaaaaaaaaaaaaaaaaaaaaaaaaaa

SEQ ID NO: 24385 - DNA, 2856 bp, Homo Sapiens
acccaggactgttcagggaggagccccggtcagactcccacgtgtgaagaccgggccccaagtggcaagggctggcctggggcgggcagcttgggtcctggacgttgataggaagcggaaggggaatcgcgggaagctggcccaggtcaggtccgcaaaggcttctgaagaagaggaagggcgagtaggggcacctggacgctgatggtggccaggatgctcagctggccaggagggcagcacctgctggggacggtggccctgccttcatgcccaggacaccagctgggtccagctagcagccactgggaatcagaggaatggggcagagctgggcattcaggaccttgaggacacgtgaccccacccgcccaccgccactatcaggccccgggaccgcactgacaggaaaccttccgtcgtgagggagcacttcccaggggccgcagggacgacactctccagggaggccccagcaaccacaccatcttcttgctgtgagaggtctcaccccgggctacctcctgtcactactcactgccctggggtccgtgggcaagttgcccagggtgggggtgcctagccaggtgcagtccccgccccgcctagtcctcggcgtcacgcaatgctcacctcgcctcttccccactaacatcccagactttaaaattcagtaaatcagatgtacaccgagcctgcagtctcgctaggatgctttactcctccacaaacagcagccgccgacaggacagcttgtgaacgtctccgccttttggggtgtccggggagaggaggtggagctgtcccctcccagtgtcaggcctccttggtcctcatgtgcaccttttattcagagagcttgggcccccttcctttggagctgggcccagggcaggtggctggaatgcagaggacaagggggctggggcctctgcagggccattcccaccgcagtctctgccacggcccggagccctgggcccagggccacgcgggctccctctgctggcaaagccacaccctgcaccgcatggggtccactgcccctttccccacgtggactctgcgtgaccccaggaactgcagcattgaggtggtctcagtccctccctcaggtctggtgggcattgtgccaggggccaccttcgggacagctggccttggcaccgtctcccaagaacccagctctgtgcatcccgtggccccaccagaaacccaaggccacaccgcccaccagctgggtgtggtcaccattcatggagggccggctggggccaggctcaccacgcagagtttgccctccggtgtgatgatgcatgagacacagtaggcccccctgcctgtgtgtgcagggggtgtctgtgggggggccctgctggctggactttgggtttctcctgagctccccttagcccccaagtcaggccacggaggcctgagtaggacccatgggctgtgtgtgtcactgcaggtggcgtgctcacaactgcactgctggtcggcaggtggccagggttgcaggcccgggcctcgggccccacctcctctggaggggtaggatctccttcgtgcagcccctgccccctaccctgttctccggagtgttggcagatctgagcccacggtcacgtgagaggagatgcctcttgcacactgagcccaggcccagctcacggagcaccctgcaggtggcagcggggcaccaggggctcattcctggtggcctcagtggcttctgtggacgactcagactcacatgagaagctgggaggagctccagctctgcaatcccgagagggcagagcgggggccctggccacaaccctgctccccacatacccgtctggcagaggctctgcctcccctctgcccatctctgcacaccaaggctgagcacagcacaaggcctcacggagagggtgaaaaggcactgccgtctccatctcagtgccaaggaatgcccctttcagaagccctcgtctgagaagtgctgccccttatgtagccccaggcattttaaaatctttgaatctgcaccaagtctcagaacagctctggccccggagtgctccgtccaggccgctgtgaaccggctgtccccgcgtctcctccacctcccctgacacaatcctggccccgactcagtccacccagggtgcagtgcagaggctgatacccgccaggacttccttgccaagggcccggccacgtcacaaggccactgcacgcttttcgacatgcacctggaaatcgggaagggccatgctgcagttgcttctagttgagacgagaagagcgacaaggttgtgatccacgtggcaggtgttcagaaggctgggggcgggcagcgctggggagagccctgggtacttcgaggagaccccgaagggaggctgctcccacacctgcgccagtttccaccctctctgtgagcagggctgcggtcacctcccacatctgaagagaaccaacctgaggatttcacgctggctgcgtgccagaccagtccctgacaggttgtgcgaggcccttcgctggacagcccattgctggccactggacggagaggcagagggggctgaaattcgggcccatgcctctgtgagcgatgacggagcaacagctctccagcacgtgaagctctccagacagctgttcgtgagaagccagacagaggcctggggtctcagtccagatttctggggagtggggtgtccaagcgtgggccacgctgctgggagccacctagggaagcaggtcgcctgtttctatagtgacggtaataaaccaagtcaattttctataaaaaaaaaaaaaaaaaaaaaaaaaaaaaaaagaaaaaaaaaaaaaaaaaaa

SEQ ID NO: 24386 - DNA, 1816 bp, Homo Sapiens
ggaggccgaggaggcccccggggcccggccgcagctccaggacgcctggcgcggcccgcgggagccagggccagccgggcgaggggacggcgactcggggcgctcccagcgagagggccagggggagggcgagacccaggaggccgccgccgccgcccgccgccaggagcagaccctgcgtgatgccaccatggaggtgcagcgcgggcagttccaggggcggccggtctccgtgtgggacgtcctcttctcctcgtacctgagcgaggcccaccgagacgagctcctggcccagcacgcggccggcgccctgggcctgcccgacctcgtcgccgtcctcacccgggtcatcgaggagacggaggagcggctcagcaaggtgtccttccgcggcctgaggcgccaggtgtccgcctccgagctgcacacgtccgggatcctgggccccgagaccctgcgggacctggcccagggcactaagacgctgcaggaggtgacggagatggactcggtcaagcgctacctggagggcaccagctgcatcgcgggcgtcctggtgcccgccaaggaccagcccggccgccaggagaagatgagcatctaccaggccatgtggaagggcgtgctgcggcccggcacggccctggtgctgctggaggcgcaggcggccaccggcttcgtcatcgaccccgtgcgcaacctgaggctgtcggtggaggaggccgtggccgcgggcgtggtgggcggcgagatccaggagaagctgctgtcggccgagcgcgccgtcaccggctacaccgacccctacaccgggcagcagatctccctcttccaggccatgcagaaggacctcatcgtccgggagcacggcatccgcctgctggaggcccagatcgccacgggcggcgtcatcgaccccgtgcacagccaccgcgtgcccgtggacgtggcctaccggcgcggctacttcgacgaggagatgaaccgcgtcctggccgaccccagcgacgacaccaagggcttcttcgaccccaacacgcacgagaacctcacgtacctgcagcttctgcagagggccaccctggaccctgagacggggctcctatttctttctctctctctacagtgactgggcttcctccgtgcagttttctgcaactctggagaagtggaggcatacttgtgtgtctgggttgtttttttttttgtttttttttttttttgttttgtcattctttaattttgttgttttacccattcgttatctgtggaaaacgttttaagttgtcatgtgacagaaacttttcctttgtccatcgaggtgtttcataagttttttggtgtgttttctgggtcgtctatgtgtcatatggttttacttttctctcctttttcgttttcagaacatttttctgtctgttttggattcactgcttccattttacagaatgtcactctttagactctcagtccatcatgccatcgggtactcttgttgcagtgtaatttttattacatgcggttatttccctaacgatgtgctattcacgttcatcttcaaactcattttccatcagccagtgtctactatttagtgccctggctctatttcggtcctcctccccgggctttccctggctgctgtgctggccaaaagcatgggctttattctctccattggctgctgctccaccttagaggtgtgacctcactagcgttgactgagcgagtctgttgtggagaagaactttttgtagtaatttactaggaaaaattctgaacaagtaaaatatgaaggaaaaaaaaaaaaaaaaaa

SEQ ID NO: 24387 - DNA, 3487 bp, Homo Sapiens
gtggcggtggctgcggcgacggcagaggcgaagggagccggatcgccgacctgagcgggaggcggcggtggcggccatggcggcagatggagagcgttccccgctgctgtctgagcccatcgacggtggcgcgggcggcaacggtttagtggggcccggcgggagtggggctgggcccgggggaggcctgaccccctccgcaccaccgtacggagccggtaaacatgccccgccccagggtaagccggggcgggtccgaggtgctccccggggtactctgaaagccggggagggggcgggaccgagggcggaggcgggtcccagtcgccaggtgcgggactgctgcacctgtgactgggcgaggcttccttccctccgtaatcgcgaccacagcctagggacggaagggggttctgagcaacctgatagaagtgccaattatgagaagccctccgagcttggtcagagggttgaagatcagaaggacttccctaccaccgtggagcatcagtgggggtgtaagtgatcccagcccttctatttgcttcctctccagcatttcccccgtttcccgaggggcatccagccgtgttgcctggggaggacccacccccctattcacccttaactagcccggacagtgggagtgcccctatgatcacctgccgagtctgccaatctctcatcaacgtggaaggcaagatgcatcagcatgtagtcaaatgtggtgtctgcaatgaagccaccgtgagttacacatatctatgaaatgggccctgtttcctggatcctctttctgatgtcttggttctagaccctgaccttccggctattagccaagtgcttttgatgatacccaggtttcagttccaggtgtctcacacagccatttccccagaagccactcaccaaagctaatgttcactttctctcacttttacacctagcctagttcctatttgcaaatctcatgatatagtctttcttttatttctccttcctggttagcaccttatttttctgatctcataaagtgtttttggagggaagtggaggggattgggattagaggtttgcttgctgatgaccctattattctctagccaatcaagaatgcacccccagggaaaaaatatgttcgatgcccctgtaactgtctccttatctgcaaagtgacatcccaacggattgcatgccctcgtccctactggtaagaggcataaggtggggaagggcctaagtggggaactggaaagtcaaaaaaggatgagcgtatacagagaatgtaaaggtgagagagcctagtgtttatttaggagaaaaggctttgaagcatgtgcctcaggaatgttatagctgtctttctcgtttctcaataaaaatattgagatgaaatgatgtcgtttcggagaatagagagccttggggactgggtgtgttatcctgaggtcggaggggaattggggacctgaagtttaaacagtgctctttctttctcaaggattcttgagggtatacagttgggggacagagtatcttaagtacagagaagtcgagtgacttaatagacagggagtgggggatgtggaacagggactgtgaagatttttaggattaaaaatttttcaaacacaagtttgaaaatacaagtctttttcttttgtatagcaaaagaatcatcaacctggggcctgtgcatcccggacctctgagtccagaaccccaacccatgggtgtcagggttatctgtggacattgcaagaatacttttctggtgaggaaggggtattgggaaggggaggggaaaggagactaagagtcatttcgagtatatttcttagagtaatggtaatgacccctgaaaggtctgtcctatgggaacatgttctgcatccccaccccaaggttctcattgagggagaccctgcttgtgctattatttttgttttctttctccatagtggacagagttcacagaccgcactttggcacgttgtcctcactgcaggaaagtgtcatctattgggcgcagatacccacgtaagagatgtatctgctgcttcttgcttggcttgcttttggcagtcactgccactggccttgccgtgagtacccttgccccaacctctttcattctgcagcctcatctccataggctaagatttgggaaactgctaccctaaaaaaaagtggaagaaacttaggggactagtttgttttgttttaagatatggatgagctaaagtgcaaagtggctgatcaaacagactttattactactacaagagtgaaaaacagccttcctttctctgtaggatgaggataggacagtgaaattcttaatttaagagttgctatttttcaaacctggctcagttgtcagatattaagaaaaactgagatacagtgtgggatgggatgagtatgttacgcctaagggaaggaagctgatcagctctgcctttaagaaggtccctgagggtggctacatgtggataaggaacaaggactgaagcgtgagttattactgttcttagaactaataggaggtagtggagaccaacattaaccccatctttcttttcttctccctccttatcttcatcagtttggcacatggaagcatgcacggcgatatggaggcatctatgcagcctgggcatttgtcatcctgttggctgtgctgtgtttgggccgggctctttattgggcctgtatgaaggtcagccaccctgtccagaacttctcctgagcctgatgacccacagactgtgcctggcccctccctggtggggacagtgacactacgaagggagctggggtagttaaaggctcccggggcttctagaaggaagccaagcagctgccttccttttccctggggagaggtaggaaggaaccaggccctcacttaggtttggaggggcagataagagcactgctgaccatctgctttcctccaagggttgctgtgtctagggtgaagtaggcaaaacgttgcccttaaaactgggccctgaagacggttccagccttgtccttcctgtgtgctccctgagagccattcctgtcccttacacattccagggcagggtgggggtgggtagccctgggggttcccctccctcttgtgcaccattaggactttgctgctgctattgcacttcaccagaggttggctctggcctcagtaccctcagtctcctctccccacattgtgtcctgtgggggtggggtcagccgctgctctgtacagaaccacaggaactgatgtgtatataactatttaatgtgggatatgttcccctattcctgtatttcccttaattcctcctcccgaccttttttacccccccagttgcagtatttaactgggctgggtagggttgctcagtctttgggggaggttagggacttatcctgtgcttgtaaataaataaggtcatgactctaaaaaaaaaaaaaaaaaaaaaaaaaaaaaaaaaaa

SEQ ID NO: 24388 - DNA, 5785 bp, Homo Sapiens
cccagacccgcccccacttcccccctcaccctcccctccggcagcctctcccatggccactgctgcgggctgtgagcagagccccgtccttgagcagattgacctcatctttcagtcctgcagctgggctgagcggggagtcagctcagaagacactggcctggggatgagactcgggtcatgcttcagagggaagaaagagcttctgaacagacaatgctgtcttaaaggtggcatcttggtgctttctcatgccttgttttctttcatcctcagaatgtgtctgggggtgagaggacgggtgtgactgctgaaacttcctttcttggtgattccacatcactcctttctgatccctgagcctgtgccacgccctgtgtgatgtgccggggacaccagggtgaatacttacaggccctgttccccttccttcatgaaacagcctccttcgggctgggtcactgggcactggggcctccctggtcttccaggattgcaacttcacagaatcccttttccataaggcacatgaaagtgactgtgacccgcaacgggagccttgacaaccagccaattcagaacacagaccttgacatcggaaggccccgagttcaaatcctgccttgctccctttcagctggaaagctgtggtcaaattacttagcctctccaagccagttttcccttctgcaaaatgaggttacacaagctgccacctcacagaatgagtgtgagaattaattcttattttccacaccctcatttgacagggggagaaacagaagcccagagagggaaagggcttggttaggatcacaccatgagttgggggttaagtcaggatggggtaggtcccctctttctctgggtgttcctctcccccatcccttatctcaacataaatcctccccagttgcccaggttgtccaggcgattcctggcacacgtcctggggcctgccctccacctttagccctgctctggcttctgcagcagcagagtcctgggtgaccagcagtggcccctggccctctgagtggtggtggagggtgggggtgcactgcagcaagctcccagcccagagcagcctggccatataagggaaggagctcagggaggcctcctggctcaggcctggcgagaaaacccagacagccactgtttattttctcctccccagctcacccacgcctctccaagcctcccaacagaagacagaggtcccccacagccagagacatttcctgaagacatggggaacacagaggcagaaacagcccatccacccaggagctgtcccccacactgccgggagccggcacccagagccgccaggtaaaactgaggccacctggttcaacatcacctttcacagaaggggaagcagccacagaaagaagggcctcgttaagaagtggaacctgggacccccaagcggtgtctctcatcctgactggggatccagagtaggagggagcctttggtggggtaagtggaatggggtggggggggggcggggtggccatagacccctcttctcagtaaggccctcatgtgaaggaggcaggggttgggacaagtgctaagtatgcaagactcaagggaagagctgctggagccaggagaagcacctccctcccggcccctctgcccctcctcatagcccagctgcactgactcctcctccaggaagccttctcagcttccccaggggtgggaacctttttgtcctccaggtgtgcttggctgtcctttcttgggctctctctctctctctctcctcatcccacttgagtctgccccctattcaccttgtgaggggaattttccttctactcaatctgaccgaggtcctccaggtcaaggacagcgaggctctcagtcccacttccccttggcacatagaagaggcagtgcgctgaagggacaggtgaaatgattagaccctgcccccaaaccaaggcctggccaattggacagggcatgagacattcagcgtagaggttaaaacgagggccctgggttaggaaccccagctcagttctcagctctgtacccttggaaaattcccttcccatggagctttgtggatgcacaaggacttgcacaaagaaaacattcaatatccaggactataaaattccacaaatgattgtgcttattacattcattatcacgatgattattccagacacaaaggaacagaacgaggcaccaacagcaaggggcaagcagattcaagggccacagaggagatggaggcaaacaccttcccctggtcagaggctgtgcctcagcccttctccctgcatcagtttctccttcagaagcatgggactacctcccatctagttctcgtttctaaacctaggggagatgctatctttgctgcaataatcttagcctacatcttggaatggaaatggccttggtggaaatggtcttcaactcctctggtccaagctcaggccctgtgaccctggaacaatccccttcctggtcctccatgtaggagcaataacattcccttgccagcagcaccagccattctgatgattaaatggtatcggactctgttttccaaactcagtcattcagatgccccctattttatttcttccatgtctgcaaatgattataatatttttaaatgtaggatgagtcctttttattacacatagaaatagctactgtaaatagcaaactctaacactgtgcctaattaggaaataaaggtaaccataaatacagtaaaaatgaaacaatgttattatggtttaacctgatagtgtggcttgcaaggccctgggcctgaagcctgggcaataagtgagagttagaaaggtgtcaaagacatgatagcagcaaactgaggctttgtaccccacggtaaataggactgaaagcaaattcacagggagcaactgatccattccacaacagaatgctccctgtcaattcgctttccattctgttgtgtcctgtctcccagcagagactacaaactccccaaaaccacttacccaccagctgcacgtgagaagccaaaggtagtttatgtgaaagggctttggaaataatcacgcaccaagtgaaggcagaggacacaccttgtcagcttagttctcagcagcaaatcatctcttttccaggataaccctccctgattcttattgaaatctctttgctgaccacactaagctcttctctctcaggggcagtgggagccgtggagagtggaatagaccagctgtctgtgacctgcgagggagtccaatgtcggaatcactccccagccaaatgcacggttttaaaaaatctatttatttatttatgtagagaccaggctatgagactggctaatttttcgtatttttggatagagacaggatttcatcgtgttgcccaggctggtcttgaactcctgggctcaagcgatccacctgcctcggcttcccaaagtgctcaggattacaggcgtgagccactgtgcccagccaccaaatgcagttgaaaagagtttctgcaagataattccacagaagaggaaagcagttatctggctgggaataccttagacagaggctgtcctctacacaggctgtcagaactgacctactgacctgcctgctggcatgatagaccagagggaaacactctttccactcttcccagactgagtgtaagagacagacttttttttttttttttgagacggagtctcactctgtcacccaggctggagtgcaatggcaagatctcggctcactgcaacctccacctccccgggttcaaaccattctcctgcctcagcctcccaggtagctgggattacaggctcccgccaccacgcctggctaatttttgtatttttagtagagacagggtttcaccatgttggccgggctggtctcgaactcccaacctcaggtgatccgcctaccttggcctcccaaagggttgggattacaggtgtaagccactgctcccagccttttttttttttttattagagacaagggctccccatgttgcccaggctgatcttgaactctaggctcaagcgatcctcctgcctgagcctcccaaagtgctaggattacaggcatgagcactgctcccagctctgtttttgtttttttaaggaggtatattttttctgttctctctcagccctgaagaaaggctacccatccccttcagacattcctgaaaatatatgtcatccaacatcaaggccaccacagtgaccactaagcaatgcaagaaggtcctctggggtgccctgagatcttggcagggcaggaagagtgagaaggggctttgcctgctcacctgaaagttcccacccaagccgggcccagaaaacaaaatgaattatctacatggtcatccaatcagccaccaaatggcattacctaggtccatcatcatgtaccaagccacaggtcagacccagggccccccaaattaacaagacacaggcactgtcctcaggaagtggagatctagccaggtcagacccacacacaaataacactgatactagagataatgagattgggaattatgattcagccattcaacctgggcttatgtggcatctacaccacctggccctgatttcagtagtgagcacagttgacagggtcccttcccttcacaggtgagccatgtagtccacaagtggaggtggtcgtaagtgaaaaccacattaccagcatggtaaagggttagaaagagggcaccgggtgggcgagaacatgaagcagggggtgctgatggctaaagaagtaaaggaggggctgggcactgtggttcatgcctataatcccagcactttgggagaccaaggcgggtggatcacctgaggtcaggagttctagaccagcctgggcaacgtggtgaaaccctgtctctactaaaaatacaaaaattagccaggcatggtggtgcacgcctgtagtcccagctacttgggaggctggggcatgagaattgctttaacccggaaggtggagtttgcagtgagccgagatcgtgtcactgcactccagcctgggcgacagagggagactctgtctcaaaaaaaaaaaaaagtcaaggagggtttcccagagtggccacttgattagagacctagcacaggaggaagagatgggcagggagagtgacggggagcagcacagtccctgggagcccgaagtgggtgggcacagggctccctaggagaatggaaggacatctatgagctgtagcccaagaggaagaggtcactggggctagatgcggcagaccctcgcaggctttgggaagggcttcagaattcagcctgagggcaatggggagcccttttgggatattaaacttgagtaagatatgagcatatttgcatcttgaaaaatcattatgggaagatggctgggaagagaggaggagtggcagaagaaagataggttggagacaattgattgctcgatgatataaaatgttaagtaccatgaatgatgctgttaggctggaatgcgccaagcataaaggtggggcatggcatcaaaaggtaggtcaacatattaaataattccatgtattgaaatatccagaaaatatatagacagatctatagagatagaaactggtctgcccaggactaggggttgtctaaggataaggagcttcttttttggatggtgaaataacctaaaatatattgtgccattgtttgcacaactttgtgaatatattaaaaacctgttaattgtactcacaaaaaaaaaaaaaaaaa

SEQ ID NO: 24389 - DNA, 3533 bp, Homo Sapiens
tgactgtcagtgtggcatggtgaattacgctgaactctcgtgtattttataagacaaagtacagccggttgtttaagacacgcgtcccaggtgtggatgtgtgggtgcttaagacagcagactgctgctttgctgggccaggcctgggtttatttattacaagcagttcaggaagcacagacatcacgttgttcacttgcttcactgatgaatgtaataattgttctcgttcatgccctttgcccctggtgtcggggctgtccacactggggaccattggtgcccccatgattattagctccctgaagcctggtgggtcgtcagggcttctgtccggtgtttaaagacccatcccagacaagcccaaaccacctcagtttgaagagacatagagggacaggcagacggggcctcagagggatccagcctcatccagcctcccggcaacctcaggagagcaggccagatggggcctcagagggatccagcctcatccagcctcccggcaacctcaggagagcaggcacagccctgctggttcccttccagtgccgactcccaggctgagtcgctttgcagcagctgaacgtcgtggttgcattttggtctctaccgtgaggtctgtattttcttggtgtgcaccggtgtctgcctgtccgctgtctcgtacccaggaggcatgtgcagttctttgtgtccctacagggcctctcttccatcctcttctcctttcctggtgctcccagcctttcccatggaacagcccacagttgcaggattttctgtctttatgtctgtccccctgatcctgaagcccaaaggtggtaggcgtgaagttacagaagtctgtgtcttcaggtacaatgagtaggtggccaatggccagcttcttagccccgtcctggtgcttccccgacccttctgatccgctcaggcccctgtcctcctcgtacacagctgcagctctccctgccatgtccacgcaaggcacaagggtgtccccagcagaactgcaggcctggatgctggtatccagcacgttcaagccaggtggcctccggcaggctcttgccacaccttcgtttccttatctgtaaaccagggatagtggtctcccggcctccccaggacccagccctccctggtctccccacctccccgtggcccctgttttgaggctgagtccgctgcccctcagtgttagatctcctctgagaggaacctgtggctttgctgcccatccctacttcctgccctcgactgggcagttccttaacagatcagggatcaggaacatgactgcccttgctcatctgctggccctccacatttgcccagtccctgggtctctctgcctccgtttcctccctgtttgatgaggataatcacgaagcacatcaggactgttgggttagatgaagtcatgcaggtaaagctgctgtgcagctgcagacatgtcagcatggctggcagtctctgtgcttggctgagcctgctcagagccacagtgacctcctaggtgtcctcctcccctgctcccatcgtggcatctgggactctgtccccctgccaccctccagggtctcctactgcttctgcctgtttgctctctcctcagtctccctgcagaagagcttccaagtggaggagacacatgactggggtggcaccgtccaagagaggcagtagctgcgagtccagtgggtctcagggcaagccaagtcaaagggctggggcctaagacaacagggataggagtcaatgcacatctgtgagataatggggaagcagcatcaacatgacttggggaccccctgggcccacagctctctgcatggaaagggaggaaggagccaagctggtgagcacccagccagtgttttgtggacatgaacagttctggttctggagagggatcttcgttgagcttgatagagacatgtgctgtcggactgtagatgtcatgagtttctgaggaaaggtcagcatgacaggcaagtgacagacatcagagtcagtaaagatggagcgtggggaggcggggcctgggagcagagaggaggggcctaggaatggagaggtggggcctaggagtggaagggtgtggtcttggagtggagaggcggggcctgggagcagagaggaggggcctaggaatggagaggtagggcctaggagtggaaaggtgtggtcttggagtggagaggcggggcctgcgcagagaggcagggtctctcagaagacccctttttgggatccagaatcactaggagcagggtaagctgtgtggcatcagcgcttgcatcctgcagggagttacctaccagggctgggccgggactggccagaaccttgacagatgaagtttgaccagaccaagtgagtcctcatggtctgatacgtaagccagatgtgagttaccaatttgcaccaggggctgtgctcccccagtggctggcctgccctccaccatataacccactggcagcacctcaccgtagatgggacctggctgggtgcccgttctagtcttcagcccagctccccgcttggctgggcccagcagctggcctctcagggccctatgcgcccctcggatgggggtccttgaggggagcttcatgtgcttgtcttaagtcgatgggtctggacaagggtcttagatgtggcacagtcagccagccggtctgtgtgtgcgtccctcttcagagggggccccagcttctgcacggtccgctcacgtgcccttccgcagcctgggcactgcaggcagggggagggggtgccacctaggcaaggccagctcggcagtctgaaggaacggctgggcagccacctctgaccacacgtgtgtccgtgccggcgtggttatctgggctgcctacacagttcacgctaacatcgtggctcacgctaacatcgtggctgttgatgccacgtgttgtgaggcctttgtcagctcttctcctgtattccagggcaactccaacaacattgccaccgtggacatctccgcaggcttcgtgggcttagacacctacgtggaaatcccagccgtgctcctgacagcgtttgggacgtacgcagggcctgtgctgtgggccagccacttagtgcacttcctgagctcagaaacacgcagtggttcagcactgagtcatgcttgcttctgctacgcactgatttgttctattccagttttcacgtacatcgttttggtgacatctctgcgttatcatttatttatatggagtgtattttctccaaaacttctctacgagggaatgcacctgctcattacagctgctgtctgtgtattcttcacggcaatggatcaaaccagactcacacagtcttagactaagctgaacactggaaaaataatacatgcttaaagtctgctgttattctaaaatgaaagatatgaattcaacaaagttgatggataactttctttgactgctctacctgaatttagactaagcagtaaatagtttaataaaagatcactttaatataaaaaaaaaaaaaaa

SEQ ID NO: 24390 - DNA, 2810 bp, Homo Sapiens
atccctctagggacctaaatactaggtcagctttggcgacactgtgtcttctcacataaccacctgtagcaagatggatcataaatgagaagtgtttgcctattgatttaaagcttattggaatcatgtctcttgtctcttcgtcttttctttgcttttcttctaacttttccctctagcctctcctcgccacaatttgctgcttactgctggtgttaatatttgtgtgggatgaattcttatcaggacaaccacttctcgaactgtaataatgaagataataatatctttattctttatcccccttcaaagaaattacctttgtgtcaaatgccgctttgttgagcccttaaaataccacctcctcatgtgtaaattgacacaatcactaatctggtaatttaaacaattgagatagcaaaagtgtttaacagactaggataatttttttttcatatttgccaaaatttttgtaaaccctgtcttgtcaaataagtgtataatattgtattattaatttatttttactttctataccatttcaaaacacattacactaagggggaaccaagactagtttcttcagggcagtggacgtagtagtttgtaaaaacgttttctatgacgcataagctagcatgcctatgatttatttccttcatgaatttgtcactggatcagcagctgtggaaataaagcttgtgagccctctgctggccacagtgaggaaagtagcacaaataggatacagttgtatgtagtcattggcaacaattgcatacaattttactaccaagagaaggtatagtatggaaagtccaaatgacttccttgattggatgttaacagctgactggtgtgagacttgaggtttcatctagtccttcaaaactatatggttgcctagattctctctggaaactgactttgtcaaataaatagcagattgtagtgtctggtttggtttggacagtagtgctttctatcatattgttgtgtgcaatggtaatttgttctactggccaaagcctctttcagcagtgccttgccatcatgcttaaaagtttggctagtatatcttgctggatggagccttgaactccggcaaggattgaaccatctgacttccaaatttgccttcccctctggacctcactattaacaagcaaacctttcagggccctcttagctctcagaagctatgtatgggctttcccagattttaaagctgctgcctcgagaactactcatttctctcctggtcagcagacagaaatagccatactaatctcatagggctcaaatgcatcttcaggcagcagggaaccaagcagcgtggcacaggccttcttgactggaggaagagcttgctggcatggtgggcagtattccaggagaggccatgtccgtgttcacttcttggcacatttcagttccgttttcctcttgtttaaaactgcctctttagatgtggatgccttaatgctgtaacacatttgaaaacattggcaatacttaagttgctgccatgattacagatggaattattggctaccaaagagacgcaattgatgatgagaagcatgattcttgcttccatataaccaaagttaatcttaattgcaatttgactccgtttccttggtagggatagactttcttcagattccaagtgctctcttaaatggcaaattaagttaaagaatactactgctccattcccctcacttattctccagttaattgcttgtcagttccatttcaagaaagcagtgatgttccaggtttgattcagttttcctgtgcacactattgccaaatttttttttagcaaagattctgcactggaacgtagacagttggaaacagtactacctacctagaggttatgtgttttctctttctccccgctttcacctctttctttcccaattcaaaacagccaagtgagccctgttctggtattttgaatcattagagaaaagaaagggagtggctgttttgagttgtcctttctttgcagaaaggagaaaatgtgattgtgttttttttttaccagcctacttctaagtgtcactgcctggtttttctctttttcaaggattagaactaagaggacacaccagcatcggagtgtattaagcccctgaaacacatggtagctagggactgaacacaggaaccgtatgacagcagcacaaacccccaaaggatgttcctgccttgtgggcccctgagccccttgggagactgagaatcatgaccagattcatccagaactgctgcagtgttaagtgaaaatcctctgtagttgttctgcagaggaaccttccttccattagaaaatttctgctcaatacagaatggtccacatcacccaaagtgcactgttggagatgctgtgaaattaaaacctctttgtacctgagacatctagattcacctcaggaggcctgaaggaaatgtgtaacttgtgggaaagaactagacaaccatttaggaattctctagatatactcagcctaacccagtggcttaacacaaggagattggctttgatctttttttcttgtggcatcttccagcaagttagaagtctcatgggataagactgcagttcccctggttcaatagctggaacagtgattttaaatgtccctttttctggatcccttgtaaacatgaaatcattccatggatggctgccttataattttgtctctttccactttaattgtgaatggttaaaaaaatgctgttttctgatattaaatttttattagtgcataccttaaaaaaaaaaaaaaaaa

SEQ ID NO: 24391 - DNA, 3485 bp, Homo Sapiens
cacaaagaaaaaagaaatacctgtagaagcgcatcgaaagctcctggaacagagttgtgtctcatatttgcaaagatgcagaaaaaataaacccgggacatccagctttcttttcctttcttctttgactattctgagaagctatgcgactaggagcacattttaggtaaacacgtggcttgagtagccataaggccactcttccctgtcgtgtgacccgcgcctgggcctttaagagatattggtgtttgaaaagggaggaatctgtttgccctcagatatttagttcaactgcctgcattgcttcctattttgttgtccaactctgtagtagttagcactggccttaccaacatgtaaagaaattttctttactgccccatgagtagttggaggcaaagagaaatttttaaagcgcagaaaaaggcctgcagggagatggaatttgttctgccagagaaacgagatgatagctgtatttaataaagttactgacctcttgtcaaaatttaaaacgcaaaagaagatgtttcaaaatgcagagaatgtcagaaaacaaaaactacagggaccagaccagtataatgtttagttttcattatactaacttttgtctagactggagttgattcactattttttctttaactcctcaggaagcaaaccttcccgatgatgaagacttcttgaaggatttcatgggtgatttgggatcccaggaccatttggctagtgtgcctaggtgaccacatgattgctgttttaccaggaatgcagcatcccattgacaaaacaagtgctctgagaaggtttaaaatactacagagaatatgggaacacagaccttgaaatttagctgagttgtaacagctgaaactccaagaggtgtcttccttgtttgaggtgaaactagtgttgcttccagagggcagctggaaaccgtaaagctgtttggaaatctttttgactgacttgctgacaaagaggtactgtgatgcattttaacaatatctaagttgatttttttttaaatcaaggaaaataaaaaccaagcatgaatgctatggtatgtgccccttttgaccatcctgggctgattaacatcatttaaatcaaagtaatcataaaaaggcatattctacttcaattatgtggtcaaataagagtaaacacacacactcacacatgctgaccccaattgccagagcattactgcactataaattacggttaattcccaaattatactactgtttatcttatttaacaagtcagaaagcacttttaaaataacttgagggctacaaggtcattctattaatgtcattctccattcgggttgtaggcatgtggaagtacccattaaaagataagttagagtttaaatactgataaacaaaaccttttattgcaactggacagtttctggagagttagcggaagaatcttggagtttcctttggtcagatgaatacaacatttcacttttgcagcactatttagaatgtactccatggttctcttgttcccaacttccaaaaagaacagaaaactttggtttacacagaacacgggcatctgaggcaggacctcttccctgccctttgatctgactcacacctccacatatgacgtaatcaacccaaatttgacaccaattcactcttttctgcaaagggcatattttgaaacaagggacagcctgagggcggctataatgagaatgttcatgggggttactgggtccctaattctgaacttgcttatgacacccagagtgaatagattcagattcagaaccttctgagaaataacccaaagaaaatttgttacccagccaattcttcgaaagcttaatatcaaaatatatcttttcaagaagaaaatcgttagagagaagaatgtggaggggagagaaatgggtttctcattgatatgatattttgttaaccatttcattttgaattattcaagttttggttaatattgtattcttttttcgtaactattttaccgtgagagtaggtcattgggttacttagatatttatttttacacagttattagtcttcagatagttttattttacttcatatgattttagtttttgtcagtataattttaaatcatgtttttcttggtcatctctttgtgtatattgtgtaattggattttcattgactgcaagtggagtgtttgccactcaattcagtactcagtactatggtgacttgttttcaaataagtctcagatacacatttagggagcctttgctggccgaatatagactctgtcaggacagcaggtcccctgatctaagaattttccccaatggttgctctaaaaatgctgctattttgctgttcactgtattgcacttagttaaaaagaagataatgtgaaagatgagagcagttttttaaaggatcttttcatatacccaattcccttattttcagatgtcccatcaattttagatatgaaagctttaagtaaaagtgtgtatgcctttctactgtcagaacaggatggatgcagcctgggtcagatttatttaagataaaaatcatgcagactcatcattcatatcataggtgaaaaatgtaaaaaccaaatggtttccactaaagccaccaagatcttttagaaatgtttgcacctttggtggtggcacaggaaaagagaagaattcagctggagtgaattctagaagtagatatcagaaacggggcatgaagaacaggggaactgggtggcatcagactcctaaagaagtgagttaattttccttcccttccattcagattcatgccacagctccatatcttgagtatgtgtaagaggtgagttccttcttcagccaggggcggtggctcatgcctttaatcccaatgctttgggaggccaaggtgggaggatcacttgtgccttggggttcaaggttgcagtgaaccatgattgcaccactgcactccagcctgagtgacagagcaagaccctgtctctaaaaatatatataaaaagtaaaactaaagaacttcttgcctaaacctgaattaccgcaatttgctgagtgactttgagaaaaatcagactgtttagttcagtcgggatgaaaagcttgcgattgcttcccacaagaatgggcaatagtgacggctgcaaggtacttttatttgttcatgaaagaacgacaatttttcaaaatgtaattaaacataatagaatgttttaaactactgggcactgaaactggaagaaaaaggaggctttattgaacattcccctttttcagttggttcaaagttcagcactgtggttatcattggtgatgccagaaaacattagtagacttagacaattgctatggcagtttctaaacagagctttttctatacactatttgcaactggagtgcaatattgtatattctgtgttaaagaaataaagtatttttatcatttattaaaaaaaaaaaaaaaaa

SEQ ID NO: 24392 - DNA, 4621 bp, Homo Sapiens
ctaggactccggctacggtggctctgctcttgggatgagaggactgggcccagcttgcgaggaatcatgaagtggacacagggaggccgacccaagtctccctgctgtcatttcaggaggccgaattttttcccaatcccagagaaggtgtcagaggcctggttagcagtcttgtcgatggtttcctgggtggtcttggccagctggtccatggctggggaagggcgggagagagggcaggtcaggcagggcccgggaaccacagtgcctgtaggcttagcctggcctgggtctcccgggggacctgcttggggcattgtggacagagggctctgcagaggagaggatgtgcctgggccccagccgggatggggcggggagtgggaggtgtgctggggttgcccgcctccctccagccccaccagacctttctgccccgcctctgtggcctggtccaccacttgctgagctgccgctccggccgctgacactggaacagagagatgtggcttttagcccctgttgaggcaccaccgactacaggtgccccaccattgccatgcctctgtgtcctccagagtattcggtggtacaggtccaagggatggatgccatggagataaagtccctggcccagggccccccagcccgaggggcaggagacctttccatgcctctgggatgtttttgtttatttctaactctgagctccttctctgtgggggaggagcttccctttccatctccagggctactgagaaaatgttggacagaggaaggaaggcagggcagggccaggctgcagctagcatctggactgttggctaatgctggtgatggcgcagaagacccttgcccccttttacagcttctcccctagaagcctggcccagatgcctgaattcccacctttcatgcacttagccctggggcttgcagttttgccaggtccttactgcctcctccctcctgtggcctgcccggaggggcacacaagcaaagccagtgcctctgtggacaggcagcttaagacattaggagacaaatgaaggaaggaggcaaaacttccaaggccggactatctcctctggaccagagtttcggcctgctgggaatggagtcaccagccccgggggggctgacaggtggctcccgcctacagagctgtaactcatccctgctgctgaacaggaaagggcctgccttacccagatcccatcctccggaaagggttagtcaggcaagtgtgctgagaggcccctgggaacctcgtctcgattaacccatcagaaagcagcccatcctttgcacccagctctcagatggaaaagtgaagcccagaaggaagggacctgacacggaggcttccttggtagcatttcagtctcaagggaagaactgtgggcctcccctggagcactggtgaagtaaggggttggtttggatattgtctcctgactgggatatgggcaggactgacagggagctggagtcctaacgaagcctgggctaggtgcaggaagaaccaacccagtggtctcctgacatctcccacgcccccaccgcagctgggtcacctccagaatacggaggagagagctggaggtggaggaactaaggaccttctttgccaggtggggacttaaaggtaaggcgacgattacttttcggcgatgggggtgggatggaaacaaagccctttgaggtctggggcagcctctggtggcgcgcgcgggtttaagtggtggcgggccgcgcccgatccctgtcctggaccttcaccctctcctgagggcctgggcgggccgcccagcgccagcatggcctccttggaggggctcccgcagtgcccgcagcgcagctccggctcctccggagcctctgttccgctgcctccctgcgggcaccatctgtctgctcgccggggtgggcgttctgcctgccccctgcgtctcagtggaggaccgagccttccgagccaagctgccggtccaggaacttgcggaccgcgccgacccgctgcttctgcctgcgcatccacgcaggtgcccctgcctgagccctaggtcgcgcgctatcctcaccggcttcctgggcggtcccctccacctgttgcttcaggtcctgcaagcccttgcttgccatggcttcggggtatctgtggagtcgtcaagagcagctggagcgacgttggatcctgcccagagtggcgatgccaagcgccagctccggtttttaaggcgccccagggctggcctgccccgcgtaggggagagggcgcggggcggttcccgtcatacaggctccggggagtggccgggccctgctccagagtccgcagggcagggagcacatcctggcctaagacgggccgcggtgggaaaggggcagaccgaaccagggaccgaagaggtgccaggacaggggtccagagaggagctggaggcaggagaagggcgcacaccacctcccagctcatcagccccagccctccctttctgatcctgggcgtgagcgctgggtcagctccagggcaggagctcagggctggtgttgaccttaatgacagcagtggtcttttactgagcatttgtcttgtgccaggtgctgcctaacgctctgcagtctcttgtataatctttacaaccacctcctgaagtgggtatttttgttgatagcatcagtgtataggaggaaactgaggcagtgaggtcggtctcacccaaacgcatgtggcagggacttggatcctcgaatctgcctaggtgcctgtaaaccctagggctctggcatcatcggagcccccagccccaaacagctgcaggggcactgctgactggctctctgcctgtagccagagacccagtggatgcagccggagagggcctggtaaatctttcccctgagagggcgagatacaggtgtgtgcacttgcagaccatgcaaccccaagggggagagggcagtgtgcctgtgcagcccaggcaaggagattgccgtctgtcaccgaagccttaggaagttgggcaggaagcatggctcagggagggcaggaataagcttgggcctctcaggtcacctttcctgagatggggcaggcaaggcgctagagagtatgacttgtggctgttaggaggggacttagggacctgggcctgagtggagaagatcatccttgggtgcagcaaaacagcttgcaagatacattcccctggcacacaaggggtgtaggtcaggccccacccagctgggtatactcccactccagagtaggccttcaggacctggaggccagtgcacacccaccctgcctttctgggtctctctaccgcttcctgtccggggctgtttcttgcacctctgctggtgtctcccctattctggagcgctgggaagcccctgccacacaggcttggtctgctggcacataccctgcttctagtgctgcggggtcagcccctagagggagttgtttggaagtgcacctgtacacacacacacacacacacacacacacacacacacacacacacggtatggattaatggagatgaggtcaaccctgggcaaagggaagaggcaggtgatgagattaggtggaggaagggggagggagcaggtctcaggcaaaacaaagcggcagcaacagtcctcccagccccccgcccctcctctcccagagcgaggccttgccctgggagtggccatatggatgccttggggactctggggagcccatctcagccatgccctgcctggctggccacagccctgccagccctcctgaaatcccaccggtagtgcccaatagccaggcaggccttcgagtgttccagtttatcacaggctggtggtgccactgggctccaggccccatgggcaatgagctgtgagctggacaggaagggagcagcctctgtgggaagagacagccagcccccagcagatggtggtagagagagctccacgtggccctagcggcaggcactacagtcaaacctctgccttccaggttcaagcagttctgcctcagcttcctgagtagctgagattacaggcatgagccaccacccccagctaatttgtgatttcgctttctgcagtttcagttacccattgttggggctcagaaaccaataccccgaaatatagtggtgtgacattctgaactgaagaagccttaaggtctctccgaccagactcccacaggccccccaaccctttgtctcttccaaagcatacagtgaagttgttctctgaagttcctcatctgccttaagtctggacccaccaaagaagaaaacaatgaccactggtcccttcccggagttttctctgactgaactgctgtcacaggaagaaagactgaagcctgctcacatacctggacagattttgcaaaccgttgtctgctctgtgagcccaacagactttgtcccaggccactgtatgttcttcaagcccactgaattcccctgaaaatcatttactagccccctgaaattacccacacttccccattgctcatctgtaccccatttcgtggtggggcagtcactctgatttccccttgcatgctaatgaatgtgtattccatttctaaaaaaaaaaaaaaaaaaaa

SEQ ID NO: 24393 - DNA, 2843 bp, Homo Sapiens
gaatcacactcaggcagtctctctcctttctgaacagagatgagccctaagatacctggaagattttgtttttaacctcacattaaggaaagcacacatcaccttgaaagagctaaacttgacgtcctacagaatttctctaacttaacatgttgagtctctgagagtgcaaaacttgaaacaagagaaagtggcctgcctggcatcctctgcttattgaatggttttatttaattctcctttacattgccaccttaacaatccttccagctacgtatcttaaaggatgtgatggagaagttatcaactggtgttttcagacctcagttggatgaacccattccactgtatgaggcaaaagtttccatggaagctgttcagaaaaatcaaggaagaaaaaaggtagtgcacatcagcgccctggatcgcatactttccagaagcgtcgctgaacctggcgactggactctggccgaggacctggcagaagcgccagggcagggtcaccgctgggacagtgggcgttgacggccacccgggatcgccgctgcgggctgcgtctcgcgggctgcccactgcgcatgctccgctcggaaccggcgggggcggaggcggggccgcgtcgggggcgggagctcggcgaggcgccacgtcaggggcgggcccggcgcgcgcgggaagtctctgtagggcggccggctaccctcagccgccgcgcgtcatggccctttcggtgcccggctactcaccgggtttccgaaagccgcccgaggtagtgcggctccgacggaaaagggcccggagccgtggagctgccgcctccccgccccgtgagctgacggagccggcggcccgccgagccgccctggtggcggggctgcctcttcgccctttccctgctgcggggggcagaggcggtggcagcggcggcggcccggccgctgctcggaggaaccccttcgcccgcctggacaaccgaccgcgggtcgccgcggagccccccgacgggccggcccgcgagcagccggaggccccggtcccgtttttagattctaatcaagaaaatgatttgctatgggaagagaagtttcctgaaagaacaactgttactgaattacctcagacttcacatgtatcattctccgagcctgatattccgtcctcaaaaagtactgagttacctgtggactggagtattaaaacgcgactccttttcacctcttctcaaccctttacctgggcagatcatttgaaagcacaggaagaagctcaaggtcttgtccagcattgtagggcaacagaagttactttgcctaaaagtatacaggatcccaaactctcctctgagctccgttgtaccttccagcagagccttatctattggctccaccctgctttgtcttggctaccactgttccctcgtattggagctgatagaaaaatggctggaaagacaagtccttggtcaaatgatgcaaccctgcagcatgttttaatgagtgactggtctgtgagctttacttctctatataatttgctgaagacaaaactttgcccctatttctacgtttgtacctatcagtttactgtcctgttccgagcagcaggattagctggaagtgacttaatcacagctctcatatctccaacaactcgaggtttaagagaagctatgagaaatgaaggtattgaattttctctgcctttaataaaagaaagtggccataagaaggagacagcatctggaacaagcttgggatatggggaggagcaagccatcagtgatgaggatgaagaggaaagtttttcctggctggaagagatgggtgtgcaagataaaattaaaaagccagacatactttctatcaagctgcgtaaagagaaacatgaagtacaaatggatcacagacctgaatctgttgtgttggtaaaaggaatcaacacctttacattgctcaattttttgattaactctaagagtttagttgctacctcaggtccacaggcaggacttcctccaaccctcttgtcccctgttgctttccgaggtgccacaatgcaaatgcttaaggcacggagtgtgaatgtgaagacacaagctctttctggatacagagaccaatttagtttggagattacaggtcctatcatgcctcattctctgcattcactgaccatgctgctcaaatcttcacagagtggatctttctctgcagtactgtatccacacgagccaactgctgtatttaacatctgcctgcaaatggacaaagtacttgatatggaggttgttcataaggagcttactaactgtggtttgcaccctaacactctggagcaacttagtcaaataccgttacttgggaaatcatctttacggaatgtggtgctgagagactacatttataattggagatcctgaacaccaaagtaagcctaaaaggaatctttgaggaaaaaagccttctagcaaggaaattcaagattcttgaagttgaaggaatatactgaaatgtttataaacataacttttactacagtagcatctaaggttttaaatgtgttttactattttcagattagatttttagatataaagatgaaaaactcagataactcaaatgagatatctatatccctacaacctaattgtatattgagcagaaactgaattaatatgcttccttgcaaatgggaaatcacatagcagttaccccatggcattgtgactaatggcatcagggcaaaaatatgttactttacgatttacctgttagcaggttcttgtttcataaaggtagaaaataaatacagacaacatctaaaaaaaaaaaaaaaaaaaa

SEQ ID NO: 24394 - DNA, 4199 bp, Homo Sapiens
caaggacagcctaaacatttatagcgggtccatgctttttggctttctagtggcaaccaagtagcttgatgtgattttaagtgagttttacacatgctctttctcttatatatgatctcagacataagaggcaatttaaggaatcttgtagcaaaatctaaagcaaagaattagaaagtataaaaaaattctcaatatatcttttggtaaggtagaacatacatatctgaagttgcattcaagtacatggagatatacatgtatttcttctctcgagtgttgcctgtgtatatgtatgtgtttgtgggaagctatgcaaatacagatcctgtgagtagaaatatacctttattttttgaaatggtttattttacaacccaagataaagtagaaatcagggtaaaatatactgtttagctacttttttgagacaggaaaggaatgacattcctaattcatagcaaagagtgcgtgtaggtaacattatttattcacatatttgtgcacacaaaatccactcaaatatccatttaaacagctaatatatttatatgtactactctaacttgtatttttactaaaattatttatgtatgttatcactagtctcaaaaactgatgcccaagttaaatgtggacatatctttttttacagtgaactaaagcaaaaagaccggggtatatttaaaaatatatttaaaatatttaaaaaatctaaatttatgccatcttctgggataatgccaaagacaatttcaactgtagcactctgtataattaaacatgttttatgtcattgttcttgaattttttgttgctttattgttcattagaattactctttttttttttttttttttgaaaaaagagtcttgctttgttgcccaggctggagtacagtggcaccatcttggctcactgcaacctctgccttctgggttcaagtaattctcatgcctcagcctcccaagtagctgggattacgggcatgtgccaccatgtctggctaatttttgtatttttagtagagacagggtttcaccatgtgggccatgctggtcgcgaactcctggcctcaagtgatccacccgccttggcctcccaaagtgctgacattgccagcattacaggcatgagccactgtgccgagacagaattattcaattctaagtaggtatgacttctgcttgtgtcttaggatttggggcatttctatgcagaagaaatactgttcattttagttagttagtgataagtatttagttccctaatgaactgcgaataataattgctgaaaaccagttacacttggggggtgtttacacttgggagttgcttctggatccatagctgagtagaagacatgacagagtgattaatcagatctcgtctacagacttccatttatactgataatgaccataatagatgggcctgtcactaggctaagaaatttacatgtgtttttatttaatctttccaacagtcttacgggatgtgcgtactgttattccagttttgcagatgaagaagctgggatttagtgaagttaaataactagtaaatagagagggctatgttccatcctaagttgcttttgattccaagactgctatggtattttgagacggctgatttggtacaaaagaacttgattgaaatcattttagtctaatctcctggagccatgctactttctatggtactatattaaaaagagataatacacagatagcagatacaaaggttgaaatcagaaacctatagtattccctgtgtaataatggatttcttgttgcttttataataagtttttaaatagctaatgcatacacatagtaaaaaataattcagatagccagagtgtctatagagtgcaaagtatgtctttttcccacaccagcctcctattcccccacacagaagcaaccattgtatctaaattgtggttattcttccaaatatggtgttaacatgaatttatttttatttttattttgcccaggctggagtgcagtggcgcaatcatagttcactgcagtgccaaactcttgagctcaagcaatcttcctgcctcagcttccgtagtagttgggactagcaagcatgtgtcaccaggcccagctattatttttattattttatagacctggtgtctccgtatgttgcccaggctggacttgaactcctagtgtcaagcagttctcctgccttggcctcccaaagcactgagattacaggcatgagccaatgtgcctggccattagttgtttttttaaaaaatgacatttgagcatcaattcttaagaaaactagaagagccagatcttgtaccagattgacatctgaatgggccaagctagagaaggctggagaaggatgcagatgacacaccttcagtgatgagagtgtcagatagggcgtcagcattacccaccatccccataggggtaacagaaagcccttgcagcaggtttgtcttgtttcatagatgagaaaattggttacttaggtcatgtagggagttgcaggtagagcagaactcagatgcagaaatatgcttctcatttttccaattctacttcagcacaaatgacttgtggatttgagagtgtaacgaagaattgtacaattgaaattgtacaattccaaaattgactaagggtttctactggtaagccagatagcaaacttcagaaagccaaagtcagtagcagatattaaaaaaaaaaaaaaacttttaaaatacatctttttattttagaataaatttagatttacagaaagcatgtgaagatattaaacagagttcccatgtatgctacacccagtttcccctattattaataggtttatccactatcaggttactctggaaggaagtcactatatgcagcctacacataagaagtggaagattatgttccaccttcctgagggctaagtaaattatttggaatgcttctgcacaagaaatttgtctgtcattctgtttatttattttttcagtcaaaacttatttattatctttttgagactctctctgttgcccaggctggagtgcagtggcgtaatcgtagctcactgccgcctcgacctcctgggcttgagccatcctcctacctcagcttcctaagtagctgggactacagacacgccaccatgccctgctaatatttgtaattttttgagagatggggtttcaccatgttgcctaggctgatcttgaactcctgggctcaagtgaacttcctacttcagcctcccaaagttctgagattgcaggtgtgagtccctgtgcccagcctcagtcatttacatatataaatatggctcatggattatatgatttttgggttataatccagtactacagttttattgctcaaattgttccaactttggccattgagagctcttttagttgacttctatatctctttaacacactttcatcattgtgttttatttttgttttctattttgagcgcttcgctttcctacactgcaggatgctccagattcgccttttatatttcctgcttcactcctagaatcagctttttctccatggaagtccgattctttttattggaaaatagtattggaaaccaagatctgggtgccagttgtaattgcagctcttttaaaaccaaatattgaatagaaaaggaagttttagccattttcccaggtagtactaaattaagtcattgcaataatttatataagttcactggattgaatggaatgatcctaaggatttttaagggaaaattctaagaattcttattactgttttctgttacttttttaaaaaaattctgtaatgatatcacttgatttgattttttttgtgtgtccttgaccaaaaaacttgaggcaaaacttcaaaacatggtaatttgaagcaggttgggattaactctgggatattggaaagactttaaactccattaggaaaattaacaagcatgtagtctataaaagacatgtaattcatatttatataaagaataatactttcttccaccttcagacatctaagatttaaaaaaatgttctttttaaaagaaagaatagtactttcttttgtatcactaaacatttcaaatttgtgtattgaacagaggattggggagaatgttttgttaaggaaagagaaaaacaaaaaaatagtaaaaaaaaaaaaaaaaaaa
